(19) United States
(12) Patent Application Publication
(10) Pub. No.: US 2003/0143668 A1
(43) Pub. Date: Jul. 31, 2003

(54) Guanosine triphosphate-binding protein coupled receptors

(75) Inventors: Makiko Suwa, Tokyo (JP); Kiyoshi Asai, Tokyo (JP); Yutaka Akiyama, Tokyo (JP); Hiroyuki Aburatani, Tokyo (JP)

Correspondence Address: FOLEY AND LARDNER, SUITE 500, 3000 K STREET NW, WASHINGTON, DC, 20007, US

(73) Assignee: National Institute of Advanced Industrial

(21) Appl. No.: 10/017,161

(22) Filed: Dec. 18, 2001

(30) Foreign Application Priority Data
Jun. 18, 2001 (JP) 2001/246789

(51) Int. Cl. C12Q 1/68; G01N 33/53; C07H 21/04; C12P 21/02; C12N 5/06; C07K 14/705; C07K 16/28

(52) U.S. Cl. 435/69.1; 435/6; 435/320.1; 435/325; 530/350; 530/388.22; 435/7.1; 536/23.5

(57) ABSTRACT

The object of the present invention is to provide a technique for efficiently extracting GPCR sequences from human genome sequences, thereby comprehensively identifying novel GPCRs.

An original automatic system for identifying GPCR sequences is disclosed, and 1,215 novel GPCRs are successfully identified from the entire human genome by utilizing the system.

### DETAILED DESCRIPTION OF THE INVENTION

[0001] 1. Technical Field of Industrial Application

[0002] The present invention relates to novel polypeptides belonging to the guanosine triphosphate-binding protein coupled receptor (hereinafter, abbreviated as “GPCR”) family, polynucleotides encoding said polypeptides, as well as production and use of the same.

[0003] 2. Prior Art

[0004] More than 90% of drugs developed by drug industries in the world so far, have targeted interactions in the extracellular spaces, and a majority of these drugs target the GPCRs that comprise seven transmembrane helices (Baldwin J. M., Curr. Opin. Cell Biol. 6: 180-190 (1994); Strader C. D. et al. , FASEB. J. 9: 745-754 (1995); Bockaert J., Pin J. P., EMBO. J. 18: 1723-1729 (1999)). Therefore, GPCRs are one of the most important targets in finding genes for designing drugs. The GPCRs are involved in the signal transduction induced by specific ligands, such as adrenaline and acetylcholine, and characteristics of the binding mechanisms thereof have been actively investigated by conducting experiments (Watson S. & Arkinstrall S., The G-protein Linked receptor Facts Book (Academic Press, London)).

[0005] However, despite the vast data sources, such as cDNAs, ESTs, and microarray analyses, that have been obtained, only a limited number of novel sequences of the family have been discovered (Lee D. K. et al., Brain Res. Mol. Brain Res. 86: 13-22 (2001); Mizushima K. et al., Genomics. 69: 314-321 (2000); Matsumoto M. et al., Gene. 248: 183-189 (2000); Marchese A. et al., Trends Pharmacol. Sci. 20: 447 (1999); Lee D. K., FEBS. Lett. 446: 103-107 (1999); Yonger R. M. et al., Genome Research. 11: 519-530 (2001); Horn F. et al., Nucleic Acids Res. 29: 346-349 (2001)). Even the large-scale classification of known GPCR sequences, such as GPCRdb (Lee D. K. et al., Brain Res. Mol. Brain Res. 86: 13-22 (2001)) and collections by PSI-BLAST (Josefson L. G. , Gene. 239: 333-340 (1999)), have not led to a broadscale elucidation at the level of the entire genome.

[0006] Therefore, it is important to elucidate the GPCR families as a whole by scanning human genomic sequences, wherein more than 90% of all the sequences thereof have been already determined (International Human Genome Sequencing Consortium. Initial sequencing and analysis of the human genome. Nature 409: 860-921 (2001); Venter J. C. et al., Science 291: 1304-1351 (2001)).

### PROBLEMS TO BE SOLVED BY THE INVENTION

[0007] This need in the art led to the present invention, and the object of the present invention is to develop an automated technique for efficiently extracting GPCR sequences from the human genome sequences and thereby inclusively identifying novel GPCRs.

[0008] Another object of the present invention is to provide a use for the newly identified GPCRs. As one preferred embodiment of the use of the novel GPCRs, this invention provides for the use of GPCRs to screen drug candidate compounds such as ligands, etc. Moreover, as another preferred embodiment for the use of the novel GPCRs, this invention provides a method for testing disorders based on mutations and expression aberrations of the novel GPCRs as an indicator.

[0009] Furthermore, this invention provides ause for the novel GPCRs or molecules that control the activities thereof, in the treatment of disorders.

### MEANS TO SOLVE THE PROBLEMS

[0010] To accomplish the objects described above, first, the present inventors carefully evaluated analytical methods for sequence search (Altschul S. F. et al., Nucleic Acids Res. 25: 3389-3402 (1997)), motif and domain attribution (Bateman A. et al., Nucleic Acids Res. 28: 263-266 (2000); Bairoch A., Nucleic Acids Res. 20 Suppl: 2013-2018 (1992)), and transmembrane helix prediction (Hirokawa T. et al., Bioinformatics, 14: 378-379 (1998)), and then, developed an automated system for identifying GPCR sequences from the whole human genome. This automated system comprises the following three steps.

[0011] The first step is to predict genes. More specifically, translation of the genomic sequences into amino acid sequences. The prediction of a gene can be achieved to a certain extent by resorting to 6-frame development of nucleotide sequences, since most of the known GPCR genes contain no introns. On the other hand, for sequences with multiple exons, it is necessary to predict the entire gene structure using a gene-finding program.

[0012] The second step consists of a three-fold analysis of the amino acid sequences. More specifically, this step comprises: (1) searching for corresponding sequences in known GPCR databases; (2) attributing the motif and domain; and (3) predicting the transmembrane helix (TMH). The former two procedures are used to find closely related GPCR homologues, while the TMH prediction is used to find remote GPCR homologues. Subsequently, candidate sequences are screened by taking the analysis results of the three analyses as a logical sum. In order to maximize the number of candidate sequences at this screening step, the present inventors have used the logical sum of the results of the analyses.

[0013] The third step is to further refine the quality of the candidate genes by eliminating overlapping sequences from the second step, and merging fragmented sequences separated by misprediction.

[0014] According to this automated system, GPCR sequences can be efficiently and inclusively identified. A further great advantage of the automated system is that it can identify even GPCR sequences consisting of multiple exons and remote homologous sequences, which have been difficult to find by conventional methods.

[0015] Using the automated system of the present invention, the inventors have successfully identified 1,215 novel GPCR sequences from the whole human genome, such sequences guaranteed with a high confidence to be members of the GPCR family. The discovery of such novel GPCR sequences enables the screening of ligands, antagonists and agonists, which are expected to be useful as drugs. Additionally, GPCRs are thought to have important functions in vivo. Thus, aberrations in the expression and function thereof may be the cause of a variety of disorders. Therefore, it is possible to analyze and evaluate such disorders using as an indicator inappropriate functions or expressions of the identified GPCRs. The identified GPCRs, polynucleotides encoding them, and ligands, antagonists, or agonists of the identified GPCRs may function as preferred therapeutic agents for such disorders.

[0016] Accordingly, the present invention relates to novel GPCRs and genes encoding them, aswell as methods for producing and using same. More specifically, the present invention provides the following:

[0017] (1) a polynucleotide encoding a guanosine triphosphate-binding protein coupled receptor selected from the group of:

[0018] (a) a polynucleotide encoding a polypeptide comprising an amino acid sequence of any even-numbered SEQ ID NOs from SEQ ID NO: 2 to SEQ ID NO: 2430;

[0019] (b) a polynucleotide comprising a coding region of the nucleotide sequence of any odd-numbered SEQ ID NOs from SEQ ID NO: 1 to SEQ ID NO: 2429;

[0020] (c) a polynucleotide encoding a polypeptide comprising an amino acid sequence of any even-numbered SEQ ID NOs from SEQ ID NO: 2 to SEQ ID NO: 2430 wherein one or more amino acid residues are substituted, deleted, added, and/or inserted; and

[0021] (d) a polynucleotide hybridizing under stringent conditions with a DNA consisting of a nucleotide sequence of any odd-numbered SEQ ID NOs from SEQ ID NO: 1 to SEQ ID NO: 2429;

[0022] (2) a polynucleotide encoding a fragment of a polypeptide comprising the amino acid sequence of any even-numbered SEQ ID NOs from SEQ ID NO: 2 to SEQ ID NO: 2430;

[0023] (3) a vector comprising the polynucleotide of (1) or (2);

[0024] (4) a host cell retaining the polynucleotide of (1) or (2), or the vector of (3);

[0025] (5) a polypeptide encoded by the polynucleotide of (1) or (2);

[0026] (6) a method for producing the polypeptide of (5), comprising the step of culturing the host cell of (4), and recovering the produced polypeptide from said host cell or culture supernatant thereof;

[0027] (7) an antibody binding to the polypeptide of (5);

[0028] (8) a method of identifying a ligand of the polypeptide of (5), comprising the steps of:

[0029] (a) contacting a candidate compound with the polypeptide of (5), cell expressing the polypeptide of (5), or cytoplasmic membrane of the cell; and

[0030] (b) detecting whether the candidate compound binds to the polypeptide of (5), cell expressing the polypeptide of (5), or cytoplasmic membrane thereof;

[0031] (9) a method for identifying an agonist of the polypeptide of (5), comprising the steps of:

[0032] (a) contacting a candidate compound with the cell expressing the polypeptide of (5); and

[0033] (b) detecting whether the candidate compound induces a signal that indicates the activation of the polypeptide of (5);

[0034] (10) a method for identifying an antagonist of the polypeptide of (5), comprising the steps of:

[0035] (a) contacting a cell expressing the polypeptide of (5) with an agonist of the polypeptide of (5) in the presence of a candidate compound; and

[0036] (b) detecting whether the intensity of the signal that indicates the activation of the polypeptide of (5) is reduced or not by comparing with the signal detected in the absence of the candidate compound;

[0037] (11) a ligand identified by the method of (8);

[0038] (12) an agonist identified by the method of (9);

[0039] (13) an antagonist identified by the method of (10);

[0040] (14) a kit for use with the method of any one of (8) to (10) comprising at least one molecule selected from the group:

[0041] (a) the polypeptide of (5); and

[0042] (b) the host cell of (4) or cytoplasmic membrane thereof;

[0043] (15) a pharmaceutical composition for treating a patient, who is in need of increased activity or expression of the polypeptide of (5), comprising an effective amount of the molecule for the treatment selected from the group of:

[0044] (a) an agonist of the polypeptide of (5);

[0045] (b) the polynucleotide of (1) or (2); and

[0046] (c) the vector of (3);

[0047] (16) a pharmaceutical composition for treating a patient, whose activity or expression of the polypeptide of (5) needs to be suppressed, comprising an effective amount of the molecule for the treatment selected from the group of:

[0048] (a) an antagonist of the polypeptide of (5); and

[0049] (b) a polynucleotide suppressing the expression of a gene encoding the endogenous polypeptide of (5) in vivo;

[0050] (17) a method for testing a disorder associated with the aberration in the expression of a gene encoding the polypeptide of (5) or the aberration in the activity of the polypeptide of (5), comprising the step of detecting a mutation in the gene or in the expression control region thereof in the subject;

[0051] (18) the method of (17), comprising the steps of:

[0052] (a) preparing a DNA sample from a subject;

[0053] (b) isolating from the sample the DNA encoding the polypeptide of (5) or the expression control region thereof;

[0054] (c) determining the nucleotide sequence of the isolated DNA; and

[0055] (d) comparing the nucleotide sequence of DNA determined in step (c) with that of a control;

[0056] (19) the method of (17), comprising the steps of:

[0057] (a) preparing a DNA sample from a subject;

[0058] (b) cleaving the prepared DNA sample with a restriction enzyme;

[0059] (c) separating DNA fragments according to the sizes thereof; and

[0060] (d) comparing the detected sizes of the DNA fragments with those of a control;

[0061] (20) the method of (17), comprising the steps of:

[0062] (a) preparing a DNA sample from a subject;

[0063] (b) amplifying in the sample the DNA encoding the polypeptide of (5) or the expression control region thereof;

[0064] (c) cleaving the amplified DNAs with a restriction enzyme;

[0065] (d) separating the DNA fragments according to the sizes thereof; and

[0066] (e) comparing the detected sizes of the DNA fragments with those of a control;

[0067] (21) the method of (17), comprising the steps of:

[0068] (a) preparing a DNA sample from a subject;

[0069] (b) amplifying in the sample the DNA encoding the polypeptide of (5) or the expression control region thereof;

[0070] (c) dissociating the amplified DNA to single-stranded DNAs;

[0071] (d) separating the dissociated single-stranded DNAs on a non-denaturing gel; and

[0072] (e) comparing the mobility of the separated single-stranded DNAs with that of a control;

[0073] (22) the method of (17), comprising the steps of:

[0074] (a) preparing a DNA sample from a subject;

[0075] (b) amplifying in the sample the DNA encoding the polypeptide of (5) or the expression control region thereof;

[0076] (c) separating the amplified DNAs on a gel with increasing concentration gradient of a DNA denaturant; and

[0077] (d) comparing the mobilities of the separated DNAs with those of a control;

[0078] (23) a method for testing disorders associated with the aberration in the expression of a gene encoding the polypeptide of (5), comprising the step of detecting the expression level of the gene in the subject;

[0079] (24) the method of (23), comprising the steps of:

[0080] (a) preparing an RNA sample from a subject;

[0081] (b) measuring the amount of RNA encoding the polypeptide of (5) contained in said RNA sample; and

[0082] (c) comparing the amount of measured RNA with that of a control;

[0083] (25) the method of (23), comprising the steps of:

[0084] (a) providing a cDNA sample prepared from a subject, and a basal plate on which nucleotide probes hybridizing to the DNA encoding the polypeptide of (5) are immobilized;

[0085] (b) contacting said cDNA sample with said basal plate;

[0086] (c) measuring the expressed amount of the gene encoding the polypeptide of (5) contained in said cDNA sample by detecting the hybridization intensity between said cDNA sample and the nucleotide probe immobilized on the basal plate; and

[0087] (d) comparing the measured expression amount of the gene encoding the polypeptide of (5) with that of a control;

[0088] (26) the method of (23), comprising the steps of:

[0089] (a) preparing a protein sample from a subject;

[0090] (b) measuring the amount of the polypeptide of (5) contained in said protein sample; and

[0091] (c) comparing the amount of the measured polypeptide with that of a control;

[0092] (27) an oligonucleotide having a chain length of at least 15 nucleotides hybridizing to a DNA encoding the polypeptide of (5) or the expression control region thereof;

[0093] (28) an assay reagent for testing disorders associated with aberration in the expression of the gene encoding the polypeptide of (5) or aberration in the activity of the polypeptide of (5), comprising the oligonucleotide of (27); and

[0094] (29) an assay reagent for testing disorders associated with aberration in the expression of a gene encoding the polypeptide of (5) or aberration in the activity of the polypeptide of (5), comprising the antibody of (7).

[0095] In the following, definitions of terms used herein are described to facilitate understanding of the terms used herein, but it should be understood that they are not described so as to limit the present invention in any way.

[0096] Herein, the term “guanosine triphosphate-binding protein coupled receptor (GPCR)” refers to a cytoplasmic membrane receptor that transmits signals into cells via activation of a GTP-binding protein.

[0097] The term “polynucleotide” as used herein refers to a ribonucleotide or deoxyribonucleotide or a polymer consisting of a plurality of bases or base pairs. Polynucleotides include single-stranded DNAs as well as double-stranded DNAs. Polynucleotides include both unmodified naturally occurring polynucleotides and modified polynucleotides. Tritylated bases and special bases such as inosine are examples of modified bases.

[0098] The term “polypeptide” used herein refers to a polymer comprising a plurality of amino acids. Therefore, oligopeptides and proteins are also included within the concept of polypeptides. Polypeptides include both unmodified naturally occurring polypeptides and modified polypeptides. Examples of polypeptide modifications include acetylation; acylation; ADP-ribosylation; amidation; covalent binding with flavin; covalent binding with heme moieties; covalent binding with nucleotides or nucleotide derivatives; covalent binding with lipids or lipid derivatives; covalent binding with phosphatidylinositols; cross-linkage; cyclization; disulfide bond formation; demethylation; covalent cross linkage formation; cystine formation pyroglutamate formation; formylation; γ-carboxylation; glycosylation; GPI-anchor formation; hydroxylation; iodination; methylation; myristoylation; oxidation; proteolytic treatment; phosphorylation; prenylation; racemization; selenoylation; sulfation; transfer RNA-mediated amino acid addition to a protein such as arginylation; ubiquitination; and such.

[0099] The term “isolation” as used herein refers to a substance (for example, polynucleotide or polypeptide) taken out from the original environment (for example, natural environment for a naturally occurring substance), and “artificially” changed from the natural state. “Isolated” compound refers to compounds comprising compounds present in samples substantially abundant in subject compound and/or those present in samples wherein the subject compound is partly or substantially purified. Herein, the term “substantially purified” refers to compounds (for example, polynucleotides or polypeptides) that are isolated from the natural environment and which do not contain at least 60%, preferably 75%, and post preferably 90% of the other components associated with the compound in nature.

[0100] The term “mutation” used herein refers to changes of amino acids in an amino acid sequence or changes of bases in a nucleotide sequence (that is, substitution, deletion, addition, or insertion of one or more amino acids or nucleotides). Therefore, the term “mutant” as used herein refers to amino acid sequences wherein one or more amino acid(s) is changed, or nucleotide sequences wherein one or more base(s) is changed. The nucleotide sequence changes in the mutant may either change the amino acid sequence of the polypeptide encoded by the standard polynucleotide or not. The mutant may be one existing in nature, such as an allelic mutant, or one not yet identified in nature. The mutant may be altered conservatively, wherein the substituted amino acid has similar structural or chemical characteristics as that of the original amino acid. Rarely, mutants may be substituted non-conservatively. Guidance to decide which or how many amino acid residues are to be substituted, inserted, or deleted without inhibiting biological or immunological activities can be found using computer programs known in the art, such as the DNA star STAR software.

[0101] “Deletion” is a change either in the amino acid sequence or nucleotide sequence, wherein one or more amino acid residues or nucleotide residues are absent, respectively, as compared with the amino acid sequence of a naturally occurring GPCR and GPCR-associated polypeptide, or the nucleotide sequences encoding same.

[0102] “Insertion” or “addition” is a change either in the amino acid sequence or nucleotide sequence, wherein one or more amino acid residues or nucleotide residues are added, respectively, as compared with the amino acid sequence of a naturally occurring GPCR and GPCR-associated polypeptide, or nucleotide sequences encoding same.

[0103] “Substitution” is a change either in the amino acid sequence or nucleotide sequence, wherein one or more amino acid residues or nucleotide residues are changed for different amino acid residues or nucleotide residues, respectively, as compared with the amino acid sequence of a naturally occurring GPCR and GPCR-associated polypeptide, or nucleotide sequences encoding same.

[0104] The term “hybridize” as used herein refers to a process wherein a nucleic acid chain binds to its complementary chain through the formation of base pairs.

[0105] In general, the term “treatment” as used herein means to achieve pharmacological and/or physiological effects. Such effects may be either a prophylactic effect, preventing disorders or symptoms completely or partially, or a therapeutic effect curing symptoms of disorders completely or partially. The term “treatment” used herein encompasses all treatments of disorders in mammals, in particular, humans. Moreover, this term also includes prophylaxis of the onset of the disease, suppression of progression of the disorder, and amelioration of the disease in subjects with diathesis of disease who have not been diagnosed as being ill.

[0106] The term “ligand” used herein refers to molecules that bind to a polypeptide of the present invention, including both natural and synthetic ligands. “Agonist” refers to molecules that bind and activate a polypeptide of the present invention. On the other hand, “antagonist” refers to molecules that inhibit the activation of a polypeptide of the present invention.

### BRIEF DESCRIPTION OF THE DRAWINGS

[0107] FIG. 1 is a graph showing the number of pairs between GPCR sequnces and other GPCR sequences or non-GPCR sequences, which were plotted with respect to the E-value, detected during the search of known GPCR sequences in an evaluation database including 1,054 of GPCR sequences and 64,154 of non-GPCR sequences.

### MODE FOR CARRYING OUT THE INVENTION

[0108] Polypeptides

[0109] The present invention provides novel polypeptides belonging to the GPCR family. Nucleotide sequences of 1,215 polynucleotides derived from humans, whose sequences have been identified by the present inventors, are shown in the odd-numbered SEQ ID NOs from SEQ ID NO: 1 to SEQ ID NO: 2429. Amino acid sequences of polypeptides encoded by said polynucleotides are shown in the even-numbered SEQ ID NOs from SEQ ID NO: 2 to SEQ ID NO: 2430. GPCRs have the activity to transmit signals into the cell through the activation of a G protein by the action of a ligand of GPCR, and are associated with genetic diseases and disorders in great many regions of the body, such as the cranial nervous system, the cardiovascular system, the alimentary system, the immune system, the locomotorial system, the urogenital system, etc. Therefore, the polypeptides of this invention can be used to screen for ligands, agonists, or antagonists that control the functions of the polypeptides, which serves as an important target in the development of drugs for above-described disorders.

[0110] This invention also provides polypeptides functionally equivalent to the polypeptides identified by the present inventors. Herein, the term “functionally equivalent” means that the subject polypeptide has a biological characteristic equivalent to that of a polypeptide identified by the present inventors. Examples of biological characteristics of GPCRs include: binding activity with a ligand; and the activity to transduce signals into cells through the activation of trimeric GTP-binding proteins. The trimeric GTP-binding proteins are classified into following three categories according to the types of the intracellular signal transduction systems activated thereby: (1) Gq type: elevating the Ca²⁺ level; (2) Gs type: increasing cAMP; and (3) Gi type: suppressing cAMP (Trends Pharmacol. Sci. (99) 20: 118-124). Therefore, it is possible to assess whether a subjective polypeptide has a biological characteristic equivalent to that of a polypeptide identified by the inventors or not, for example, by detecting the changes in intercellular concentrations of cAMP or calcium caused by the activation.

[0111] A method for introducing mutation(s) into the amino acid sequence of a protein can be mentioned as one embodiment of methods for preparing polypeptides functionally equivalent to the polypeptides identified by the inventors. Such a method includes, for example, the site-directed mutagenesis (Current Protocols in Molecular Biology, edit. Ausubel et al. (1987) Publish. John Wiley & Sons Section 8.1-8.5). Amino acid mutation in polypeptides may also occur in nature. The present invention includes mutant proteins, regardless whether artificially or naturally produced, comprising amino acid sequences identified by the inventors (i.e., the even-numbered SEQ ID NOs from SEQ ID No: 2 to SEQ ID NO: 2430) wherein one or more amino acid residues are altered by substitution, deletion, insertion, and/or addition, yet which are functionally equivalent to the polypeptides identified by present inventors.

[0112] As for the amino acid residue to be substituted, it is preferable that it be substituted with a different amino acid residue that allows the properties of the amino acid residue to be conserved. For example, Ala, Val, Leu, Ile, Pro, Met, Phe, and Trp are all classified as non-polar amino acids, and are considered to have similar properties to each other. Further, examples of uncharged amino acids are Gly, Ser, Thr, Cys, Tyr, Asn, and Gln. Moreover, examples of acidic amino acids are Asp and Glu, and those of basic amino acids are Lys, Arg, and His.

[0113] There is no limitation in the number and sites of the amino acid mutation in these polypeptides so long as the mutated polypeptide retains the functions of the original polypeptide. The number of mutations may be typically less than 10%, preferably less than 5%, and more preferably less than 1% of the total amino acid residues.

[0114] Other embodiments of the method for preparing polypeptides functionally equivalent to the polypeptides identified by the inventors include methods utilizing hybridization techniques or gene amplification techniques. More specifically, those skilled in the art can obtain polypeptides functionally equivalent to the polypeptides determined by the present inventors by isolating highly homologous DNAs from DNA samples derived from organisms of the same or different species using hybridization techniques (Current Protocols inMolecular Biology, edit. Ausubel et al. (1987) Publish. John Wiley & Sons Section 6.3-6.4) based on the DNA sequences encoding the polypeptides identified by the inventors (i.e., sequences of odd-numbered SEQ ID NOs from SEQ ID NO: 1 to SEQ ID NO: 2429). Thus, such polypeptides encoded by DNAs hybridizing to the DNAs encoding the polypeptides identified by the inventors, which polypeptides are functionally equivalent to the polypeptides identified by the inventors, are also included in the polypeptides of this invention.

[0115] Examples of organisms to be used for isolating such polypeptides are rats, mice, rabbits, chicken, pigs, cattle, etc., as well as humans, but the present invention is not limited to these organisms.

[0116] The hybridization stringency required to isolate a DNA encoding a functionally equivalent polypeptide to the polypeptides. identified by the inventors is normally “1×SSC, 0.1% SDS, 37° C.” or so, a more stringent condition being “0.5×SSC, 0.1% SDS, 42° C.” or so, and a much more stringent condition being “0.2×SSC, 0.1% SDS, 65° C.” or so. As the stringency becomes higher, isolation of a DNA with higher homology to the probe sequence can be expected. However, above-mentioned combinations of conditions of SSC, SDS, and temperature are only an example, and those skilled in the art can achieve the same stringency as described above by appropriately combining above-mentioned factors or others parameters which determine the stringency of the hybridization (for example, probe concentration, probelength, reaction time of hybridization, etc.).

[0117] The polypeptides encoded by the DNA isolated using such hybridization techniques normally are highly homologous in their amino acid sequences to the polypeptides identified by the present inventors. Herein, high homology indicates a sequence identity of at least 40% or more, preferably 60% or more, more preferably 80% or more, still more preferably 90% or more, further still more preferably at least 95% or more, and yet more preferably at least 97% or more (for example, 98% to 99%). Homology of amino acid sequences can be determined, for example, by using the algorithm BLAST according to Karlin and Altschul (Proc. Natl. Acad. Sci. USA 87: 2264-2268 (1990); Proc. Natl. Acad. Sci. USA 90: 5873-5877 (1993)). Based on this algorithm, a program referred to as BLASTX has been developed (Altschul et al., J. Mol. Biol. 215: 403-410 (1990)). When amino acid sequences are analyzed using BLASTX, parameters are set, for example, score=50 and wordlength=3, while in the case of using BLAST and Gapped BLAST programs, default parameters of each program are used. Specific techniques of these analytical methods are well known in the field (See http://www.ncbi.nlm.nih.gov.).

[0118] The gene amplification technique (PCR) (Current Protocols in Molecular Biology, edit. Ausubel et al. (1987) Publish. John Wiley & Sons Section 6.1-6.4) can be utilized to obtain a polypeptide functionally equivalent to the polypeptides isolated by the present inventors, based on DNA fragments isolated as highly homologous DNAs to the DNA sequences encoding the polypeptides isolated by the present inventors, by designing primers based on a part of the DNA sequences encoding the polypeptides identified by the inventors (sequences of odd-numbered SEQ ID NOs from SEQ ID NO: 1 to SEQ ID NO: 2429).

[0119] Polypeptides of this invention may be in the form of a “mature” protein, or may be also a part of a larger protein, such as fusion proteins. Polypeptides of this invention may contain secretory sequences, namely leader sequences; prosequences; sequences useful for purification, such as multiple histidine residues and such; and additive sequences to secure the stability during recombinant production.

[0120] Polypeptide Fragments

[0121] The present invention also provides fragments of the polypeptides of this invention. These fragments are polypeptides having amino acid sequences which are partly, but not entirely, identical to the above polypeptides of this invention. The polypeptide fragments of this invention usually consist of 8 amino acid residues or more, and preferably 12 amino acid residues or more (for example, 15 amino acid residues or more). Examples of preferred fragments include truncation polypeptides, having amino acid sequences lacking a series of amino acid residues including either the amino terminus or carboxyl terminus, or two series of amino acid residues, one including the amino terminus and the other including the carboxyl terminus. Furthermore, fragments featured by structural or functional characteristics are also preferable, which include those having α-helix and α-helix forming regions, β-sheet and β-sheet forming regions, turn and turn forming regions, coil and coil forming regions, hydrophilic regions, hydrophobic regions, α-amphipathic regions, β-amphipathic regions, variable regions, surface forming regions, substrate-binding regions, and high antigenicity index region. Biologically active fragments are also preferred. Biologically active fragments mediate the activities of the polypeptides of this invention, which fragments include those having similar or improved activities, or reduced undesirable activities. For example, fragments having the activity to transduce signals into cells via binding of a ligand, and furthermore, fragments having antigenicity or immunogenicity in animals, especially humans are included. These polypeptide fragments preferably retain the biological activities of the polypeptides of this invention, which activity includes antigenicity. Mutants of specific sequences or fragments also constitute an aspect of this invention. Preferred mutants are those which are different from the subject polypeptide, due to replacement with conservative amino acids, namely, those in which residue(s) is (are) substituted with other residue(s) having similar properties. Typical substitutions are those between Ala, Val, Leu, and Ile; Ser and Thr; acidic residues Asp and Glu, Asn, and Gln; basic residues Lys and Arg; or aromatic residues Phe and Tyr.

[0122] Alternatively, fragments which bind to ligands without transducing signals into cells may be also useful as competitive inhibitors for the polypeptides of this invention and are included in the present invention.

[0123] Production of Polypeptides

[0124] Polypeptides of this invention may be produced by any appropriate method. Such polypeptides include isolated naturally-occurring polypeptides, and polypeptides which are produced by gene recombination, synthesis, or by a combination thereof. Procedures for producing these polypeptides are well known in the art. Recombinant polypeptides may be prepared, for example, by transferring a vector, wherein the polynucleotide of the present invention is inserted, into an appropriate host cell, and purifying the polypeptide expressed within the resulting transformant. On the other hand, naturally occurring polypeptides can be prepared, for example, using affinity columns, wherein antibodies against the polypeptide of this invention (described below) are immobilized (Current Protocols in Molecular Biology, edit. Ausubel. et al. (1987) Publish. John Wiley & Sons Section 16.1-16.19). Antibodies for affinity purification may be either polyclonal or monoclonal antibodies. The polypeptides of this invention may be also prepared by the in vitro translation method (for example, see “On the fidelity of mRNA translation in the nuclease-treated rabbit reticulocyte lysate system.” Dasso, M. C. and Jackson, R. J. (1989) NAR 17:3129-3144),and so on. Polypeptide fragments of this invention can be produced, for example, by cleaving the polypeptides of the present invention with appropriate peptidases.

[0125] Polynucleotides

[0126] The present invention also provides polynucleotides encoding the polypeptides of this invention. The polynucleotides of this invention include: those encoding polypeptides comprising the amino acid sequences of even-numbered SEQ ID NOs from SEQ ID NO: 2 to SEQ ID NO: 2430; those comprising the coding regions of the nucleotide sequences of odd-numbered SEQ ID NOs from SEQ ID NO: 1 to SEQ ID NO: 2429; and those comprising different nucleotide sequences from those of odd-numbered SEQ ID NOs from SEQ ID NO: 1 to SEQ ID NO: 2429 due to the degeneracy of genetic codes but still encoding polypeptides comprising amino acid sequences of even-numbered SEQ ID NOs from SEQ ID NO: 2 to SEQ ID NO: 2340. Furthermore, the polynucleotides of this invention include those encoding polypeptides functionally equivalent to the polypeptides of the present invention, comprising nucleotide sequences which are homologous to said polynucleotide sequences at least 40% or more, preferably 60% or more, more preferably 80% or more, further more preferably 90% or more, and still preferably 95% or more, and further still more preferably 97% or more (for example, 98% to 99%) in the entire length. Homology of the nucleotide sequences can be determined, for example, using the BLAST algorithm by Karlin and Altschul (Proc. Natl. Acad. Sci. USA 87: 2264-2268 (1990); Proc. Natl. Acad. Sci. USA 90: 5873-5877 (1993)). Based on this algorithm, an algorithm called BLASTN has been developed (Altschul et al. J. Mol. Biol. 215: 403-410 (1990)). When analyzing a nucleotide sequence using the BLASTN program, parameters are set, for example, score=100 and wordlength=12. When using both BLAST and Gapped BLAST programs, default parameters of each program are used. Specific techniques of these analytical methods are well known in the art (http://www.ncbi.nlm.nih.gov.). The polynucleotides of this invention also include polynucleotides having a nucleotide sequences complementary to those of the above-described polynucleotides.

[0127] The polynucleotides of this invention can be obtained for example, from cDNA libraries induced from intracellular mRNAs by standard cloning and screening methods. Moreover, the polynucleotides of this invention can be obtained from natural sources, such as genomic libraries, and also can be synthesized using commercially available techniques known in the art.

[0128] Polynucleotides comprising nucleotide sequences significantly homologous to the polynucleotide sequences identified by the inventors (sequences of odd-numbered SEQ ID NOs from SEQ ID NO: 1 to SEQ ID NO: 2429) can be prepared using, for example, hybridization techniques (Current Protocols in Molecular Biology, edit. Ausubel et al. (1987) Publish. John Wiley & Sons Section 6.3-6.4) and the gene amplification technique (PCR) (Current Protocols in Molecular Biology, edit. Ausubel et al. (1987) Publish. John Wiley & Sons Section 6.1-6.4). That is, based on the polynucleotide sequences identified by the inventors (sequences of odd-numbered SEQ ID NOs from SEQ ID NO: 1 to SEQ ID NO: 2429) or portions thereof, using hybridization techniques, DNAs highly homologous to these polynucleotides can be isolated from DNA samples derived from the same or different species of organisms. Moreover, polynucleotides highly homologous to the sequences of said polynucleotides can be isolated using the gene amplification technique by designing primers based on portions of the polynucleotide sequences identified by the inventors (sequences of odd-numbered SEQ ID NOs from SEQ ID NO: 1 to SEQ ID NO: 2429). Therefore, the present invention includes polynucleotides hybridizing under stringent conditions to the polynucleotides comprising the nucleotide sequences of odd-numbered SEQ ID NOs from SEQ ID NO: 1 to SEQ ID NO: 2429. The conditions for stringent hybridization are usually “1×SSC, 0.1% SDS, 37° C.” or so, with a more stringent condition being “0.5×SSC, 0.1% SDS, 42° C.” or so, and a furthermore stringent one being “0.2×SSC, 0.1% SDS, 65° C.” or so. The more stringent the hybridization conditions are, the more highly homologous DNAs to the probe sequence can be expected. However, the above-described combinations of conditions of SSC, SDS, and temperature are mere examples, and those skilled in the art may achieve similar stringency as described above by appropriately combining the aforementioned factors or others parameters that determine the hybridization stringency (for example, probe concentration, probe length, reaction time of hybridization, etc.).

[0129] Polynucleotides comprising nucleotide sequences significantly homologous to the sequences of the polyncleotides identified by the inventors can also be prepared by inducing mutations into the nucleotide sequences of odd-numbered SEQ ID NOs from SEQ ID NO: 1 to SEQ ID NO: 2429 (for example, the site-directed mutagenesis) (Current Protocols in Molecular Biology, edit. Ausubel, et al. (1987) Publish. John Wiley & Sons Section 8.1-8.5). Such polynucleotides may be also generated by mutation in nature. The present invention includes polynucleotides encoding polypeptides comprising amino acid sequences of even-numbered SEQ ID NOs from SEQ ID NO: 2 to SEQ ID NO: 2430 wherein one or more amino acid residues are substituted, deleted, inserted, and/or added, due to such mutations of the nucleotide sequences.

[0130] Polynucleotides used for recombinant production of the polypeptide of this invention include the coding sequences of the mature polypeptide or fragments thereof alone; and coding sequences of the mature polypeptide or fragments thereof in the same reading frame with other coding sequences (for example, leader or secretory sequences; pre-, pro-, or preproprotein sequences; or sequence encoding other fusion peptide portions). For example, a marker sequence that facilitates purification of the fusion polypeptide may be encoded in the same reading frame. A preferred embodiment of this invention includes specific marker sequences, such as the hexahistidine peptide or Myc tag provided by the pcDNA3.1/Myc-His vector (Invitrogen), which is described in the literature (Gentz et al., Proc. Natl. Acad. Sci. USA (1989) 86: 821-824). Further, this polynucleotide may comprise a 5′- and 3′-noncoding sequence, for example, transcribed but non-translated sequences; splicing and polyadenylation signals; ribosome-binding sites; and mRNA stabilization sequences.

[0131] Probe, Primer, Antisense, Ribozyme

[0132] The present invention provides nucleotides, having a chain length of at least 15 nucleotides, which are complementary to a polynucleotide isolated by the present inventors (a polynucleotide or a complementary strand thereof consisting of the nucleotide sequences of odd-numbered SEQ ID NOs from SEQ ID NO: 1 to SEQ ID NO: 2429). Herein, the term “complementary strand” is defined as one strand of a double strand nucleic acid composed of A:T (A:U in case of RNA) and G:C base pairs to the other strand. Also, “complementary” is defined as not only those completely matching within a continuous region of at least 15 sequential nucleotides, but also those having a homology of at least 70%, preferably at least 80%, more preferably 90%, and most preferably 95% or higher within that region. The homology may be determined using the algorithm described herein. Probe and primers for detection or amplification of the polynucleotides of the present invention are included in these polynucleotides. Typical polynucleotides used as primers have a chain length of 15 to 100 nucleotides, and preferably 15 to 35 nucleotides. Alternatively, polynucleotides used as probes are nucleotides having a chain length of at least 15 nucleotides, preferably at least 30 nucleotides, containing at least a portion or the whole sequence of a DNA of the present invention. Such nucleotides preferably hybridize specifically to a DNA encoding a polypeptide of the present invention. The term “hybridize specifically” defines that it hybridizes under a normal hybridization condition, preferably a stringent condition with a nucleotide identified by the present inventors (sequence shown as odd-numbered SEQ ID NOs from SEQ ID NO: 1 to SEQ ID NO: 2429), but not with DNAs encoding other polypeptides.

[0133] These nucleotides can be used for detecting and diagnosing abnormal activities of the polypeptides of the present invention or abnormal expression of genes encoding the polypeptides.

[0134] Further, these nucleotides include polynucleotides that suppress the expression of genes encoding the polypeptides of the present invention. Such polynucleotides include antisense DNAs (DNAs encoding antisense RNAs, which are complementary to transcriptional products of the genes encoding the polypeptides of the present invention) and ribozymes (DNAs encoding RNAs having ribozyme activities to specifically cleave transcriptional products of the genes encoding the polypeptides of the present invention).

[0135] A plurality of factors, such as those described below, arise as a result of actions suppressing the expression of a target gene by an antisense DNA: inhibition of the transcription initiation by the formation of a triple strand; suppression of the transcription through hybridization with a local open loop conformation site formed by an RNA polymerase; inhibition of the transcription by hybridization with RNA, which is in course of synthesis; suppression of the splicing through hybridization at a junction of intron and exon; suppression of the splicing through hybridization with a spliceosome forming site; suppression of the transfer from the nuclei to cytoplasm through hybridization with the mRNAs; suppression of the splicing through hybridization with capping sites or poly(A) addition sites; suppression of the translation initiation through hybridization with a translation initiation factor binding site; suppression of the translation through hybridization with the ribosome binding site near the initiation codon; inhibition of the elongation of the peptide chain through hybridization with the translation regions and polysome binding sites of the mRNAs; suppression of the expression of genes by hybridization with the interaction sites between nucleic acids and proteins; and such. These actions inhibit the processes of transcription, splicing, and/or translation to suppress the expression of a target gene (Hirajima and Inoue, “New Biochemistry Experimental Course No. 2, Nucleic Acid IV, Duplication and Expression of Genes”, Japan Biochemical Society ed., Tokyo Kagaku Doujin, pp. 319-347 (1993)).

[0136] The antisense DNA of the present invention may suppress the expression of the target gene through any of the above-mentioned actions. According to one embodiment, an antisense sequence designed to be complementary to a non-translated region near the 5′-terminus of mRNA of a gene may effectively inhibit the translation of the gene. Additionally, sequences which are complementary to the coding region or the 3′ non-translated region can be also used. As described above, DNA containing antisense sequences not only to the translation region of a gene, but also those to sequences of non-translated regions are included in the antisense DNA of the present invention. The antisense DNAs to be used in the present invention are linked to downstream of an appropriate promoter, and a sequence including a transcriptional termination signal is preferably linked to the 3′-side thereof. The sequence of the antisense DNA is preferably complementary to the target gene or a part thereof; however, so long as the expression of the gene can be effectively inhibited, it does not have to be a completely complementary DNA. The transcribed RNA is preferably 90% or more, more preferably 95% or more, complementary to the transcribed product of the target gene. In order to effectively inhibit the expression of the target gene using an antisense sequence, the antisense DNA has at least a chain length of 15 bp or more, preferably 100 bp, more preferably 500 bp, and usually has a chain length less than 3000 bp, preferably less than 2000 bp to cause an antisense effect.

[0137] Such antisense DNA can be also applied to gene therapy for diseases caused by abnormalities (functional abnormalities or expression abnormalities) of the polypeptides of the present invention, and such. The antisense DNA can be prepared by, for example, the phosphorothionate method (Stein, “Physicochemical properties of phosphorothionate oligodeoxynucleotides.” Nucleic Acids Res. 16, 3209-21 (1988)) and such based on the sequence information of a DNA (for example, sequences of odd-numbered SEQ ID NOs from SEQ ID NO: 1 to SEQ ID NO: 2429)) encoding a polypeptide of the present invention.

[0138] Further, suppression of the expression of endogenous genes can be also achieved utilizing DNAs encoding ribozymes. Ribozymes are RNA molecules having catalytic activity. There exist ribozymes having various activities, and the research of ribozymes as an enzyme for truncating RNA allowed for the design of ribozymes that cleave RNAs in a site-specific manner. There are ribozymes which are larger than 400 nucleotides, such as Group I intron type ribozymes, and M1RNA comprised in RNaseP, and those which have an active domain of about 40 nucleotides, called hammer-head type and a hairpin type ribozymes (Makoto Koizumi andEiko Ohtsuka, (1990), Protein Nucleic Acid and Enzyme (PNE) 35:2191).

[0139] For example, the hammer head type ribozyme cleaves the 3′-side of C15 of G13U14C15 within its own sequence. A base pair formation of the U14 with the A at position 9 is important for the activity, and it is shown that the cleavage proceeds even if the C at position 15 is A or U (M. Koizumi et al., (1988) FEBS Lett. 228:225). Restriction enzymatic RNA-truncating ribozymes recognizing sequences of UC, UU, and UA in a target RNA may be generated by designing the substrate binding site of the ribozyme complementary with the RNA sequence near the target site (M. Koizumi, et al., (1988) FEBS Lett. 239:285; Makoto Koizumi and Eiko Ohtsuka, (1990), Protein Nucleic Acid and Enzyme (PNE) 35:2191); and M. Koizumi et al. (1989), Nucleic Acids Res. 17:7059). A plurality of sites, which can be used as a target, exist among the polynucleotides (having sequence of odd-numbered SEQ ID NOs from SEQ.ID NO: 1- to SEQ ID NO: 2429) identified by the present inventors.

[0140] Further, the hairpin type ribozymes are also useful in the context of the present invention. The hairpin type ribozymes are found on, for example, the minus chain of a satellite RNA of tobacco ringspot virus (J. M. Buzayan, Nature 323:349 (1986)). It is also demonstrated that the ribozyme can be designed to cause a target specific RNA truncation (Y. Kikuchi and N. Sasaki, (1991) Nucleic Acids Res. 19:6751; and Hiroshi Kikuchi, (1992) Chemistry and Organism 30:112).

[0141] When the polynucleotides suppressing the expression of the genes encoding the polypeptides of the present invention are used in gene therapy, they may be administered to a patient by the ex vivo method, in vivo method, and such, using, for example, viral vectors such as retroviral vector, adenoviral vector, adeno-associated viral vectors, and such; and non-viral vectors such as liposome; and so on.

[0142] Production of Vector, Host Cell, and Polypeptide

[0143] Further, the present invention provides methods for producing vectors containing a polynucleotide of the present invention, host cells retaining a polynucleotide of the present invention or said vector, and polypeptides of the present invention utilizing said host cells.

[0144] The vector of the present invention is not limited so long as the DNA inserted in the vector is retained stably. For example, pBluescript vector (Stratagene) is preferable as a cloning vector when using E. coli as the host. When the vector is used for producing a polypeptide of the present invention, an expression vector is particularly useful. The expression vector is not specifically limited so long as it expresses polypeptides in vitro, in E. coli, in cultured cells, and in vivo. However, preferable examples include the pBEST vector (ProMega) for in vitro expression, the pET vector (Invitrogen) for expression in E. coli, the pME18S-FL3 vector (GenBank Accession No. AB009864) for the expression in cultured cells, and the pME18S vector (Mol. Cell Biol. 8:466-472(1988)) for in vitro expression, and soon. The insertion of a DNA of the present invention into a vector can be carried but by conventional methods, for example, by the ligase reaction using restriction enzyme sites (Current Protocols in Molecular Biology, edit. Ausubel, et al., (1987) Publish John Wiley & Sons, Section 11.4-11.11).

[0145] The host cell to which the vector of the present invention is introduced is not specifically limited, and various host cells can be used according to the objects of the present invention. For example, bacterial cells (e.g. Streptococcus, Staphylococcus, E. coli, Streptomyces, Bacillus subtilis), fungal cells (e.g. yeast, Aspergillus), insect cells (e.g. Drosophila S2, Spodoptera SF9), animal cells (e.g. CHO, COS, HeLa, C127, 3T3, BHK, HEK293, Bowes melanoma cell), and plant cells can be exemplified as cells to express polypeptides. The transfection of a vector to a host cell can be carried out by conventional methods, such as the calcium phosphate precipitation method, the electroporation method (Current protocols in Molecular Biology, edit., Ausubel et al., (1987) Publish. John Wiley & Sons, Section 9.1-9.9), the Lipofectamine method (GIBCO-BRL), the microinjection method, and so on.

[0146] Appropriate secretion signals can be incorporated into the polypeptide of interest in order to secrete polypeptides into the lumen of endoplasmic reticulum, into cavity around the cell, or into the extracellular environment by expressing them in a host cell. These signals may be endogenous signals or signals from a different species to the objective polypeptide.

[0147] When a polypeptide of the present invention is secreted into the culture media, the culture media is collected to collect the polypeptide of the present invention. When a polypeptide of the present invention is produced intracellularly, the cells are first lysed, and then, the polypeptides are collected.

[0148] In order to collect and purify a polypeptide of the present invention from a recombinant cell culture, methods known in the art including ammonium sulfate or ethanol precipitation, extraction by acid, anionic or cationic exchange chromatography, phosphocellulose chromatography, hydrophobic interaction chromatography, affinity chromatography, hydroxylapatite chromatography, and lectin chromatography can be used.

[0149] Test Method

[0150] The present invention provides a method for testing diseases related to abnormal expression of the genes encoding the polypeptides of the present invention, or abnormal activities of the polypeptides of the present invention. It is considered that GPCR has an important function in vivo, and thus, abnormal expression and function thereof may cause various diseases. Therefore, assay of diseases may be accomplished using inappropriate activities or expression of the polypeptides of the present invention as an index.

[0151] The term “assay of diseases” includes not only tests to draft therapeutic strategy for a subject who exhibits the symptom of a disease, but also tests for preventing diseases by determining whether the subject is susceptible to the disease.

[0152] One embodiment of the test methods of the present invention is a method comprising the step of detecting a mutation in a gene encoding a polypeptide of the present invention or in the expression control regions thereof in a subject.

[0153] More specifically, the test can be accomplished by directly determining the nucleotide sequence of a gene encoding a polypeptide of the present invention or its expression control region in a subject. According to this method, first, a DNA sample is prepared from a subject. The DNA sample can be prepared from chromosomal DNA or RNA extracted from cells of the subject, for example, the biopsy or autopsy specimen of blood, urine, saliva, and tissue. In order to prepare a DNA sample for the present method from a chromosomal DNA, a genomic library may be produced by, for example, digesting the chromosomal DNA with appropriate restriction enzymes, and then cloning the digested DNA to a vector. On the other hand, for example, a cDNA library may be prepared from RNA by using reverse transcriptase to prepare a DNA sample for the present method from RNA. Next, DNA containing a gene encoding a polypeptide of the present invention or the expression control region thereof is isolated according to the present method. The isolation of a DNA can be carried out by screening the genomic library or cDNA library using probes hybridizing with the DNA containing the gene encoding the polypeptide of the present invention or its expression control region. The isolation of a DNA can be also carried out by PCR using the genomic DNA library, cDNA library, and RNA as the template, and primers hybridizing to a DNA containing a gene encoding a polypeptide of the present invention or its expression control region. Then, the nucleotide sequence of the isolated DNA is determined according to the present method. The determination of the nucleotide sequence of selected DNAs can be carried out by methods known to those skilled in the art. According to the present method, the determined nucleotide sequence of the DNA is then compared with that of a control. The “control” herein refers to a nucleotide sequence of DNAs containing a gene encoding a normal (wild type) polypeptide of the present invention or its expression control region. When the nucleotide sequence of a DNA of a subject differs from those of the control as a result of a comparison above, the subject is judged to be afflicted with disease or in danger of the onset of disease.

[0154] According to the test method of the present invention, various methods can be used other than the method directly determining the nucleotide sequence of a DNA, which was derived from the subject, as described above.

[0155] In one embodiment of the method, a DNA sample is first prepared from a subject and is digested with restriction enzymes. Then, the DNA fragments are separated in accordance with their size, followed by comparison of the detected sizes of the DNA fragments with those of a control. Alternatively, in another embodiment, a DNA sample is first prepared from a subject. Then, DNA containing a gene encoding a polypeptide of the present invention or its expression control region is amplified from the sample, and the amplified DNAs are digested with restriction enzymes. After separating the DNA fragments according to their size, the detected sizes of the DNA fragments are compared with those of a control.

[0156] Such methods include, for example, a method utilizing the Restriction Fragment Length Polymorphism/RFLP, the PCR-RFLP method, and such. Specifically, when variations exist for the recognition sites of a restriction enzyme, or when insertion(s) or deletion(s) of base(s) exists in a DNA fragment generated by a restriction enzyme treatment, the sizes of fragments that are generated after the restriction enzyme treatment vary in comparison with those of a control. The portion containing the mutation is amplified by PCR, and then, is treated with respective restriction enzymes to detect these mutations as a difference of the mobility of bands after electrophoresis. Alternatively, the presence or absence of the mutations can be detected by carrying out the Southern blotting with a probe DNA of the present invention after treating the chromosomal DNA with respective restriction enzymes followed by electrophoresis. The restriction enzymes to be used can be appropriately selected in accordance with respective mutations. The Southern blotting can be conducted not-only on the genomic DNA but also on cDNAs directly digested with restriction enzymes, wherein the cDNAs are converted by the use of a reverse transcriptase from RNAs prepared from subjects. Alternatively, after amplifying DNAs containing a gene encoding a polypeptide of the present invention or its expression control region by PCR using the cDNA as a template, the cDNAs are digested with restriction enzymes and the difference of mobility on an electrophoresis gel of DNA fragments generated by the digestion are examined.

[0157] In another embodiment of the present method, a DNA sample is first prepared from a subject. Then, a DNA containing a gene encoding a polypeptide of the present invention or its expression control region is amplified. Thereafter, the amplified DNA is dissociated into single strand DNAs, and the single strand DNAs are separated on a non-denaturing gel. The mobility of the separated single strand DNAs on the gel is compared with those of a control.

[0158] Such methods include, for example, the PCR-SSCP (single-strand conformation polymorphism) method (“Cloning and polymerase chain reaction-single-strand conformation polymorphism analysis of anonymous Alu repeats on chromosome 11.” Genomics. Jan. 1, 1992, 12(1): 139-146; “Detection of p53 gene mutations in human brain tumors by single-strand conformation polymorphism analysis of polymerase chain reaction products.” Oncogene. Aug. 1, 1991; 6(8): 1313-1318; “Multiple fluorescence-based PCR-SSCP analysis with post labelling.” PCR Methods Appl. Apr.1, 1995; 4(5): 275-282). This method is particularly preferable for screening many DNA samples, since it has advantages such as: comparative simplicity of operation; small amount of a test sample required; and so on. The principle of the method is as follows. A single strand DNA dissociated from a double-strand DNA fragment forms a unique higher conformation depending on respective nucleotide sequence. Complementary single-stranded DNAs having the same chain length of the dissociated DNA strand shift to different positions in accordance with the difference of the respective higher conformations after electrophoresis on a polyacrylamide gel without a denaturant. The higher conformation of a single-stranded DNA changes even by a substitution of one base, which change results in a different mobility by polyacrylamide gel electrophoresis. Accordingly, the presence of a mutation in a DNA fragment due to point mutation, deletion, insertion, and such can be detected by detecting the change of the mobility.

[0159] More specifically, DNA containing a gene encoding a polypeptide of the present invention (or its expression control region) is first amplified by PCR and such. Preferably, a DNA of a length of about 200 bp to 400 bp is amplified. Those skilled in the art can appropriately select the condition and such for the PCR. DNA products amplified by PCR can be labeled by primers, which are labeled with isotopes such as 32P; fluorescent dyes; biotin; and so on. Alternatively, the amplified DNA products can be also labeled by conducting PCR in a reaction solution containing substrate bases, which are labeled with isotopes such as ³²P; fluorescent dyes; biotin; and so on. Further, the labeling can be also carried out by adding substrate bases, which are labeled with isotope such as ³²P; fluorescent dyes; biotin; and so on, to the amplified DNA fragment using Klenow enzyme and such, after the PCR reaction. Then, the obtained labeled DNA fragments are denatured by heating and such, and electrophoresis is carried out on a polyacrylamide gel without a denaturant such as urea. The condition for the separation of the DNA fragments by this electrophoresis can be improved by adding appropriate amounts (about 5% to 10%) of glycerol to the polyacrylamide gel. Further, although the condition for electrophoresis varies depending on the property of respective DNA fragments, it is usually carried out at room temperature (20° C. to 25° C.). When a preferable separation is not achieved at this temperature, a temperature at which optimum mobility can be achieved is searched from 4° C. to 30° C. The mobility of the DNA fragments is detected by autoradiography with X-ray films, scanner for detecting fluorescence, and such, after the electrophoresis to analyze the result. When a band with different mobility is detected, the presence of a mutation can be confirmed by directly excising the band from the gel, amplifying it again by PCR, and directly sequencing the amplified fragment. Further, the bands can be also detectedby staining the gel after electrophoresis with ethidium bromide, silver, and such, without using labeled DNAs.

[0160] In still another method, a DNA sample is first prepared from a subject. DNA containing a gene encoding a polypeptide of the present invention or its expression control region is amplified, and then, the amplified DNAs are separated on a gel with gradient concentration of a DNA denaturant. The mobilities of the separated DNAs on the gel are compared with those of a control.

[0161] For example, the denaturant gradient gel electrophoresis method (DGGE method) and such can be exemplified as such methods. The DGGE method comprises the steps of: (1) electrophoresing the mixture of DNA fragments on a polyacrylamide gel with gradient concentration of denaturant; and (2) separating the DNA fragments in accordance with the difference of instabilities of respective fragments. Unstable DNA fragments containing mismatches dissociated partly to a single-strand near the mismatches because of the instability of the DNA sequence by shifting to a part with a certain concentration of the denaturant on the gel. The mobility of the partly-dissociated DNA fragment becomes remarkably slow, ending in a difference of the mobility with that of perfectly double-stranded DNAs without dissociated parts, which allows separation of these DNAs. Specifically, DNA containing a gene encoding a polypeptide of the present invention or its expression control region is (1) amplified by PCR and such with a primer of the present invention and such; (2) electrophoresed on a polyacrylamide gel with gradient concentration of denaturant such as urea; and (3) the result is compared with that of a control. The presence or absence of a mutation can be detected by detecting the difference of mobility of the DNA fragment due to the extreme slowing down of the mobility speed of the fragment by separation into single-stranded DNAs of a DNA fragment with mutations at parts of the gel where the concentration of the denaturant is lower.

[0162] In addition to the above-mentioned methods, the Allele Specific Oligonucleotide (ASO) hybridization method can be used to detect mutations at only specific sites. An oligonucleotide with a nucleotide sequences contained to have a mutation is prepared, and is subjected to hybridization with a DNA sample. The efficiency of hybridization is reduced by the existence of a mutation. The decrease can be detected by the Southern blotting method; methods which utilize a specific fluorescent reagent that have a characteristic to quench by intercalation into the gap of the hybrid; and such. Further, the detection may be also conducted by the ribonuclease A mismatch truncation method. Specifically, DNA containing a gene encoding a polypeptide of the present invention is amplified by PCR and such, and the amplified DNAs are hybridized with labeled RNAs, which were prepared from a control cDNA and such to incorporate them into a plasmid vector and such. The presence of a mutation can be detected with autoradiography and such, after cleaving those sites that form a single-stranded conformation due to the existence of a mutation with ribonuclease A.

[0163] Another embodiment of the test method of the present invention is a method comprising the step of detecting the expression level of a gene encoding a polypeptide of the present invention. Herein, transcription and translation are included in the meaning of the term “expression of a gene”. Accordingly, mRNAs and proteins are included in the term “expression product”.

[0164] First, an RNA sample is prepared from a subject according to the method for testing the transcription level of a gene encoding a polypeptide of the present invention. Then, the amount of RNA encoding the polypeptide of the present invention in the RNA sample is measured. Thereafter, the measured amount of the RNA encoding the polypeptide of the invention is compared with that of a control.

[0165] A Northern blotting method using a probe which hybridizes with the polynucleotide encoding a polypeptide of the present invention; an RT-PCR method using a primer which hybridizes with a polynucleotide encoding the polypeptide of the present invention; and such can be exemplified as such methods.

[0166] Further, a DNA array (Masami Muramatsu and Masashi Yamamoto, New Genetic Engineering Handbook pp. 280-284YODOSHA Co., LTD.) can also be utilized in the test for the transcription level of the gene encoding the polypeptide of the present invention. Specifically, first, a cDNA sample prepared from a subject and a basal plate on which polynucleotide probes hybridizing with the polynucleotides encoding the polypeptides of the present invention are fixed are provided. Plural kinds of polynucleotide probes can be fixed on the basal plate in order to detect plural kinds of polynucleotides encoding the polypeptides of the present invention. Preparation of a cDNA sample from a subject can be carried out by methods well known to those skilled in the art. In a preferable embodiment for the preparation of the cDNA sample, first, total RNAs are extracted from a cell of a subject. Example of cells include cells of the biopsy or autopsy specimen, of blood, urine, saliva, tissue, and such. The extraction of total RNAs can be carried out, for example, as follows. So long as total RNAs with high purity can be prepared, known methods, kits, and such can be used. For example, total RNAs are extracted by using “Isogen” (Nippon Gene) following a pretreatment with “RNA later” (Ambion). Specific procedures of the method may be carried out according to the attached protocol. Then, the cDNA sample is prepared by synthesizing cDNAs with reverse transcriptase using extracted total RNAs as a template. The synthesis of cDNA from total RNAs can be carried out by conventional methods known in the art. The prepared cDNA sample is labeled for detection according to needs. The labeling substance is not specifically limited so long as it can be detected, and include, for example, fluorescent substances, radioactive elements, and so on. The labeling can be carried out by conventional methods (L. Luo et al., “Gene expression profiles of laser-captured adjacent neuronal subtypes”, (1999) Nat. Med. 5: 117-122).

[0167] The term “basal plate” herein refers to a board type material on which polynucleotides can be fixed. So long as polynucleotides can be immobilized on the plate, there is no restriction on the basal plate of the present invention. However, a basal plate that is generally used in the DNA array technique is preferred.

[0168] An advantage of the DNA array technique is that the amount of solution needed for hybridization is very small, and that extremely complicated targets containing cDNA derived from the total RNAs of a cell can be hybridized to the fixed nucleotide probes. In general, a DNA array comprises thousands of nucleotides which are printed on a basal plate at a high density. Usually, DNAs are printed on the surface layer of a non-porous basal plate. The surface layer of the basal plate is usually glass, but a porous film, for example, such as nitrocellulose membrane, can be also used. There are two types for fixation (array) of the nucleotides: one is the array based on polynucleotides developed by Affymetrix Co., Ltd.; and the other is the array of cDNA mainly developed by Stanford University. The polynucleotides are usually synthesized in situ for the array of the polynucleotide. For example, in situ synthesis method of polynucleotides such as the photolithographic technique (Affymetrix); and the ink-jet technique (Rosetta Inpharmatics) for fixing a chemical substance; and so on are already known in the art, and any of these techniques can be used for the production of basal plates of the present invention. There is no limitation on the polynucleotide probes to be fixed on the basal plates, so long as it specifically hybridizes with a gene encoding a polypeptide of the present invention. The polynucleotide probe of the present invention includes polynucleotides and cDNAs. Herein, the term “specifically hybridizes” means that a polynucleotide substantially hybridizes with a polynucleotide encoding a polypeptide of the present invention and substantially does not hybridize with other polynucleotides. So long as specific hybridization is possible, the polynucleotide probe does not have to be completely complementary to the nucleotide sequence to be detected. Generally, to immobilize a cDNA on a plate, the length of the polynucleotide probe to be fixed on the basal plate is usually 100 to 4000 bases, preferably 200 to 4000 bases, and more preferably 500 to 4000 bases. On the other hand, to immobilize synthetic polynucleotides, the length of the probes are usually 15 to 500 bases, preferably 30 to 200 bases, and more preferably 50 to 200 bases. The step for fixing of the polynucleotides on the basal plate is also called “printing” in general. Specifically, the printing can be, for example, conducted as follows, but is not limited thereto. Several kinds of polynucleotide probes are printed within an area of 4.5 mm×4.5 mm. According to this step, respective arrays can be printed using one pin. Accordingly, when a tool with 48 pins is used, 48 arrays can be printed repeatedly on one standard slide for microscopes.

[0169] Then, the cDNA sample is contacted with the basal plate according to the present method. The cDNA sample is hybridized with nucleotide probes on the basal plate, which can specifically hybridize with a DNA encoding a polypeptide of the present invention, in this step. Although the reaction solution and the reaction condition for hybridization varies depending on various factors, such as the length of the nucleotide probe fixed on the basal plate, they can be determined according to usual methods well known to those skilled in the art.

[0170] Next, the expression level of the gene encoding the polypeptide of the present invention contained in the cDNA sample is measured by detecting the hybridization intensity of the cDNA sample with the nucleotide probe fixed on the basal plate. Further, the measured expression level of the gene encoding the polypeptide of the present invention is compared with that of the control.

[0171] A cDNA in the cDNA sample hybridizes with the nucleotide probe fixed on the basal plate when such cDNA derived from the gene encoding the polypeptide of the present exists in the cDNA sample. Thus, the expression level of the gene encoding the polypeptide of the present invention can be measured by detecting the intensity of the hybridization of the polynucleotide probe with the cDNA. One skilled in the art can appropriately conduct the detection of the hybridization intensity of the polynucleotide probe with the cDNA depending on the kind of substances used for labeling the cDNA sample. For example, when the cDNA is labeled with a fluorescent substance, it can be detected by reading out the fluorescent signal with a scanner.

[0172] The expression level of the gene encoding the polypeptide of the present invention in cDNA samples derived from a subject and control (normal healthy subject) can be measured simultaneously in one measurement by labeling them with different fluorescent substances according to the method of the present invention. For example, one of the above-mentioned cDNA samples can be labeled with a fluorescent substance, Cy5, and the other with Cy3. The intensity of respective fluorescent signals show the expression level of the gene encoding the polypeptide of the present invention in the subject and the control, respectively (Duggan et al., Nat. Genet. 21:10-14 (1999)).

[0173] On the other hand, polypeptide samples are first prepared from subjects in the test for the translational level of a gene encoding a polypeptide of the present invention. Then, the amount of the polypeptide of the present invention contained in the polypeptide sample is measured and compared with that of the control.

[0174] Exemplarily methods include the SDS polyacrylamide electrophoresis method; and methods utilizing antibodies binding to the polypeptides of the invention like the Western blotting method, dot-blotting method, immunoprecipitation method, enzyme-linked immunosorbent assay (ELISA), and immunofluorescence.

[0175] When the expression level of a gene encoding a polypeptide of the present invention is significantly changedin comparison with that of the control, the subject is judged to be infected with a disease related to the expression abnormality of the gene, or to be in danger for the onset of the disease.

[0176] Test Drug

[0177] Furthermore, the present invention provides test drugs for diseases related to abnormal expression of a gene encoding a polypeptide of the present invention, or related to abnormal activities of a polypeptide of the present invention.

[0178] An embodiment of a test drug of the present invention contains an oligonucleotide having a chain length of at least 15 nucleotides which hybridizes with a DNA containing a polynucleotide encoding a polypeptide of the present invention or its expression control region as mentioned above. The oligonucleotide can be used in the above-mentioned test method of the present invention as a probe for detecting the gene encoding the polypeptide of the present invention or its expression control region, or as a primer for amplifying the gene encoding the polypeptide of the present invention or its expression control region. The oligonucleotides of the present invention can be prepared, for example, by a commercially available oligonucleotide synthesizing machine. The probes can be also prepared as double-stranded DNA fragments which are obtained by restriction enzyme treatments and such. The oligonucleotides of the present invention are preferably appropriately labeled for the use as a probe. The method of labeling includes, for example, a labeling method using T4 polynucleotide kinase to phosphorylate the 5′-terminus of the oligonucleotide with ³²P; and a method of introducing substrate bases, which are labeled with isotopes such as ³²P, fluorescent dyes, biotin, and so on using random hexamer oligonucleotides and such as primers and DNA polymerase such as Klenow enzyme (the random prime method, etc.).

[0179] Another embodiment of the test drug of the present invention is a test drug containing antibodies which binds to a polypeptide of the present invention described below. The antibodies are used to detect the polypeptide of the present invention in the above-mentioned test method of the present invention. The forms of the antibodies are not limited so long as they can detect the polypeptides of the present invention. Polyclonal antibodies and monoclonal antibodies are included as the antibodies for the test. The antibodies may be labeled according to needs.

[0180] For example, sterilized water, physiological saline, vegetable oils, surfactants, lipids, solubilizers, buffers, protein stabilizers (such as BSA and gelatin), preservatives, and such may be mixed in the above-mentioned test drugs except the effective ingredient, oligonucleotide and antibody, if necessary.

[0181] Antibody

[0182] The present invention provides antibodies that bind to a polypeptide of the present invention. Herein, the term “antibodies” refers to polyclonal antibodies, monoclonal antibodies, chimeric antibodies, single-stranded antibodies, humanized antibodies, and Fab fragments including Fab or other products of the immunoglobulin expression library.

[0183] A polypeptide of the present invention or its fragment, or analogs thereof, or a cell that expresses them can be used as an immunogen for producing antibodies binding to the polypeptide of the present invention. The antibodies are preferably immunospecific to a polypeptide of the present invention. The term “immunospecific” means that the antibody has substantially higher affinity to the polypeptide of the present invention than to other polypeptides.

[0184] The antibodies binding to a polypeptide of the present invention can be prepared by conventional methods. For example, a polyclonal antibody can be obtained as follows. A polypeptide of the present invention or a fusion protein thereof with GST is immunized to small animals such as rabbit to obtain serum. The polyclonal antibody is prepared by purifying the serum through ammonium sulfate precipitation; protein A or protein G column; DEAE ion exchange chromatography; affinity column wherein the polypeptide of the present invention are coupled; and so on. On the other hand, a monoclonal antibody, for example, can be prepared as follows. A polypeptide of the present invention is administered to small animals such as mouse and the spleen is subsequently extirpated from the mouse and ground down to separate cells. Then, the cells are fused with mouse myeloma cells using reagents such as polyethylene glycol, and clones that produce antibodies binding to the polypeptide of the present invention are selected from these fused cells (hybridoma). The obtained hybridoma is then transplanted into the peritoneal cavity of a mouse, and ascites is collected from the mouse. The monoclonal antibodies can be prepared by purifying the ascites using, for example, ammonium sulfate precipitation; protein A or protein G column; DEAE ion exchange chromatography; affinity column wherein the polypeptides of the present invention are coupled; and so on.

[0185] The antibodies of the present invention can be used for the isolation, identification, and purification of the polypeptides of the present invention and cells expressing them. The antibodies binding to a polypeptide of the present invention can be also used for determining the expression level of a polypeptide of the present invention to test for a disease related to abnormal expression of a polypeptide of the present invention.

[0186] Identification of Ligand, Agonist, or Antagonist

[0187] The polypeptides of the present invention can be also used to identify ligands, agonists, or antagonists thereof. These object molecules of the identification may be naturally-occurring molecules as well as structural or functional imitated molecules, which are artificially synthesized. The polypeptides of the present invention are related to various biological functions, including many pathologies. Thus, the detection of compounds that activate the polypeptides of the present invention, and compounds that inhibit the activation of the polypeptides of the present invention is expected.

[0188] To identify ligands against the polypeptide of the present invention, a polypeptide of the present invention is first contacted with a candidate compound, and then, it is detected whether or not the candidate compound binds to the polypeptide of the present invention.

[0189] There is no limitation on the sample to be tested and such samples include, for example, various known compounds and peptides whose ligand activity to GPCRs are unknown (for example, those registered in the Chemical File); and random peptide groups, which were produced by utilizing the phage-display method (J. Mol. Biol. (1991) 222, 301-310). Further, culture supernatant of microorganism; natural components derived from plants and marine organisms; and so on can be used as the object of the screening. Moreover, extract from biotic tissues such as brain; extracted solutions from cells; expression products of gene libraries; and so on can be also mentioned as samples to be tested, but is not limited thereto.

[0190] According to the present method, binding of the purified polypeptides of the present invention with candidate compounds can be detected. Conventional methods, such as methods purifying compounds binding to a protein of the present invention by contacting a test sample with an affinity column of the polypeptide of the present invention; and the West-Western blotting method, can be utilized to detect binding. Candidate compounds are appropriately labeled according to these methods, and the binding with the polypeptide of the present invention is detected utilizing the label. Further, a method detecting the surface plasmon resonance changes caused by the dissociation of a trimeric-type GTP binding protein due to the binding of a ligand, by preparing cell membranes in which the polypeptide of the present invention is expressed, fixing the membrane on a chip, and detecting the changes of surface plasmon resonance on the chip (Nature Biotechnology (99) 17:1105). Further, the binding activity of a candidate compound and the polypeptide of the present invention can be also detected using signals as an index of activation of the polypeptide of the present invention. Such signal includes, for example, changes of intracellular Ca²⁺ level, changes of intracellular cAMP level, changes of intracellular pH, and changes of intracellular adenylate cyclase level, but are not restricted to these examples.

[0191] As an example of the method, a procedure as follows can be conducted: (1) a cell membrane expressing the polypeptide of the present invention is mixed with 400 pM of GTPγS labeled with ³⁵S in a solution of 20 mM HEPES (pH 7.4), 100 mM NaCl, 10 mM MgCl₂, and 50 μM GDP; (2) the reaction solution is incubated in the presence and in the absence of a test sample; (3) the solution is filtrated; and (4) the radioactivity of bound GTPγS is compared.

[0192] Further, the GPCR share a system transmitting a signal into the cell through the activation of the trimeric-type GTP binding protein in common. The trimeric-type GTP binding protein is classified depending on the type of activated intracellular transmission system into 3 types: (1) Gq type, those increasing Ca²⁺; (2) Gs type, those increasing cAMP; and (3) Gi type, those suppressing cAMP. Positive signals of the ligand screening can be transduced to an increase of the Ca²⁺ level, which is the intracellular transmission pathway of Gq, by applying the system. More specifically, it can be transduced to an increase of the Ca²⁺ level by forming chimeras of Gq protein α subunit and other G protein α subunits, or by using promiscuous G α protein, G α15 and G α16. The increased Ca²⁺ level can be detected using changes of reporter gene systems, comprising TRE (TPA responsive element) or MRE (multiple responsive element) upstream in the system; staining indicators such as Fura-2, Fluo-3; and fluorescent protein, aequorin, and so on as an index. Similarly, the chimerizing the Gs protein α subunit and other G protein α subunit to transduce the positive signals to increased cAMP levels, which is the intracellular transmission pathway of Gs, the ligands, can be detected by using the changes in a reporter gene system including CRE (cAMP-responsive element) upstream as an index (Trends Pharmacol. Sci. (99) 20: 118-124).

[0193] Host cells to express the polypeptides of the present invention in the screening system are not specifically limited, and various host cells can be used in accordance with the object. For example, mammal cells such as COS cell, CHO cell, HEK 293 cell; yeast; Drosophila-derived cell; and E. coli cell be mentioned. Vectors containing a promoter positioned upstream of the gene encoding the polypeptide of the present invention, a splice site of RNA, polyadenylation site, transcription termination sequence, origin of replication, and such can be preferably used as vectors for expressing the polypeptides of the present invention in vertebrate animal cells. For example, pSV2dhfr (Mol. Cell. Biol. (1981) 1, 854-864) containing the early promoter of SV40; pEF-BOS (Nucleic Acids Res. (1990) 18, 5322); pCDM8 (Nature (1987) 329, 840-842); pCEP4 (Invitrogen); and such are useful vectors for expressing GPCR. The insertion of a DNA encoding a polypeptide of the present invention to a vector can be carried out by a ordinary method utilizing the ligase reaction with restriction enzyme sites (Current protocols in Molecular Biology, edit. Ausubel et al., (1987) Publish. John Wiley & Sons, Section 11.4-11.11) Further, the introduction of a vector to the host cell can be carried out by known methods such as the calcium phosphate precipitation method, the electroporation method (Current protocols in Molecular Biology, edit., Ausubel et al., (1987) Publish. John Wiley & Sons. Section 9.1-9.9), the Lipofectamine method (GIBCO-BRL), the FuGENE6 reagent (Boehringer Mannheim), the microinjection method, and so on.

[0194] To identify agonists of a polypeptide of the present invention, a cell expressing the polypeptide of the present invention is contacted with candidate compounds to detect whether or not the candidate compounds generate a signal, which then works as an index of activation of the polypeptide of the present invention. Namely, compounds are identified which generate a signal indicative of activation of the present polypeptide in the above-described identification method for a ligand using cells expressing the polypeptide of the present invention. Such compounds serve as agonist candidates of the polypeptide of the present invention.

[0195] To identify antagonists of a polypeptide of the present invention, a cell expressing the polypeptide of the present invention is contacted with an agonist for the polypeptide of the present invention in the presence of a candidate compound to detect whether or not the signal, which serves as an index of activation of the polypeptide of the present invention, is reduced in comparison with a case (control) where the detection is conducted in the absence of the candidate compound. Namely, compounds suppressing the generation of the signal, which serves as an index of the activation of the present polypeptide by the agonist excitation, are isolated by acting the agonist as well as the candidate compound in the above-mentioned identification method of a ligand using the cell expressing the polypeptide of the present invention. Such compounds serve as candidates of antagonist of the polypeptide of the present invention. Examples of potent antagonists of the polypeptide of the present, invention includes antibodies; in some cases, polypeptides having close relation with the ligand (e.g., a ligand fragment); and small molecules which bind to a polypeptide of the present invention but does not induce response (therefore, the activity of the receptor is prevented).

[0196] Further, the present invention provides a kit to be used for the above-mentioned identification method. The kit includes a polypeptide of the present invention, or a cell expressing a polypeptide of the present invention, or cell membranes of the cells. The kit may include compounds serving as candidates for ligands, agonists, and antagonists of GPCR.

[0197] Pharmaceutical Composition for Treatment of Disease

[0198] The present invention provides pharmaceutical compositions for treating patients who are in need of an increase in or the suppression of the activity or expression of a pblypeptide of the present invention.

[0199] An agonist of the polypeptide of the present invention, a polynucleotide of the present invention, and a vector wherein a polynucleotide of the present invention is inserted can be used as an effective ingredient of the pharmaceutical composition for increasing the activity or expression of the polypeptide of the present invention. On the other hand, an antagonist of a polypeptide of the present invention, a polynucleotide suppressing the expression of the gene encoding the endogenous polypeptide of the present invention in vivo can be used as an effective ingredient of the pharmaceutical composition for suppressing the activity or expression of the polypeptide of the present invention. Antagonists include polypeptides of the present invention in a soluble form, which have the ability to bind to a ligand under a competitive condition with the endogenous polypeptide of the present invention. A typical example of such competitive substance is a fragment of a polypeptide of the present invention. The antisense DNAs and ribozymes mentioned above are also included as polynucleotides suppressing the expression of a gene encoding a polypeptide of the present invention.

[0200] When a therapeutic compound is used as a pharmaceutical agent, it can be administered as a pharmaceutical composition prepared by known pharmaceutical methods, in addition to directly administering the compound itself to a patient. For example, it can be formulated into a form suitable for oral or parenteral administration, such as tablet, pill, powder, granule, capsule, troche, syrup, liquid, emulsion, suspension, injection (such as liquid, and suspension) suppository, inhalant, percutaneous absorbent, eye drop, eye ointment, obtained by mixing the active ingredient with a pharmacologically acceptable support (such as excipient, binder, disintegrator, flavor, corrigent, emulsifier, diluent, solubilizer).

[0201] Administration to a patient can be typically carried out by methods known to those skilled in the art, such as intra-arterial injection, intravenous injection, subcutaneous injection, and such. Although the dosage varies depending on the weight and age of the patient, administration methods, and such, one skilled in the art can appropriately select an appropriate dose. Further, if the compound can be encoded by DNA, gene therapy can be also carried out through introduction of the DNA to a vector for gene therapy.

[0202] The vectors for gene therapy include, for example, viral vectors such as retroviral vectors, adenoviral vectors, adeno-associated viral vectors; and non-viral vectors such as liposomes; and so on. The objective DNA can be administered to a patient by ex vivo methods and in vivo methods utilizing such vectors.

### EXAMPLES

[0203] The identification of the polypeptides of the present invention is illustrated below in detail by way of Examples.

### Example 1

[0204] Extraction of Amino Acid Sequences from Human Genome Data

[0205] In the first step for discovering novel GPCR genes (i.e., sequence extraction), the present inventors selected all candidates of the 6-frame translation sequences (6F development sequence), which exist between the initiation codon and termination codon in human genome sequences. When a plurality of initiation codons (ATG) are found on the same sequence, the initiation codon giving the longest sequence was selected. On the other hand, in order to detect sequences containing plural exons, protein-coding regions (GD sequence) were discovered using the gene discovery program (GeneDecoder) (Asai, K., et al., Pacific Symposium on Biocomputing 98,. pp. 228-239 (PSB98, 1998)). Since a GPCR protein contains seven transmembrane helices with a length of about 20 residues, the condition for both sequences was set to comprise 150 residues or more (>20*7).

[0206] 375,412 sequences by 6-frame translation and 95,900 sequences by the GeneDecoder were predicted. The sequences predicted by 6-frame translation correspond to sequences without introns, and those by the GeneDecoder are mainly constituted of sequences with plural exons.

[0207] The GeneDecoder is a gene discovery program using a hidden Markov Model (HMM), as well as information related to sequence homology and distribution of the length of exons. The program was evaluated by using Genset 98 (http://bioinformatics weizmann.ac.il/databases/gensets/Human/), which contains 462 sequences comprising plural exons, and 2,843 exons, and resulted in 97.6% sensitivity and 40.4% selectivity at the nucleotide level. On the other hand, sensitivity and selectivity for detecting a correct exon boundary was 64.2% and 21.3%, respectively.

### Example 2

[0208] Triple Analysis

[0209] BLASTP (Altschul, S.F. et al., Nucleic Acids Res. 25, 3389-3402 (1997)) for searching sequences; PFAM database (Bateman, A., et al., Nucleic Acids Res. 28, 263-266 (2000)) and PROSITE databases (Bairoch, A., Nucleic Acids Res. 20, Suppl: 2013-2018 (1992)) for assigning domains and motifs; and TMWindows, which is a unique algorithm written by the present inventors, and further, Mitaku method (Hirokawa, T., et al., Bioinformatics. 14, 378-379 (1998)) for predicting TMH were used in the triple analysis. Specifically, the inventors carried out the triple analysis as follows:

[0210] (1) Amino acid sequences (6F development sequences, GD sequences) obtained in the sequence extraction step were searched in SWISSPROT database using BLASTP, and sequences which coincide with known GPCR sequences with an E-value of <10⁻¹⁰ or 10⁻⁵⁰ were selected.

[0211] (2) Sequences wherein a GPCR-specific domain in PFAM database could be assigned with an E-value of <1.0 or 10⁻¹⁰ were selected from the 6F development sequences and GD sequences using HMMER program. Simultaneously, sequences wherein a GPCR-specific motif pattern in PROSITE (Bairoch, A. Nucleic Acids Res. 20, Suppl: 2013-2018(1992)) database could be assigned with a P-value of <2×10⁻³ or <10⁻⁵ were selected.

[0212] (3) The number of transmembrane helices in 6F development sequences and GD sequences was predicted using the TMWindows and Mitaku method. For example, describing the logical sum of the result obtained by TMWindows as having 7 transmembrane helices and the result obtained by the Mitaku method as having 6 to 8 transmembrane helices as {TMWindows (7) or Mitaku (6-8)}, sequences which were coincided to respective conditions prepared as {TMWindows (7) or Mitaku (6-8)}, {TMWindows (7) or Mitaku (7)}, and {TMWindows (7) and Mitaku (7)} were selected.

[0213] The programs and databases which were used in the analysis above are described in detail. PFAM is a protein domain database which was described by the hidden Markov Model (HMM), HMMER (Bateman, A., et al. , Nucleic Acids Res. 28, 263-266 (2000)) attributes them to the sequences, and the significance is scored by the E-value. On the other hand, PROSITE is a motif pattern which is described by normal representation. The present inventors used “P-value”, which was obtained by multiplying the appearance probability of respective residues, as an index in order to score the significance of attribution. For example, when the normal representation pattern is A-[T,S]-G, the P-value is P_{A}*{Pt+PS}*P_{G}.

[0214] TMWindows is a unique program written by the present inventors and relates to TMH prediction. Herein, the hydrophobic index of Engelman-Staitz-Goldman (Engelman, D. M., et al., Annual Review of Biophysics and Biophysical Chemistry. 15, 321-353. (1986)) is allotted to every amino acid residue, and all sequences are scanned by nine different window widths (19- to 27 residues). The index was determined as the most suitable index for membrane protein analysis through the comparison of all indices contained in the AAindex database (Tomii, K. & Kanehisa, M. Protein Eng. 9, 27-36 (1996)). Continuous regions having an average hydrophobic index of >2.5 were predicted as transmembrane helices from each window width. The numbers which are predicted by each different window sets indicates a range of the numbers of the helices. On the other hand, the number of helices was predicted by the Mitaku method using physicochemical parameters.

[0215] The thresholds used in these analyses were obtained by the evaluation of respective methods by the present inventors. The reference data set used for evaluation is a sequence set obtained by excluding fragment sequences from SWISSPROT version 39 (Bairoch, A. & Apweiler, R., Nucleic Acids Res. 28, 45-48 (2000)), which contains 1,054 known GPCR sequences and 64,154 non-GPCR sequences. Specific evaluation procedures of the analytical method are shown below.

[0216] (1) 1,054 known GPCR sequences were searched in the data set for evaluation using BLASTP, and the sensitivity and selectivity related to the discrimination of accurate and inaccurate pairs were calculated for each E-value.

[0217] (2) A PFAM domain specific to GPCR was attributed to the sequences of the data set for evaluation using HMMER, and the sensitivity and selectivity of the E-values were calculated for the number of the accurate and inaccurate attribution. On the other hand, the sensitivity and selectivity of P-values were calculated for the number of the accurate and inaccurate attribution with respect to PROSITE pattern.

[0218] (3) In general, the TMH anticipation tool is not so accurate in predicting real number of helices. However, by establishing the number of helix to be predicted widely as 6 to 8, 5 to 9, or 4 to 10, and such, the sensitivity for detecting a real seven transmembrane helix type sequence can be significantly increased. We considered four ranges: 7, 6 to 8, 5 to 9, and 4 to 10, for both TMWindows and the Mitaku method, and calculated the sensitivity and selectivity to detect a real seven transmembrane helix for all of the combinations (16 combinations) for each of them.

[0219] During the evaluation, the present inventors laid emphasis on two thresholds, namely, the best sensitivity threshold and the best selectivity threshold. The former threshold is intended to minimize the false positive to obtain a sensitivity of almost 100%. On the other hand, the latter is intended to minimize the false negative to obtain a selectivity of almost 100%.

[0220] For example, the evaluation of the threshold of BLASTP is shown in FIG. 1. The arrow on the left represents the number of pairs between GPCRs, and the arrow on the right shows the pair between GPCR and non-GPCR sequence. In the region wherein the E-value is less than 10-50, almost all of the pairs were formed between GPCR sequences, excluding some unrelated pairs near the boundary region. This corresponds to the best selectivity threshold. Interestingly, these false positives were caused by the correspondence with LDL receptor domains or EGF factor domains, which are characteristic in receptors having only one transmembrane helix. When the E-value is less than 10^{-10,} the number of false positives was 115, but almost all of GPCRs were within the range. The boundary region corresponds to the best sensitivity threshold.

[0221] Similarly, as summarized in Table 1, the present inventors evaluated thresholds of respective tools and generated four levels of data sets based on them.

TABLE 1

| | Level A | | | Level D |
|---|---|---|---|---|
| | (Best Selectivity) | Level B | Level C | (Best Sensitivity) |
| BLASTP | E < 10⁻⁵⁰ | E < 10⁻¹⁰ | E < 10⁻¹⁰ | E < 10⁻¹⁰ |
| | (99%, 100%) | (100%, 90.1%) | (100%, 90,1%) | (100%, 90.1%) |
| PFAM | E < 10⁻¹⁰ | E < 1.0 | E < 1.0 | E < 1.0 |
| | (95%, 99.6%) | (100%, 84.3%) | (100%, 84.3%) | (100%, 84.3%) |
| PROSITE | P < 10⁻⁵ | P < 2 × 10⁻³ | P < 2 × 10⁻³ | P < 2 × 10⁻³ |
| | (90%, 100%) | (100%, 95.0%) | (100%, 95.0%) | (100%, 95.0%) |
| PMH | Not used | {TMWindows (7) | {TMWindows (7) | {TMWindows (7) or |
| Prediction | | and Mitaku (7)} | or Mitaku (7)} | Mitaku (6-8)} |
| | | (36.0%, 70.6%) | (86.8%, 44.6%) | (99.3%, 28.8%) |

[0222] Herein, the sensitivity (left) and selectivity (right) obtained by using each threshold are represented in the parentheses under the threshold of each program.

[0223] The most reliable data (level A, the best selectivity data set) was obtained by the logical sum of sequences obtained from the best selectivity thresholds of BLASTP, PFAM, and PROSITE. In addition, in order to discover far-related GPCR sequences, the logical sum of results by three levels (Table 1) of TMH prediction threshold and results by the best sensitivity thresholds of BLASTP, PFAM, and PROSITE was obtained. Then, the most sensitive data set was prepared as the best sensitivity data set (level D). According to the evaluation method used by the present inventors, any of the sequences discovered by the best selectivity data set is a protein having seven transmembrane helices, and the possibility that they are a guanosine triphosphate binding protein-coupling type is extremely high.

### Example 3

[0224] Accurate Selection of the Number of Genes

[0225] GPCR candidate substances were screened from sequences generated in the first step, using the thresholds shown in Table 1. However, since these sequences contained following duplicated examples, it was required to finally select rigidly the number of candidates.

[0226] Case 1: Perfect matching or duplication at a same gene locus.

[0227] These resulted from using two sequence preparation methods: namely, (1) 6-frame translation, and (2) prediction by the GeneDecoder. The present inventors regarded them as same genes.

[0228] Case 2: Many copies on different chromosomes or at different positions on a same chromosome.

[0229] From a biological viewpoint, the present inventors regarded them as different genes. Duplicated genes were most frequently found between chromosome 2 and 11.

[0230] Case 3: Two or more sequences partially corresponding to any long known sequence.

[0231] These were considered to be generated by missplicing by the gene discovery program. The present inventors considered that they should be fused as generally one gene.

[0232] The present inventors first improved the precision of candidate genes by studying above-mentioned cases, respectively. Two sequences, i and j, were regarded as the same gene by using a specific algorithm: Cᵢ=Cⱼ, Fᵢ=Fⱼ, nᵢ=nⱼ, and eᵢ−tⱼ<0 (i<j); wherein 50 or more residues are aligned at 99% or more similarity (herein, “C” represents chromosome number; “F” frame number; “R” the position on a genomic sequence; and S (C,F,R) sequence), (Herein, when n is a contiguous number and t and e are relative positions at the N- and C-terminus on a contiguous sequences, the positions R is R (n, t, e)).

[0233] After the above screening, the present inventors finally obtained the best selectivity and the best sensitivity data sets containing 883 and 2,293 sequences, respectively, and also further obtained other levels of data sets by considering further biological information. The number of GPCR candidates of every chromosome is summarized in Table 2 for each data set.

TABLE 2

| Chromosome | Level 1A | Level 1B | Level 1C | Level 1D |
|---|---|---|---|---|
| 1 | 90 | 133 | 150 | 190 |
| 2 | 44 | 80 | 93 | 119 |
| 3 | 53 | 79 | 95 | 142 |
| 4 | 17 | 39 | 43 | 65 |
| 5 | 24 | 53 | 69 | 100 |
| 6 | 53 | 70 | 80 | 111 |
| 7 | 45 | 82 | 90 | 111 |
| 8 | 21 | 28 | 32 | 50 |
| 9 | 33 | 50 | 56 | 72 |
| 10 | 15 | 28 | 38 | 58 |
| 11 | 249 | 343 | 353 | 386 |
| 12 | 32 | 74 | 88 | 138 |
| 13 | 10 | 19 | 28 | 51 |
| 14 | 41 | 54 | 60 | 79 |
| 15 | 16 | 23 | 32 | 69 |
| 16 | 15 | 30 | 49 | 77 |
| 17 | 38 | 52 | 59 | 76 |
| 18 | 8 | 23 | 26 | 39 |
| 19 | 53 | 84 | 88 | 114 |
| 20 | 7 | 18 | 22 | 34 |
| 21 | 0 | 4 | 4 | 8 |
| 22 | 5 | 9 | 12 | 19 |
| X | 14 | 24 | 26 | 47 |
| Y | 0 | 0 | 0 | 0 |
| U | 0 | 44 | 77 | 138 |
| Total | 883 | 1443 | 1670 | 2293 |

[0234] As shown in the table, it was found that chromosome 11 has the maximum number of GPCR candidates in all levels of data sets, chromosomes 1, 6, and 19 also have many GPCR candidates. On the other hand, chromosomes 21 and Y have extremely few GPCR candidates. Further, this tendency does not have changed, even after updating the data monthly.

[0235] Further analysis concerning the best selectivity data set is summarized in Table 3.

TABLE 3

| | Data |
|---|---|
| Families | Total |
| Acetycholine (muscarinic) receptors | 12 |
| Adenosine and adenine nucleotide receptors | 17 |
| Adrenergic Dopamine Serotonin receptors | 38 |
| Angiotensin receptors | 5 |
| Bradykinin receptors | 3 |
| Cannabinoids receptors | 1 |
| Chemokines and chemotactic factors receptors | 31 |
| Cholecystokinin/gastrin receptors | 3 |
| Endothelin receptors | 2 |
| Family 2 (B) receptors | 20 |
| Family 3 (C) receptors | 30 |
| Family fz/smo receptors | 11 |
| Glycoprotein hormones receptors | 5 |
| Histamine receptors | 3 |
| Melanocortins receptors | 5 |
| Melanotonin receptors | 5 |
| Neuropeptide Y receptors | 7 |
| Neurotensin receptors | 6 |
| no swissprot 7tm | 16 |
| Odorant/olfactory and gustatory receptors | 537 |
| Opioid peptides receptors | 5 |
| Opsins | 6 |
| Orphan receptors | 76 |
| Other receptors | 4 |
| Platelet activating factor receptors | 3 |
| Prostanoids receptors | 8 |
| Proteinase-activated receptors | 5 |
| Releasing hormones receptors | 4 |
| Somatostatin receptors | 8 |
| Tachykinin receptors | 3 |
| Vasopressin/oxytocin receptors | 4 |
| Total | 883 |

[0236] The present inventors classified sequences by a sequence similarity of 30%, which is generally considered to be the threshold for an evolutionarily related family. The largest family is the olfactory receptor family, containing 537 members. Major families containing more than 20 members are: the adrenalin, dopamine, and serotonin receptor family (38); the 2B receptor family (20); the 3C receptor family (30); the chemokine and chemoatractant receptor family (31); and the orphan receptor family (76).

### Example 4

[0237] Extraction of Novel Sequence

[0238] Sequences were searched in UNIGENE (Schuler, G. D., J. Mol. Med. 75, 694-698 (1997)) and nr-aa (ftp://ncbi.nlm.nih.gov/blast/db/README) databases. When at least 100 or more residues in the sequences which were investigated were continuously aligned with known sequences, and when the amino acid identity of that region is 96% or more, the present inventors designated the sequence as a known sequence. Novel GPCR candidates were obtained using this standard. These data sets will be maintained and updated by routine recalculations to the future.

[0239] The present inventors classified the extracted novel sequences into groups A, B, and C (Table 4 to Table 6). The sequences in groups A, B, and C are newly identified sequences, selected based on the search method in UNIGENE and nr-aa database, after the numbers of the sequences were made precise based on the best selectivity data set (level A), the data set at level B, and the data set at level C, respectively, among sequence sets which were obtained by triple analysis.

[0240] Further, the nucleotide sequences and amino acid sequences of the novel gene described in group A are shown in SEQ ID NOs: 1 to 1102; those described in group B are shown in SEQ ID NOs: 1 to 2038; and those described in C group are shown in SEQ ID NOs: 1 to 2430.

### Table 4

[0241] Sequence Group A (Based on Best Selectivity Dataset (Level A) in Table 1)

| | | | | |
|---|---|---|---|---|
| Se- | | | Number | |
| quence | Assayed | | of novel | SEQ |
| set | amino acids | Assay method | genes | ID NO: |

| | | | | |
|---|---|---|---|---|
| A-1 | 6F development | Homology search | 277 | 1-554 |
| | sequence | | | |
| A-2 | GD sequence | Homology search | 136 | 555-826 |
| A-3 | 6F development | Motif search | 138 | 827-1102 |
| | sequence | | | |
| | GD sequence | Domain search | | |

A-1 Sequence set obtained through the assay of 6F sequences by homology search (use of the most easy method).
A-2 The part of amino acid sequence comprising multi exon, increased by use of GD sequence.
A-3 Sequence set found for the first time by use of motif and domain attribution. Homologous with very little homology, which cannot be found through normal sequence searches, were detected.

[0242] TABLE 5
Sequence group B (based in Level B in Table 1)

| Sequence | | | Number of | |
|---|---|---|---|---|
| set | Assayed amino acids | Assay method | novel genes | SEQ ID NO: |
| B-1 | 6F development sequence | Homology search | 482 | 1-554 |
| | | | | 1103-1512 |
| B-2 | GD sequence | Homology search | 223 | 555-826 |
| | | | | 1513-1686 |
| B-3 | 6F development sequence | Motif search | 283 | 827-1102 |
| | GD sequence | Domain search | | 1687-1984 |
| B-4 | 6F development sequence | Transmembrane helix | 27 | 1985-2430 |
| | GD sequence | prediction | | |

B-1 Sequence set obtained through the assay of 6F sequences by homology search (use of the most easy method).
B-2 The part of amino acid sequence comprising multi exon, increased by use of GD sequence.
B-3 Sequence set found for the first time by use of motif and domain attribution. Homologous with very little homology, which cannot be found through normal sequence searches, were detected.
B-4 Sequence set found for the first time by use of the prediction method through normal motif and domain attribution were also determined.

[0243] TABLE 6
Sequence group C (based on Level C in Table 1)

| Sequence | | | Number of | |
|---|---|---|---|---|
| set | Assayed amino acids | Assay method | novel genes | SEQ ID NO: |
| C-1 | 6F development sequence | Homology search | 482 | 1-554 |
| | | | | 1103-1512 |
| C-2 | GD sequence | Homology search | 223 | 555-826 |
| | | | | 1513-1686 |
| C-3 | 6F development sequence | Motif search | 287 | 827-1102 |
| | GD sequence | Domain search | | 1687-1984 |
| C-4 | 6F development sequence | Transmembrane helix | 223 | 1985-2430 |
| | GD sequence | prediction | | |

C-1 Sequence set obtained through the assay of 6F sequences by homology search (use of the most easy method).
C-2 The part of amino acid sequence comprising multi exon, increased by use of GD sequence.
C-3 Sequence set found for the first time by use of motif and domain attribution. Homologous with very little homology, which cannot be found through normal sequence searches, were detected.
C-4 Sequence set found for the first time by use of the prediction method for the transmembrane helix. Sequences which cannot be found even through normal motif and domain attribution were also determined.

[0244] Effects of the Invention

[0245] According to the present invention, novel GPCRs, polynucleotides encoding the polypeptides, vectors containing the polynucleotides, host cells containing the vectors, and methods or producing the polypeptides have been provided. Further, methods of identifying a compound which binds to a polypeptide or modifies its activity have been provided. The polypeptides, polynucleotides, and compounds which bind to a polypeptide of the present invention or modify its activity are expected to be useful in the development of novel preventive and therapeutic drugs for diseases associated with the polypeptides of the present invention. Furthermore, according to the present invention, test methods for diseases comprising the step of detecting mutations and expression of a gene encoding a polypeptide of the present invention have been provided. GPCR is one of the molecules which is most important and remarked in the fields of the development of pharmaceutical agents and medical treatments. Novel GPCRs comprehensively provided in the present invention are expected to make remarkable development in these fields. Thus, the present invention provides valuable information to the researchers of GPCR.

1. A polynucleotide encoding a guanosine triphosphate-binding protein coupled receptor selected from the group of:
(a) a polynucleotide encoding a polypeptide coprising an amino acide sequence selected from the group consisting of the even-numbered SEQ ID NOs from SEQ ID NO: 2 to SEQ ID NO: 2430;
(b) a polynucleotide comprising a coding region of the ncleotide sequence selected from the group consisting of the odd-numbered SEQ ID NOs from SEQ ID NO: 1 to SEQ ID NO: 2429;
(c) a polynucleotide encoding a polypeptide comprising an amino acid sequence selected from the group consisting of the even-numbered SEQ ID NOs from SEQ ID NO: 2 to SEQ ID NO: 2430 wherein one or more amino acid residues are substituted, deleted, added and/or inserted; and
(d) a polynucleotide hybridizing under stringent conditions with a DNA consisting of a nucleotide sequence selected from the group consisting of the odd-numbered SEQ ID NOs from SEQ ID NO: 1 to SEQ ID NO: 2429.

2. A polynucleotide encoding a fragment of a polypeptide comprising an amino acid sequence selected from the group consisting of the even-numbered SEQ ID NOs from SEQ ID NO: 2 to SEQ ID NO: 2430.

3. A vector comprising the polynucleotide of claim 1 or 2.

4. A host cell retaining the polynucleotide of claim 1 or 2, or the vector of claim 3.

5. A polypeptide encoded by the polynucleotide of claims 1 or 2.

6. A method for producing the polypeptide of claim 5, comprising the step of culturing the host cell of claim 4, and recovering the produced polypeptide from said host cell or culture supernatant thereof.

7. An antibody binding to the polypeptide of claim 5.

8. A method of identifying a ligand of the polypeptide of claim 5, comprising the steps of:
(a) contacting a candidate compound with the polypeptide of claim 5, a cell expressing the polypeptide of claim 5, or a cytoplasmic membrane of the cell; and
(b) detecting whether the candidate compound binds to the polypeptide of claim 5, the cell expressing the polypeptide of claim 5, or the cytoplasmic membrane thereof, wherein the detection of binding implies that said candidate compound is a ligand of the polypeptide of claim 5.

9. A method for identifying an agonist of the polypeptide of claim 5, comprising the steps of:
(a) contacting a candidate compound with a cell expressing the polypeptide of claim 5; and
(b) detecting whether the candidate compound induces a signal that indicates the activation of the polypeptide of claim 5, wherein the detection of activation implies that said candidate compound is an agonist of the polypeptide of claim 5.

10. A method for identifying an antagonist of the polypeptide of claim 5, comprising the steps of:
(a) contacting a cell expressing the polypeptide of claim 5 with an agonist of the polypeptide of claim 5 in the presence of a candidate compound; and
(b) detecting whether the intensity of the signal that indicates the activation of the polypeptide of claim 5 is reduced or not by comparing with the signal detected in the absence of the candidate compound, wherein the detection of a reduction in intensity implies that said candidate compound is an antagonist of the polypeptide of claim 5.

11. A ligand identified by the method of claim 8.

12. An agonist identified by the method of claim 9.

13. An antagonist identified by the method of claim 10.

14. A kit used for the method of any one of claims 8 to 10, comprising at least one molecule selected from the group:
(a) the polypeptide of claim 5; and
(b) the host cell of claim 4 or cytoplasmic membrane thereof.

15. A pharmaceutical composition for treating a patient, who is in need of increased activity or expression of the polypeptide of claim 5, comprising an effective amount of a molecule for the treatment selected from the group of:
(a) an agonist of the polypeptide of claim 5;
(b) the polynucleotide of claims 1 or 2; and
(c) the vector of claim 3.

16. A pharmaceutical composition for treating a patient having an endogenous activity or expression of the polypeptide of claim 5 that needs to be suppressed, comprising an effective amount of a molecule for the treatment selected from the group of:
(a) an antagonist of the polypeptide of claim 5; and
(b) a polynucleotide suppressing the expression of a gene encoding the endogenous polypeptide of claim 5 in vivo.

17. A method for testing a disorder associated with the aberration in the expression of a gene encoding the polypeptide of claim 5 or the aberration in the activity of the polypeptide of claim 5 in a subject, comprising the step of detecting a mutation in the gene or in the expression control region thereof of the subject.

18. The method for testing of claim 17, comprising the steps of:
(a) preparing a DNA sample from a subject;
(b) isolating the DNA encoding the polypeptide of claim 5 or the expression control region thereof;
(c) determining the nucleotide sequence of the isolated DNA; and
(d) comparing the nucleotide sequence of DNA determined in step (c) with that determined in a control.

19. The method for testing of claim 17, comprising the steps of:
(a) preparing a DNA sample from a subject;
(b) cleaving the prepared DNA sample with a restriction enzyme;
(c) separating DNA fragments according to the sizes thereof; and
(d) comparing the detected sizes of the DNA fragments with those detected in a control.

20. The method for testing of claim 17, comprising the steps of:
(a) preparing a DNA sample from a subject;
(b) amplifying the DNA encoding the polypeptide of claim 5 or the expression control region thereof from the DNA sample;
(c) cleaving the amplified DNAs with a restriction enzyme;
(d) separating the DNA fragments according to the sizes thereof; and
(e) comparing the detected sizes of the DNA fragments with those detected in a control.

21. The method for testing of claim 17, comprising the steps of:
(a) preparing a DNA sample from a subject;
(b) amplifying the DNA encoding the polypeptide of claim 5 or the expression control region thereof from the sample;
(c) dissociating the amplified DNA to single-stranded DNAs;
(d) separating the dissociated single-stranded DNAs on a non-denaturing gel; and
(e) comparing the mobility of the separated single-stranded DNAs with that of a control.

22. The method for testing of claim 17, comprising the steps of:
(a) preparing a DNA sample from a subject;
(b) amplifying the DNA encoding the polypeptide of claim 5 or the expression control region thereof from the sample;
(c) separating the amplified DNAs on a gel with increasing concentration gradient of a DNA denaturant; and
(d) comparing the mobilities of the separated DNAs with those of a control.

23. A method for testing disorders associated with the aberration in the expression of a gene encoding the polypeptide of claim 5, comprising the step of detecting the expression level of the gene in the subject.

24. The method for testing of claim 23, comprising the steps of:
(a) preparing an RNA sample from a subject;
(b) measuring the amount of RNA encoding the polypeptide of claim 5 contained in said RNA sample; and
(c) comparing the amount of measured RNA with that measured in a control.

25. The method for testing of claim 23, comprising the steps of:
(a) providing a cDNA sample prepared froma subject and a basal plate on which nucleotide probes hybridizing to the DNA encoding the polypeptide of claim 5 are immobilized;
(b) contacting said cDNA sample with said basal plate;
(c) measuring the expressed amount of the gene encoding the polypeptide of claim 5 contained in said cDNA sample by detecting the hybridization intensity between said cDNA sample and the nucleotide probe immobilized on the basal plate; and
(d) comparing the measured expression amount of the gene encoding the polypeptide of claim 5 with the expression measured for a control.

26. The method for testing of claim 23, comprising the steps of:
(a) preparing a protein sample from a subject;
(b) measuring the amount of the polypeptide of claim 5 contained in said protein sample; and
(c) comparing the amount of the measured polypeptide with that measured for a control.

27. An oligonucleotide having a chain length of at least 15 nucleotides hybridizing to a DNA encoding the polypeptide of claim 5 or the expression control region thereof.

28. An assay reagent for testing disorders associated with aberration in the expression of the gene encoding the polypeptide of claim 5 or aberration in the activity of the polypeptide of claim 5, comprising the oligonucleotide of claim 27.

29. An assay reagent for testing disorders associated with aberration in the expression of a gene encoding the polypeptide of claim 5 or aberration in the activity of the polypeptide of claim 5, comprising the antibody of claim 7.

The application's sequence listing, which the Patent Office published only in electronic form, follows.

SEQUENCE LISTING (2430 sequences)

SEQ ID NO: 1 - DNA, 1354 bp, Homo sapiens
  source (1)..(1354)
  CDS (201)..(1154)
caagaaaatccttaaatgaacaatgatggtataatgagatgtagcacaatcctgctcaggcagttctctcagggaaattatgagcttcaagaaataagatcgacttgaccttggtttgttcatgactacatcataatgttttatgtaaatcagatacctttccaactttgtcatatctcttttgtgtaccctacagagctatggagcagagcaattattccgtgtatgccgactttatccttctgggtttgttcagcaacgcccgtttcccctggcttctctttgccctcattctcctggtctttttgacctccatagccagcaacgtggtcaagatcattctcatccacatagactcccgcctccacacccccatgtacttcctgctcagccagctctccctcagggacatcctgtatatttccaccattgtgcccaaaatgctggtcgaccaggtgatgagccagagagccatttcctttgctggatgcactgcccaacacttcctctacttgaccttagcaggggctgagttcttcctcctaggactcatgtcctatgatcgctacgtagccatctgcaaccctctgcactatcctgtcctcatgagccgcaagatctgctggttgattgtggcggcagcctggctgggagggtctatcgatggtttcttgctcacccccgtcaccatgcagttccccttctgtgcctctcgggagatcaaccacttcttctgcgaggtgcctgcccttctgaagctctcctgcacggacacatcagcctacgagacagccatgtatgtctgctgtattatgatgctcctcatccctttctctgtcatctcgggctcttacacaagaattctcattactgtttataggatgagcgaggcagaggggaggggaaaggctgtggccacctgctcctcacacatggtggttgtcagcctcttctatggggctgccatgtacacatacgtgctgcctcattcttaccacacccctgagcaggacaaagctgtatctgccttctacaccatccttactcccatgctcaatccactcatttacagccttaggaacaaggatgtcacaggggccctacagaaggttgtggggaggtgtgtgtcctcaggaaaggtaaccactttctaaagaaatttcatatgctgctagagacttgaaatgaaggatacaagactttatcattgcccttgaatttaaatattctctgcctggaaacaagtgacccacatgccaccaactgtggggcatttatgggatttggaaagctgcctgggattttaaggatttcatttttttgaaaggtatgaaggctctgaacaatgaacagt

SEQ ID NO: 2 - protein, 317 aa, Homo sapiens
MEQSNYSVYADFILLGLFSNARFPWLLFALILLVFLTSIASNVVKIILIHIDSRLHTPMYFLLSQLSLRDILYISTIVPKMLVDQVMSQRAISFAGCTAQHFLYLTLAGAEFFLLGLMSYDRYVAICNPLHYPVLMSRKICWLIVAAAWLGGSIDGFLLTPVTMQFPFCASREINHFFCEVPALLKLSCTDTSAYETAMYVCCIMMLLIPFSVISGSYTRILITVYRMSEAEGRGKAVATCSSHMVVVSLFYGAAMYTYVLPHSYHTPEQDKAVSAFYTILTPMLNPLIYSLRNKDVTGALQKVVGRCVSSGKVTTF

SEQ ID NO: 3 - DNA, 1444 bp, Homo sapiens
  source (1)..(1444)
  CDS (201)..(1244)
  modified_base (1141)..(1240): a, t, c, g, unknown or other
tttcgtagttcactttagcttgtggccaagatacaacttgacctaagatttgaacttatgattttatgtcagtttaaatcaatatttagaaaaataattcaaagcacatgtcttaccagaaaaaggtcaggaaagccatgtacataggaaagatttaaaattaatgacttttttttcctcagggggaaactgagccagtcatgtgctcagggaatcagacttctcagaatcaaacagcaagcactgatttcaccctcacgggactctttgctgagagcaagcatgctgccctcctctacaccgtgaccttccttcttttcttgatggccctcactgggaatgccctcctcatcctcctcatccactcagagccccgcctccacacccccatgtacttcttcatcagccagctcgcgctcatggatctcatgtacctatgcgtgactgtgcccaagatgcttgtgggccaggtcactggagatgataccatttccccgtcaggctgtgggatccagatgttcttctacctgaccctggctggagctgaggttttcctcctggctgccatggcctatgaccgatatgctgctgtttgcagacctctccattacccactgctgatgaaccagagggtgtgccagctcctggtgtcagcctgctgggttttgggaatggttgatggtttgttgctcacccccattaccatgagcttccccttttgccagtctaggaaaatcctgagttttttctgtgagactcctgccctgctgaagctctcctgctctgacgtctccctctataagacgctcatgtacctgtgctgcatcctcatgcttctcgcccccatcatggtcatctccagctcatacaccctcatcctgcatctcatccacaggatgaattctgccgccggccacaggaaggccttggccacctgctcctcccacatgatcatagtgctgctgctcttcggtgcttccttctacacctacatgctcccgagttcctaccacacagctgagcaggacatgatggtgtctgccttttacaccatcttcactcctgtgctgaaccccctcatttacagtctccgcaacaaagatgtcaccagggctatgaggagcatgatgcagtcaagaannnnnnnnnnnnnnnnnnnnnnnnnnnnnnnnnnnnnnnnnnnnnnnnnnnnnnnnnnnnnnnnnnnnnnnnnnnnnnnnnnnnnnnnnnnnnnnnnnnnataaaatgaaaaaatgatagattaacatatacattaaagaagcaacgaaagaatgaaaaagagacgtgaaacagatgggccaaatagaatatggttagaagttatagctcacatagaaccccaattatatcagtaattattacacattgcatgcatgtatcaaaatatcacatgtgccccataagtatgtagaaatattatgta

SEQ ID NO: 4 - protein, 347 aa, Homo sapiens
  MOD_RES (314)..(347): Variable amino acid
MCSGNQTSQNQTASTDFTLTGLFAESKHAALLYTVTFLLFLMALTGNALLILLIHSEPRLHTPMYFFISQLALMDLMYLCVTVPKMLVGQVTGDDTISPSGCGIQMFFYLTLAGAEVFLLAAMAYDRYAAVCRPLHYPLLMNQRVCQLLVSACWVLGMVDGLLLTPITMSFPFCQSRKILSFFCETPALLKLSCSDVSLYKTLMYLCCILMLLAPIMVISSSYTLILHLIHRMNSAAGHRKALATCSSHMIIVLLLFGASFYTYMLPSSYHTAEQDMMVSAFYTIFTPVLNPLIYSLRNKDVTRAMRSMMQSRXXXXXXXXXXXXXXXXXXXXXXXXXXXXXXXXXX

SEQ ID NO: 5 - DNA, 1348 bp, Homo sapiens
  source (1)..(1348)
  CDS (201)..(1148)
ttcttctggcctatagttgtgaattcttagtttgttttgtgaatttgttatatgtcatttatatactcaaatccccagacccacgggactcaggttagcacaatgagcatacacaaatgtgagtactcactaaacactcattacaaagggacgcgttacactgactccaaaactctccttggtggcctaggtgaaacctcatggccaacatcaccaggatggccaaccacactggaaggttggatttcatcctcatgggactcttcagacaatccaaacatccagctctacttagtgtggtcatctttgtggttttcctgaaggcgttgtctggaaatgctgtcctgatccttctgatacactgtgacgcccacctccacagccccatgtactttttcatcagtcaattgtctctcatggacatggcgtacatttctgtcactgtgcccaagatgctcctggaccaggtcatgggtgtgaataaggtctcagcccctgagtgtgggatgcagatgttcctctatctgacactagcaggttcggaatttttccttctagccaccatggcctatgaccgctacgtggccatctgccatcctctccgttaccctgtcctcatgaaccatagggtctgtcttttcctggcatcgggctgctggttcctgggctcagtggatggcttcatgctcactcccatcaccatgagcttccccttctgcagatcctgggagattcatcatttcttctgtgaagtccctgctgtaacgatcctgtcctgctcagacacctcactctatgagaccctcatgtacctatgctgtgtcctcatgctcctcatccctgtgacgatcatttcaagctcctatttactcatcctcctcaccgtccacaggatgaactcagcagagggccggaaaaaggcctttgccacctgctcctcccacctgactgtggtcatcctcttctatggggctgccgtctacacctacatgctccccagctcctaccacacccctgagaaggacatgatggtatctgtcttctataccatcctcactccggtgctgaaccctttaatctatagtcttaggaataaggatgtcatgggggctctgaagaaaatgttaactgtgagattcgtcctttaggaaattataaagtaggaaatttggatataaagatttattttccttttctctacccatcagatacttaggattttatccctgttattccttagactctcatacaatgatgcctcatctcatattcatctcattttgaggaattctttcactgtgtggaaactctattttatagtctttgtccatccaaaattcttttacaa

SEQ ID NO: 6 - protein, 315 aa, Homo sapiens
MANITRMANHTGRLDFILMGLFRQSKHPALLSVVIFVVFLKALSGNAVLILLIHCDAHLHSPMYFFISQLSLMDMAYISVTVPKMLLDQVMGVNKVSAPECGMQMFLYLTLAGSEFFLLATMAYDRYVAICHPLRYPVLMNHRVCLFLASGCWFLGSVDGFMLTPITMSFPFCRSWEIHHFFCEVPAVTILSCSDTSLYETLMYLCCVLMLLIPVTIISSSYLLILLTVHRMNSAEGRKKAFATCSSHLTVVILFYGAAVYTYMLPSSYHTPEKDMMVSVFYTILTPVLNPLIYSLRNKDVMGALKKMLTVRFVL

SEQ ID NO: 7 - DNA, 1351 bp, Homo sapiens
  source (1)..(1351)
  CDS (201)..(1151)
tgcagccatggtttttgcttcatgatgtgcatgttggtctgcctgttcttctctagcctctagcctggaagcttcatcctgacggtaccctcagaagtgtcacctctactgcagacctttcccatcttgaccgtgttctcttgcctccttcctggtccttgtgtcttcccgttgccctgggacgctcgtgggccatatcaatgacgaacacatcatcctctgacttcaccctcctggggcttctggtgaacagtgaggctgccgggattgtatttacagtgatccttgctgttttcttgggggccgtgactgcaaatttggtcatgatattcttgattcaggtggactctcgcctccacacccccatgtactttctgctcagtcagctgtccatcatggacacccttttcatctgtaccactgtcccaaaactcctggcagacatggtttctaaagagaagatcatttcctttgtggcctgtggcatccagatcttcctctacctgaccatgattggttctgagttcttcctcctgggcctcatggcctatgactgctacgtggctgtctgtaaccctctgagatacccagtcctgatgaaccgcaagaagtgtcttttgctggctgctggtgcctggtttgggggctccctcgatggctttctgctcactcccatcaccatgaatgtcccttactgtggctcccgaagtatcaaccattttttctgtgagatcccagcagttctgaaactggcctgtgcagacacgtccttgtatgaaactctgatgtacatctgctgtgtcctcatgttgctcatccccatctctatcatctccacttcctactccctcatcttgttaaccatccaccgcatgccctctgctgaaggtcgcaaaaaggccttcaccacttgttcctcccacttgactgtagttagcatcttctatggggctgccttctacacatacgtgctgccccagtccttccacacccccgagcaggacaaagtagtgtcagccttctataccattgtcacgcccatgcttaatcctctcatctacagcctcagaaacaaggacgtcataggggcatttaaaaaggtatttgcatgttgctcatctgctcagaaagtagcaacaagtgatgcttagagagtcactgcccagaggataaggcttcctaaggacttcctccatttgccctgtttccctggagatgatctgctcagctatcaacctacacttactactggcagttaagatgattcaccctgtctggattcttgctcctcgggagcaagggaaagatgttttactgttatgcagagatctttcagtgaagtatcaaaaat

SEQ ID NO: 8 - protein, 316 aa, Homo sapiens
MTNTSSSDFTLLGLLVNSEAAGIVFTVILAVFLGAVTANLVMIFLIQVDSRLHTPMYFLLSQLSIMDTLFICTTVPKLLADMVSKEKIISFVACGIQIFLYLTMIGSEFFLLGLMAYDCYVAVCNPLRYPVLMNRKKCLLLAAGAWFGGSLDGFLLTPITMNVPYCGSRSINHFFCEIPAVLKLACADTSLYETLMYICCVLMLLIPISIISTSYSLILLTIHRMPSAEGRKKAFTTCSSHLTVVSIFYGAAFYTYVLPQSFHTPEQDKVVSAFYTIVTPMLNPLIYSLRNKDVIGAFKKVFACCSSAQKVATSDA

SEQ ID NO: 9 - DNA, 1339 bp, Homo sapiens
  source (1)..(1339)
  CDS (201)..(1139)
gcccaatttgaatataaagaatattatgtaggttcatagaggaccacttgagttgccttcaaaaatgtaaggaccaacaatgtagattacaactaaaaaaggatcaagactacgatatttaagaaccatctttccatcatttgattcttcgtgagtgttcaggatttctgtttcccaggtccaagcttcatcatccaccgatgcccaattcaaccaccgtgatggaatttctcctcatgaggttttctgatgtgtggacactacagattttacattctgcatccttctttatgttgtatttggtaactctaatgggaaacatcctcattgtgaccgtcaccacctgtgacagcagccttcacatgcccatgtacttcttcctcaggaatctgtctatcttggatgcctgctacatttctgttacagtccctacctcatgtgtcaattccctactggacagcaccaccatttctaaggcgggatgtgtagctcaggtcttcctcgtggttttttttgtatatgtggagcttctgtttctcaccattatggctcatgaccgctatgtggctgtctgccagccacttcactaccctgtgatcgtgaactctcgaatctgcatccagatgacactggcctccctactcagtggtcttgtctatgcaggcatgcacactggcagcacattccagctgcccttctgtcggtccaacgttattcatcaattcttctgtgacatcccctctctgctgaagctctcttgctctgacaccttcagcaatgaggtcatgattgttgtctctgctctgggggtaggtggcggctgtttcatctttatcatcaggtcttacattcacatcttttcgaccgtgctcgggtttccaagaggagcagacagaacaaaggccttttccacctgcatccctcacatcctggtggtgtcagtcttcctcagttcatgctcttctgtgtacctcaggccacctgcgatacctgcagccacccaggatctgatcctttctggtttttattccataatgcctcccctctttaaccctattatttacagtcttagaaataagcaaataaaggtggccatcaagaaaatcatgaagagaattttttattcagaaaatgtgtaagaaacccgagaggctcaccctaggctgttttgtgatattcatgttttcaggaataagttgtaataattgattgtggttattagataaaattggtgtaaatttaataaataaggctactaaaatgcatcatgtatcaaaatcgatatttcctttcaaaagtttttgaataattttaatatgccattgggtaaaaaaatctg

SEQ ID NO: 10 - protein, 312 aa, Homo sapiens
MPNSTTVMEFLLMRFSDVWTLQILHSASFFMLYLVTLMGNILIVTVTTCDSSLHMPMYFFLRNLSILDACYISVTVPTSCVNSLLDSTTISKAGCVAQVFLVVFFVYVELLFLTIMAHDRYVAVCQPLHYPVIVNSRICIQMTLASLLSGLVYAGMHTGSTFQLPFCRSNVIHQFFCDIPSLLKLSCSDTFSNEVMIVVSALGVGGGCFIFIIRSYIHIFSTVLGFPRGADRTKAFSTCIPHILVVSVFLSSCSSVYLRPPAIPAATQDLILSGFYSIMPPLFNPIIYSLRNKQIKVAIKKIMKRIFYSENV

SEQ ID NO: 11 - DNA, 1447 bp, Homo sapiens
  source (1)..(1447)
  CDS (201)..(1247)
ctacaaatcacccttttgatccacagttgtgaattcttagttcctggtaaattttttgaattgcagataatttataacacccaaatctacaggcccatgggcctttctttggttagaacacacacacacacacacaatttgtttcagaggctcaaattactttaaccccaagctttcctttgtggcctaggtgaaacctcatggacaacatcacctggatggccagccacactggatggtcggatttcatcctgatgggactcttcagacaatccaaacatccaatggccaatatcacctggatggccaaccacactggatggtcggatttcatcctgttgggactcttcagacaatccaaacatccagcactactttgtgtggtcatttttgtggttttcctgatggcgttgtctggaaatgctgtcctgatccttctgatacactgtgacgcccacctccacacccccatgtactttttcatcagtcaattgtctctcatggacatggcgtacatttctgtcactgtgcccaagatgctcctggaccaggtcatgggtgtgaataagatctcagcccctgagtgtgggatgcagatgttcttctacgtgacactagcaggttcagaatttttccttctagccaccatggcctatgaccgctacgtggccatctgccatcctctccgttaccctgtcctcatgaaccatagggtgtgtctcttcctgtcatcaggctgctggttcctgggctcagtggatggcttcacattcactcccatcaccatgaccttccccttccgtggatcccgggagattcatcatttcttctgtgaagttcctgctgtattgaatctctcctgctcagacacctcactctatgagattttcatgtacttgtgctgtgtcctcatgctcctcatccctgtggtgatcatttcaagctcctatttactcatcctcctcaccatccacgggatgaactcagcagagggccggaaaaaggcctttgccacctgctcctcccacctgactgtggtcatcctcttctatggggctgccatctacacctacatgctccccagctcctaccacacccctgagaaggacatgatggtatctgtcttctataccatcctcactccagtggtgaaccctttaatctatagtcttaggaataaggatgtcatgggggctctgaagaaaatgttaacagtggaacctgcctttcaaaaagctatggagtagaccattttgagagtaatttacttttccttctctctgcacttcacatatgagaatgttataccagtgttatttcccagactccaagactgccatggtgtttgatctcattttcacacctcttttagaaatcgctttcctgtactagaaacttttcaatttacactccgtctcacttcaaaatgcattattcagtcatatta

SEQ ID NO: 12 - protein, 348 aa, Homo sapiens
MDNITWMASHTGWSDFILMGLFRQSKHPMANITWMANHTGWSDFILLGLFRQSKHPALLCVVIFVVFLMALSGNAVLILLIHCDAHLHTPMYFFISQLSLMDMAYISVTVPKMLLDQVMGVNKISAPECGMQMFFYVTLAGSEFFLLATMAYDRYVAICHPLRYPVLMNHRVCLFLSSGCWFLGSVDGFTFTPITMTFPFRGSREIHHFFCEVPAVLNLSCSDTSLYEIFMYLCCVLMLLIPVVIISSSYLLILLTIHGMNSAEGRKKAFATCSSHLTVVILFYGAAIYTYMLPSSYHTPEKDMMVSVFYTILTPVVNPLIYSLRNKDVMGALKKMLTVEPAFQKAME

SEQ ID NO: 13 - DNA, 1339 bp, Homo sapiens
  source (1)..(1339)
  CDS (201)..(1139)
atggggaatcagattcacaatctaatgtgctgtctctttttagtgcaaattcacagttcatgttggaaatacactctgattttcacattgatttttaaaaggtaaagtgaagcaaacatacttttacgtggtacacacatgattataaataaagtttacttttgtcctccaggtaaagccacttcagccgatcatacagcatgcggctggccaaccagaccctgggtggtgactttttcctgttgggaatcttcagccagatctcacaccctggccgcctctgcttgcttatcttcagtatatttttgatggctgtgtcttggaatattacattgatacttctgatccacattgactcctctctgcatactcccatgtacttctttataaaccagctctcactcatagacttgacatatatttctgtcactgtccccaaaatgctggtgaaccagctggccaaagacaagaccatctcggtccttgggtgtggcacccagatgtacttctacctgcagttgggaggtgcagagtgctgccttctagccgccatggcctatgaccgctatgtggctatctgccatcctctccgttactctgtgctcatgagccatagggtatgtctcctcctggcatcaggctgctggtttgtgggctcagtggatggcttcatgctcactcccatcgccatgagcttccccttctgcagatcccatgagattcagcacttcttctgtgaggtccctgctgttttgaagctctcttgctcagacacctcactttacaagattttcatgtacttgtgctgtgtcatcatgctcctgatacctgtgacggtcatttcagtgtcttactactatatcatcctcaccatccataagatgaactcagttgagggtcggaaaaaggccttcaccacctgctcctcccacattacagtggtcagcctcttctatggagctgctatttacaactacatgctccccagctcctaccaaactcctgagaaagatatgatgtcatcctttttctacactatccttacacctgtcttgaatcctatcatttacagtttcaggaataaggatgtcacaagggctttgaaaaaaatgctgagcgtgcagaaacctccatattaaagtgtgaaagaacttaagttggtcctctcttcttagagtctctcttcactttaggtgtccttccaccaaacaatcagcatattgtggtagtgtctgactccctgagttgtccttcagggggattcagcccagtgttcttccctcctataatcacacttgagatgatgttcacttatcccccccttccctcgtagcattga

SEQ ID NO: 14 - protein, 312 aa, Homo sapiens
MRLANQTLGGDFFLLGIFSQISHPGRLCLLIFSIFLMAVSWNITLILLIHIDSSLHTPMYFFINQLSLIDLTYISVTVPKMLVNQLAKDKTISVLGCGTQMYFYLQLGGAECCLLAAMAYDRYVAICHPLRYSVLMSHRVCLLLASGCWFVGSVDGFMLTPIAMSFPFCRSHEIQHFFCEVPAVLKLSCSDTSLYKIFMYLCCVIMLLIPVTVISVSYYYIILTIHKMNSVEGRKKAFTTCSSHITVVSLFYGAAIYNYMLPSSYQTPEKDMMSSFFYTILTPVLNPIIYSFRNKDVTRALKKMLSVQKPPY

SEQ ID NO: 15 - DNA, 1327 bp, Homo sapiens
  source (1)..(1327)
  CDS (201)..(1127)
actgtttcattaaaataactgatattaactatgcctccaaacacagagcaggcattcaatgaaagttacatcatatctccaataattacatttaattattggagctctttcatgaatccattctttttatctttctaggactgtgtgattgggttaaagggctcagtgcggggactctgttttctggtttcagtaccacaatggacacaggcaacaaaactctgccccaggactttctcttactgggctttcctggttctcaaactcttcagctctctctctttatgctttttctggtgatgtacatcctcacagttagtggtaatgtggctatcttgatgttggtgagcacctcccatcagttgcatacccccatgtacttctttctgagcaacctctccttcctggagatttggtataccacagcagcagtgcccaaagcactggccatcctactggggagaagtcagaccatatcatttacaagctgtcttttgcagatgtactttgttttctcattaggctgcacagagtacttcctcctggcagccatggcttatgaccgctgtcttgccatctgctatcctttacactacggagccatcatgagtagcctgctctcagcgcagctggccctgggctcctgggtgtgtggtttcgtggccattgcagtgcccacagccctcatcagtggcctgtccttctgtggcccccgtgccatcaaccacttcttctgtgacattgcaccctggattgccctggcctgcaccaacacacaggcagtagagcttgtggcctttgtgattgctgttgtggttatcctgagttcatgcctcatcacctttgtctcctatgtgtacatcatcagcaccatcctcaggatcccctctgccagtggccggagcaaagccttctccacgtgctcctcgcatctcaccgtggtgctcatttggtatgggtccacagttttccttcacgtccgcacctctatcaaagatgccttggatctgatcaaagctgtccacgtcctgaacactgtggtgactccagttttaaaccccttcatctatacgcttcgtaataaggaagtaagagagactctgctgaagaaatggaagggaaaataaatctcctctaccacaacagatgtcctgtaaatggtctctgcatctatacagaggttccaagtaagaatgtggaggaatagggcaaatctttcttggtacacagagaaaaaacaaacaaacaaaacaagcaatactgtattttctatacattatcatgtatgataaaaatgggagtttttgacataagcaaatgggatttt

SEQ ID NO: 16 - protein, 308 aa, Homo sapiens
MDTGNKTLPQDFLLLGFPGSQTLQLSLFMLFLVMYILTVSGNVAILMLVSTSHQLHTPMYFFLSNLSFLEIWYTTAAVPKALAILLGRSQTISFTSCLLQMYFVFSLGCTEYFLLAAMAYDRCLAICYPLHYGAIMSSLLSAQLALGSWVCGFVAIAVPTALISGLSFCGPRAINHFFCDIAPWIALACTNTQAVELVAFVIAVVVILSSCLITFVSYVYIISTILRIPSASGRSKAFSTCSSHLTVVLIWYGSTVFLHVRTSIKDALDLIKAVHVLNTVVTPVLNPFIYTLRNKEVRETLLKKWKGK

SEQ ID NO: 17 - DNA, 1072 bp, Homo sapiens
  source (1)..(1072)
  CDS (201)..(872)
gtttatcttaaaaaatgaacaatgaagttttaagtaaatggagagccattttaggtaggtacatgactcctttccactgaatatttttgtatatcaatatgactcttgctagtctgtatagactaattttttaatttttttctcctttattctttttttgcatattttctcaccttgacaggcactgaagagaatctagtatggccaatgtcaccttggtgacaggatttcttcttatggggttttctaatatccagaagctgcggattttatatggtgtgctcttcctactgatttacctggcagccctaatgagtaaccttctcatcattactctcattaccctggacgtaaagctccaaacacccatgtacttcttcctgaagaacttatcctttttggatgtcttcctggtgtctgttccaatcccaaaattcattgtcaacaacctaacccacaacaattccatttccattctaggatgtgccttccagctacttttaatgacttccttctcagcaggagagatatttatcctcactgccatgtcctatgaccgctatgtagccatctgctgtcccctgaactacgaggtaatcatgaatactggagtctgtgtgttaatggcaagtgtttcctgggccattggagggctctttggtactgcgtacacagctggcacattttccatgcctttctgtggctccagtgtgattccacagtttttctgtgatgttccttcattactaaggatttcctgttctgaaacactaatggtaatttatgcaggtattggagttggtgcatgtttaagcatttcttgtttcatctgtattgtgatctcttacattatatcttctccactgtactgaagatccctaccactaaaggtcagtccaaagctttttccacatgcttcccccatctcactgttttcactgtttttatcataactgcttattttgtttatcttaagccaccttcaaattcaccatctgttattgacaggctgctttctgtgatctacactgtgatgcctccagtatttaaccctgtaacctacagcctgcgg

SEQ ID NO: 18 - protein, 223 aa, Homo sapiens
MANVTLVTGFLLMGFSNIQKLRILYGVLFLLIYLAALMSNLLIITLITLDVKLQTPMYFFLKNLSFLDVFLVSVPIPKFIVNNLTHNNSISILGCAFQLLLMTSFSAGEIFILTAMSYDRYVAICCPLNYEVIMNTGVCVLMASVSWAIGGLFGTAYTAGTFSMPFCGSSVIPQFFCDVPSLLRISCSETLMVIYAGIGVGACLSISCFICIVISYIISSPLY

SEQ ID NO: 19 - DNA, 1453 bp, Homo sapiens
  source (1)..(1453)
  CDS (201)..(1253)
agtggtaggtcattgtggattttttgatatgcatgtaaatatgcactttgattggctttaataatcaatccccagacaactccaaagttgtaatcattcataatttttaaagatgagcctttgaactggaatgaagaaacatggattgatgttccaagtcagcagcacattagtgaaaaatgaatagtttagggtgaaaaatgaatagtttgggaaagttggtctccatgatcctctcagctcatgtgttctgttattctaaatttaattgttttggatgtacccattccattcctgccttaggtgcggatccccctggagggatgggattgggcaatgagagttccctaatggatttcatccttctaggcttctcagaccaccctcgtctggaggctgttctctttgtatttgtccttttcttctacctcctgacccttgtgggaaacttcaccataatcatcatctcatatctggatccccctcttcataccccaatgtacttttttctcagcaacctctctttactggacatctgcttcactactagccttgctcctcagaccttagttaacttgcaaagaccaaagaagacgatcacttacggtggttgtgtggcgcaactctatatttctctggcactgggctccactgaatgtatcctcttggctgacatggccttggatcggtacattgctgtctgcaaacccctccactatgtagtcatcatgaacccacggctttgccaacagctggcatctatctcctggctcagtggtttggctagttccctaatccatgcaacttttaccttgcaattgcctctctgtggcaaccataggctggaccattttatttgcgaagtaccagctcttctcaagttggcttgtgtggacaccactgtcaatgaattggtgctttttgttgttagtgttctgtttgttgtcattccaccagcactcatctccatctcctatggcttcataactcaagctgtgctgaggatcaaatcagtagaggcaaggcacaaagccttcagcacctgctcctcccaccttacagtggtgattatattctatggcaccataatctacgtgtacctgcaacctagtgacagctatgcccaggaccaagggaagtttatctccctcttctacaccatggtgacccccactttaaatcctatcatctatactttaaggaacaaggatatgaaagaggctctgaggaaacttctctcgggaaaattgtgattcctatggacatgatttgcaaggaattcattataagccaggtagcttattcagcttctatttagtcaaactcatagttctaaatttcacatgtactatattactgctcacttattttctcttcataagggactttttccttttttatgtgtaactaagtaaaatgtttatatgtttatttgagagcataaactattgaa

SEQ ID NO: 20 - protein, 350 aa, Homo sapiens
MNSLGKLVSMILSAHVFCYSKFNCFGCTHSIPALGADPPGGMGLGNESSLMDFILLGFSDHPRLEAVLFVFVLFFYLLTLVGNFTIIIISYLDPPLHTPMYFFLSNLSLLDICFTTSLAPQTLVNLQRPKKTITYGGCVAQLYISLALGSTECILLADMALDRYIAVCKPLHYVVIMNPRLCQQLASISWLSGLASSLIHATFTLQLPLCGNHRLDHFICEVPALLKLACVDTTVNELVLFVVSVLFVVIPPALISISYGFITQAVLRIKSVEARHKAFSTCSSHLTVVIIFYGTIIYVYLQPSDSYAQDQGKFISLFYTMVTPTLNPIIYTLRNKDMKEALRKLLSGKL

SEQ ID NO: 21 - DNA, 1282 bp, Homo sapiens
  source (1)..(1282)
  CDS (201)..(1082)
ctgtgtaattgagatttagggttagaacgatagtatccatgctgcatatgagtaaccttataattaattatcacaaattgaaatatcactgggggtagccatatttgatatttctataatccattttttttctctctttaggaagaaatggaacgaccacaagtgattttaaccaaactgaagttgctgaatttttcctcatgggattttcgaattcctgggatattcagattgtacatgctgctctattcttcctagtttacctggcagctgtcataggaaatctcctaatcatcatacttaccactctggatgttcacctccaaaccccaatgtatttctttttgagaaacttgtctttcttagatttttgttacatctctgtcacaattccaaaatctattgttagttccttgactcatgatacttccatttctttctttgggtgtgctctgcaagccttctttttcatggacttggcaactacggaggtagccatccttacagtgatgtcctatgaccgctatatggccatctgccggcctttacattatgaggtcatcataaaccaaggtgtctgtctgaggatgatggccatgtcgtggctcagtggggtgatctgtggattcatgcatgtgatagcaacattctcattaccattctgtgggcgcaatagaatacgtcaatttttctgtaatattccacagctcctaagcctcttagaccccaaagtaattaccattgagattggagtcatggtttttggtacaagtcttgtgataatctcctttgttgtaattactctctcctacatgtacattttttctgtcatcatgaggattccttctaaggagggtagatcaaaaacattttctacctgcattccacatcttgtggttgtaacactctttatgatatctggcagcattgcctatgtgaagccaatttcaaattctccccccgttctggatgttttcctgtctgcgttctacacagtcgtgcccccgaccctgaaccccgtcatctatagtctgaggaatagggacatgaaggcagccctgagaaggcagtgtggtccctgagaaggcagtgtggtatgctagatgaagaatttgattacggaccagactcttgaactcttgctctaatcaggcaatttgtaaactctctgggtttatattttcaattgattgctgagctctttcttgatttttaaattaaattcagctatagtttaccatactaaccatatttgggtgaattcaaccttagaatgcactaa

SEQ ID NO: 22 - protein, 293 aa, Homo sapiens
MGFSNSWDIQIVHAALFFLVYLAAVIGNLLIIILTTLDVHLQTPMYFFLRNLSFLDFCYISVTIPKSIVSSLTHDTSISFFGCALQAFFFMDLATTEVAILTVMSYDRYMAICRPLHYEVIINQGVCLRMMAMSWLSGVICGFMHVIATFSLPFCGRNRIRQFFCNIPQLLSLLDPKVITIEIGVMVFGTSLVIISFVVITLSYMYIFSVIMRIPSKEGRSKTFSTCIPHLVVVTLFMISGSIAYVKPISNSPPVLDVFLSAFYTVVPPTLNPVIYSLRNRDMKAALRRQCGP

SEQ ID NO: 23 - DNA, 1324 bp, Homo sapiens
  source (1)..(1324)
  CDS (201)..(1124)
gattagtctggaaaacagagtatattgcctggaatacagaactccatcaaatgggaattcctgctgcaaagttgtgtccaatcaagaattaagtccctaagtacacacactcctcatgttatctcctaacaacacagggattctttccattttcagttgtttattctgtgcaattactgccattcaatcacccaagcaggatgaatcacagcgttgtaactgagttcattattctgggcctcaccaaaaagcctgaactccagggaattatcttcctcttttttctcattgtctatcttgtggcttttctcggcaacatgctcatcatcattgccaaaatctataacaacaccttgcatacgcccatgtatgttttccttctgacactggctgttgtggacatcatctgcacaacaagcatcataccgaagatgctggggaccatgctaacatcagaaaataccatttcatatgcaggctgcatgtcccagctcttcttgttcacatggtctctgggagctgagatggttctcttcaccaccatggcctatgaccgctatgtggccatttgtttccctcttcattacagtactattatgaaccaccatatgtgtgtagccttgctcagcatggtcatggctattgcagtcaccaattcctgggtgcacacagctcttatcatgaggttgactttctgtgggccaaacaccattgaccacttcttctgtgagatacccccattgctggctttgtcctgtagccctgtaagaatcaatgaggtgatggtgtatgttgctgatattaccctggccataggggactttattcttacctgcatctcctatggttttatcattgttgctattctccgtatccgcacagtagaaggcaagaggaaggccttctcaacatgctcatctcatctcacagtggtgaccctttactattctcctgtaatctacacctatatccgccctgcttccagctatacatttgaaagagacaaggtggtagctgcactctatactcttgtgactcccacattaaacccgatggtgtacagcttccagaatagggagatgcaggcaggaattaggaaggtgtttgcatttctgaaacactagtagtttcaacatgcaacatcacttctgtactccagaaccatcttctagagcatctcagattttactggtttttcatacttacctccactccaattttcccttccctcttattcctgccttcttcctagcagtctcattgtctccaaaattctgtactctttatgtgaagaatattcataaagcaatatgcacaataccct

SEQ ID NO: 24 - protein, 307 aa, Homo sapiens
MNHSVVTEFIILGLTKKPELQGIIFLFFLIVYLVAFLGNMLIIIAKIYNNTLHTPMYVFLLTLAVVDIICTTSIIPKMLGTMLTSENTISYAGCMSQLFLFTWSLGAEMVLFTTMAYDRYVAICFPLHYSTIMNHHMCVALLSMVMAIAVTNSWVHTALIMRLTFCGPNTIDHFFCEIPPLLALSCSPVRINEVMVYVADITLAIGDFILTCISYGFIIVAILRIRTVEGKRKAFSTCSSHLTVVTLYYSPVIYTYIRPASSYTFERDKVVAALYTLVTPTLNPMVYSFQNREMQAGIRKVFAFLKH

SEQ ID NO: 25 - DNA, 1348 bp, Homo sapiens
  source (1)..(1348)
  CDS (201)..(1148)
agtgttagactgatatacccacagttgttttacacctgagtccatgagaaatataaattgcttgatatttttaaactttttgtctaggccttgatgctacacataccttcattcaacaaatgaagaaacaaatgatactttttaatattagtatgacacttattttcctttactccatagggcgcttataattttgaactatgaccaatcagacacagatgatggaattcttgcttgtgagatttactgagaattgggtgctcctgaggctgcatgctttgctcttctcactgatctacctcacggctgtgctgatgaatttagtcatcattctcctcatgattctggaccatcgtctccacatggcaatgtactttttcctccgacatttgtccttcttagacctgtgtctcatttctgccacagtccccaaatccatcctcaactctgtcgcctccactgactccatctccttcctggggtgtgtgttgcagctcttcttggtggtactgctggctggatcagagattggcatccttactgccatgtcctatgaccgctatgctgccatctgctgccccctacactgtgaggctgtcatgagcagagggctctgtgtccagttgatggctctgtcctggctcaacagaggggccttgggactcttgtacacagctggaacattctctctgaatttttatggctctgatgagctacatcagttcttctgcgatgtccctgccctactaaagctcacttgttctaaagaacatgccatcattagtgtcagtgtggccattggggtctgttatgcattttcatgtttagtttgcattgtagtttcctatgtgtacattttctctgctgtgttaaggatatcacagagacagagacaatccaaagccttttccaactgtgtgcctcacctcattgttgtcactgtgtttcttgtaacaggtgctgttgcttatttaaagccagggtctgatgcaccttctattctagacttgctggtgtctgtgttctattctgtcgcacctccaaccttgaaccctgttatctactgtctgaagaacaaggacattaaatccgctctgagtaaagtcctgtggaatgttagaagcagtggggtaatgaaagatgactaaagttgaagatgggaagtactttttttgttgttgttgttctgcatccactagctgtttaaattatctctattttgggataaaatgtcatggagtctgctactgataatctcaagcagtcagtttaatagaaatagaaagcaactattttcctacaatttttgcactttttttttaaaaattttgagacggaatctctctct

SEQ ID NO: 26 - protein, 315 aa, Homo sapiens
MTNQTQMMEFLLVRFTENWVLLRLHALLFSLIYLTAVLMNLVIILLMILDHRLHMAMYFFLRHLSFLDLCLISATVPKSILNSVASTDSISFLGCVLQLFLVVLLAGSEIGILTAMSYDRYAAICCPLHCEAVMSRGLCVQLMALSWLNRGALGLLYTAGTFSLNFYGSDELHQFFCDVPALLKLTCSKEHAIISVSVAIGVCYAFSCLVCIVVSYVYIFSAVLRISQRQRQSKAFSNCVPHLIVVTVFLVTGAVAYLKPGSDAPSILDLLVSVFYSVAPPTLNPVIYCLKNKDIKSALSKVLWNVRSSGVMKDD

SEQ ID NO: 27 - DNA, 1543 bp, Homo sapiens
  source (1)..(1543)
  CDS (201)..(1343)
taagcataaatagcttgactactaaaaaaataacaaataaccttatatataaagtcgatatgaattttgtggttactgtaggcaaggcaaaataacccaattaaaatggttattattcacataatttgcattttcttttgggggaagaagtcagtcttgaaagaagttgatactgacatgtccagcatgtctatgtgactatgaagacagaatatcatgaacacaagatgtcattggaaagcattcaagcaagcaagtttggatgctacttacctgcgcacgcatgcacacacacacacacacacacacacacacactgtctctctctcatgaataagagacttaacactgctggcttttacaatttaataacttatttttctagatttgttgggaatatggaaaaaagaaatctaacagttgtcagggaattcgtccttctgggacttcctagctcagcagagcagcagcacctcctgtctgtgctctttctctgtatgtatttagccaccaccttggggaacatgctcatcattgcgacgattggctttgactctcacctccattcccctatgtacttcttccttagtaacttggcctttgttgacatctgctttacgtcgactacagtcccccaaatggtagtgaatatcttgactggcaccaagactatctcttttgcaggctgcctcacccagctcttcttcttcgtttcttttgtgaatatggacagcctccttctgtgtgtgatggcgtatgatagatatgtggcgatttgccaccccttacattacaccgccagaatgaacctgtgcctttgtgtccagctagtggctggactgtggcttgttacttacctccacgccctcctgcatactgtcctaatagcacagctgtccttctgtgcctccaatatcatccatcatttcttctgtgatctcaatcctctcctgcagctctcttgctctgacgtctccttcaatgtaatgatcatttttgcagtaggaggtctattggctctcacgccccttgtctgtatcctcgtatcttatggacttatcttctccactgttctgaagatcacctctactcagggcaagcagagagctgtttccacctgcagctgccacctgtcagtggtggtgttgttttacggcacagccatcgccgtctatttcagcccttcatccccccatatgcctgagagcgacactctgtcaaccatcatgtattcaatggtggctccgatgctgaatcctttcatctataccctaaggaacagggatatgaagaggggacttcagaaaatgcttctcaagtgcacagtctttcagcagcaataatgacctcagtgactgaattaaataatactaatgtggtgataagaaagtgtgactagatgctcacaataacagtgagaagagaaaccaactgctattaaatgtctcccttatgctggaaatcgtgttaagcactttatatgaattatcacattaaatcctctgagtaaatatataaaaaccatatagcattctttatacag

SEQ ID NO: 28 - protein, 380 aa, Homo sapiens
MKTEYHEHKMSLESIQASKFGCYLPAHACTHTHTHTHTHCLSLMNKRLNTAGFYNLITYFSRFVGNMEKRNLTVVREFVLLGLPSSAEQQHLLSVLFLCMYLATTLGNMLIIATIGFDSHLHSPMYFFLSNLAFVDICFTSTTVPQMVVNILTGTKTISFAGCLTQLFFFVSFVNMDSLLLCVMAYDRYVAICHPLHYTARMNLCLCVQLVAGLWLVTYLHALLHTVLIAQLSFCASNIIHHFFCDLNPLLQLSCSDVSFNVMIIFAVGGLLALTPLVCILVSYGLIFSTVLKITSTQGKQRAVSTCSCHLSVVVLFYGTAIAVYFSPSSPHMPESDTLSTIMYSMVAPMLNPFIYTLRNRDMKRGLQKMLLKCTVFQQQ

SEQ ID NO: 29 - DNA, 1417 bp, Homo sapiens
  source (1)..(1417)
  CDS (201)..(1217)
atatttcataagatatatttggataatattataactgcatttatgtgaactaaattgcctcaataacatgaaattaatcaggaaatgcttggtgatcaatgcactaaaaaagaactagatgaaagtattttttgtggcaaattggcatggaattaccatacgtgtggtacgtgtgtgtgtttcagtatgctaaataatatatgtgttatatatatttaatatttaaagagtggacattgatattttacttcagtcttctccttttcctgcagattactcctgcaataatggcaaatctcacaatcgtgactgaatttatccttatggggttttctaccaataaaaatatgtgcattttgcattcgattctcttcttgttgatttatttgtgtgccctgatggggaatgtcctcattatcatgatcacaactttggaccatcatctccacacccccgtgtatttcttcttgaagaatctatctttcttggatctctgccttatttcagtcacggctcccaaatctatcgccaattctttgatacacaacaactccatttcattccttggctgtgtttcccaggtctttttgttgctttcttcagcatctgcagagctgctcctcctcacggtgatgtcctttgaccgctatactgctatatgtcaccctctgcactatgatgtcatcatggacaggagcacctgtgtccaaagagccactgtgtcttggctgtatgggggtctgattgctgtgatgcacacagctggcaccttctccttatcctactgtgggtccaacatggtccatcagttcttctgtgacattccccagttattagctatttcttgctcagaaaatttaataagagaaattgcactcatccttattaatgtagttttggatttctgctgttttattgtcatcatcattacctatgtccacgtcttctctacagtcaagaagatcccttccacagaaggccagtcaaaagcctactctatttgccttccacacttgctggttgtgttatttctttccactggattcattgcttatctgaagccagcttcagagtctccttctattttggatgctgtaatttctgtgttctacactatgctgcccccaacctttaatcccattatatacagtttgagaaacaaggccataaaggtggctctggggatgttgataaagggaaagctcaccaaaaagtaaaagctgttgcttttcttctttcaataatagataccatttataatgtacacacattaattcttcatttttatctctaattcttaaaagtaaaaatttaaaaagacaaatgaaagcaattattttattagaaaatttccttgggcaattaattacatttttctattcttaagtaaaattctgaatttttacaatatggagcc

SEQ ID NO: 30 - protein, 338 aa, Homo sapiens
MCYIYLIFKEWTLIFYFSLLLFLQITPAIMANLTIVTEFILMGFSTNKNMCILHSILFLLIYLCALMGNVLIIMITTLDHHLHTPVYFFLKNLSFLDLCLISVTAPKSIANSLIHNNSISFLGCVSQVFLLLSSASAELLLLTVMSFDRYTAICHPLHYDVIMDRSTCVQRATVSWLYGGLIAVMHTAGTFSLSYCGSNMVHQFFCDIPQLLAISCSENLIREIALILINVVLDFCCFIVIIITYVHVFSTVKKIPSTEGQSKAYSICLPHLLVVLFLSTGFIAYLKPASESPSILDAVISVFYTMLPPTFNPIIYSLRNKAIKVALGMLIKGKLTKK

SEQ ID NO: 31 - DNA, 1279 bp, Homo sapiens
  source (1)..(1279)
  CDS (201)..(1079)
ggtatattattgttagattaagatttacactaatattttttctttattattaattcattatttctttttaggttaaaaaatagagaattcatgatgggccatcagaatcacactttcagcagtgatttcatacttttgggattgttctcttcttccccaacaagtgtggtcttcttcttagacaatttgtcattttcattatgagtgtaacagaaaatacgctcatgatcctcctcattcgcagtgactcccgactccacactccaatgtattttctgctcagccatctctccttaatggatatcttgcatgtttccaacatcgttcccaaaatggtcactaactttctgtcaggcagcagaactatttcatttgcaggttgtgggttccaggtatttctgtccctcaccctcctgggtggtgagtgccttctcctggctgcaatgtcctgtgatcgctatgtggctatctgtcacccgctgcgctatccgattcttatgaaggagtatgccagcgctctcatggctggaggctcctggctcattggggttttcaactccacagtccacacagcttatgcactgcagtttcccttctgtggctctagggcaattgatcacttcttctgtgaagtccctgccatgttgaagttgtcctgtgcagacacaacacgctatgaacgaggggtttgtgtaagtgctgtgatcttcctgctgatccctttctccttgatctctgcttcttatggccaaattattcttactgtcctccagatgaaatcatcagaggcaaggaaaaagtcattttccacttgttccttccacatgattgtggtcacgatgtactatgggccatttatttttacatatatgagacctaaatcataccacactccaggccaggataagttcctggcaatattctatacgatcctcacacccacactcaaccctttcatctacagctttaggaataaagatgttctggcggtgatgaaaaatatgctcaaaagtaactttctgcacaaaaaaatgaataggaaaattcctgaatgtgtgttctgtctatttctatgttaaatgcctgaaggatactcatgagaggtttcctagaaagaaatcaaagcttctatcttaccacatataagaagtgaatatttcagaaacattgttaataataaacaataatatgtgtttgtgttgtaaacacgtacctctaaaaatgtagtgttccttctgtggtaccaattataatcatgcaacagttacaggaagtagaa

SEQ ID NO: 32 - protein, 292 aa, Homo sapiens
MSVTENTLMILLIRSDSRLHTPMYFLLSHLSLMDILHVSNIVPKMVTNFLSGSRTISFAGCGFQVFLSLTLLGGECLLLAAMSCDRYVAICHPLRYPILMKEYASALMAGGSWLIGVFNSTVHTAYALQFPFCGSRAIDHFFCEVPAMLKLSCADTTRYERGVCVSAVIFLLIPFSLISASYGQIILTVLQMKSSEARKKSFSTCSFHMIVVTMYYGPFIFTYMRPKSYHTPGQDKFLAIFYTILTPTLNPFIYSFRNKDVLAVMKNMLKSNFLHKKMNRKIPECVFCLFLC

SEQ ID NO: 33 - DNA, 1339 bp, Homo sapiens
  source (1)..(1339)
  CDS (201)..(1139)
tcttacttgtctaatttattaattaaactttatcagaagtatgtatagacaaaaataatagtgtatttagggttcagtatcaactgcagtttcaaacatccactgggggggcttggaatgcatcccctgcagataagggcgaattactgtacgtaaattactcttgtgtctcccttccgaatggattgtaggaatgctccatggaaaattacaatcaaacatcaactgatttcatcttattggggctgtttccaccatcaagaattgaccttttcttcttcattctcattgttttcattttcctgatggctctaattggaaacctgtccatgattcttctcatcttcttggacacccatctccacacacccatgtatttcctactgagtcagctctccctcattgacctaaattacatctccaccattgttcctaagatggcatctgattttctgcatggaaacaagtctatctccttcactgggtgtgggattcagagtttcttcttcttggcattaggaggtgcagaagcactacttttggcatctatggcctatgatcgttacattgctatttgctttcctctccactatctcatccgcatgagcaaaagagtgtgtgtgctgatgataacagggtcttggatcataggctcgatcaatgcttgtgctcacactgtatatgtactccatattccttattgccgatccagggccatcaatcatttcttctgtgatgtcccagcaatggtgactctggcctgcatggacacctgggtctatgagggcacagtgtttttgagtgccaccatctttctcgtgtttcccttcattggtatttcatgttcctatggccaggttctctttgctgtctaccacatgaaatctgcagaagggaggaagaaagcctatttgacctgcagcacccacctcactgtagtaactttctactatgcaccttttgtctacacttatctacgtccaagatccctgcgatctccaacagaggacaaggttctggctgtcttctacaccatcctcaccccaatgctcaaccccatcatctatagcctgaggaacaaggaggtgatgggggccctgacacgagtgagtcagagaatctgctctgtgaaaatgtagaaacactttctgcctaaggtctcaggactcagatacacatccattcagcagtgtatagtaattaaaatattatgtccttcctagagtgcaggactaaaactaaccaacggaagaagaaaatcactgatatatggacaaaattgttttacaaatatatatataattctaagaaaccttttttcttgatggcctttttccaa

SEQ ID NO: 34 - protein, 312 aa, Homo sapiens
MENYNQTSTDFILLGLFPPSRIDLFFFILIVFIFLMALIGNLSMILLIFLDTHLHTPMYFLLSQLSLIDLNYISTIVPKMASDFLHGNKSISFTGCGIQSFFFLALGGAEALLLASMAYDRYIAICFPLHYLIRMSKRVCVLMITGSWIIGSINACAHTVYVLHIPYCRSRAINHFFCDVPAMVTLACMDTWVYEGTVFLSATIFLVFPFIGISCSYGQVLFAVYHMKSAEGRKKAYLTCSTHLTVVTFYYAPFVYTYLRPRSLRSPTEDKVLAVFYTILTPMLNPIIYSLRNKEVMGALTRVSQRICSVKM

SEQ ID NO: 35 - DNA, 1084 bp, Homo sapiens
  source (1)..(1084)
  CDS (201)..(884)
  modified_base (1)..(78): a, t, c, g, unknown or other
  modified_base (105): a, t, c, g, unknown or other
nnnnnnnnnnnnnnnnnnnnnnnnnnnnnnnnnnnnnnnnnnnnnnnnnnnnnnnnnnnnnnnnnnnnnnnnnnnnnntttggagagcttacccgcatcgattcnactcagaaacccctgtgtttcctacttagtcagctctcccccttgacctaattacatgtccaccattgttcctaagatggcatctgattttctgcatggtaaacaagtctatctccttcactgggtgtgggattcatagtttcttcttcacgactttagccgttgtagaagcgctactcctgatatcaatggcctatgttcgttgcattgctatttgctttcctctccactatctcatgcgcatgagcaaaagagtgtgtgtgctgatgataacaggatcttggatcataggctcgatcaatgcttgtgctcacactgtatatatactccatattccttattgcccatctagggttatcaatcatttcttctgtgatgtcccagcaatggtgactctggcctgcatggacacctgggtctatgagggcacagagcttttgagcgccaccatctttctcgtgtttcccttcattgctatttcatgttcctatggacgggttctccttgctgtctaccacatgaaatctgcagaagggaagaagaaggcctacctgacctgcagcacccacctcactgtagtgactttctactatgcaccctttgcttacacctatctacgcccaagatccctgcgatctccgacagaggacaaggttctggctgtcttctacaccatcctcactccaatgctcaaccccatcatctacagcctgagaaacaaggaggtgatgggggccctgacacgagtgattcagaaaatcttttcagtgaaaatatagacatacgttctgccttagagtcaaagcgctaggttcatatcaactcagcagtgtacggcggttaaggaaaatattattacatgcccagtatgtcaaacggaaattaatctaaaagatttgtattttaatttagtctggcatttcaattgcatattctaagacacctattttggttttgtatttgtttctttttatcaaaa

SEQ ID NO: 36 - protein, 227 aa, Homo sapiens
MVNKSISFTGCGIHSFFFTTLAVVEALLLISMAYVRCIAICFPLHYLMRMSKRVCVLMITGSWIIGSINACAHTVYILHIPYCPSRVINHFFCDVPAMVTLACMDTWVYEGTELLSATIFLVFPFIAISCSYGRVLLAVYHMKSAEGKKKAYLTCSTHLTVVTFYYAPFAYTYLRPRSLRSPTEDKVLAVFYTILTPMLNPIIYSLRNKEVMGALTRVIQKIFSVKI

SEQ ID NO: 37 - DNA, 1330 bp, Homo sapiens
  source (1)..(1330)
  CDS (201)..(1130)
atgtataaagccccaaagaggcacaagtaggcttctctcttcatgtgcaaggaccctgcatgagcatcatgatcaaaaagaaggaaattggattcagtctcagtacaattatcatttttctttgttttaaagtccaattgctgttgagaatttactccttgttgactccatttgttgctttcagacactgatatagcagaatgaagagaaagaacttcacagaagtgtcagaattcattttcttgggattttctagctttggaaagcatcagataaccctctttgtggttttcctaactgtctacattttaactctggttgctaacatcatcattgtgactatcatctgcattgaccatcatctccacactcccatgtatttcttcctaagcatgctggctagttcagagacggtgtacacactggtcattgtgccacgaatgcttttgagcctcatttttcataaccaacctatctccttggcaggctgtgctacacaaatgttcttttttgttatcttggccactaataattgcttcctgcttactgcaatggggtatgaccgctatgtggccatctgcagacccctgagatacactgtcatcatgagcaagggactatgtgcccagctggtgtgtgggtcctttggcattggtctgactatggcagttctccatgtgacagccatgttcaatttgccgttctgtggcacagtggtagaccacttcttttgtgacatttacccagtcatgaaactttcttgcattgataccactatcaatgagataataaattatggtgtaagttcatttgtgatttttgtgcccataggcctgatatttatctcctatgtccttgtcatctcttccatccttcaaattgcctcagctgagggccggaagaagacctttgccacctgtgtctcccacctcactgtggttattgtccactgtggctgtgcctccattgcctacctcaagccgaagtcagaaagttcaatagaaaaagaccttgttctctcagtgacgtacaccatcatcactcccttgctgaaccctgttgtttacagtctgagaaacaaggaggtaaaggatgccctatgcagagttgtgggcagaaatatttcttaatggattggattatttcattaagagaccattagcccagtgtagtgtgtctactcacaaacatgccacaatacacaaattcatcaaatataatatttgttgagaatactgtcaaagaatagaaatgcttgtctgtttagtgttctaggcatggcagaaagcaggatttctgctctggtgaattttgttaccagatacaagaa

SEQ ID NO: 38 - protein, 309 aa, Homo sapiens
MKRKNFTEVSEFIFLGFSSFGKHQITLFVVFLTVYILTLVANIIIVTIICIDHHLHTPMYFFLSMLASSETVYTLVIVPRMLLSLIFHNQPISLAGCATQMFFFVILATNNCFLLTAMGYDRYVAICRPLRYTVIMSKGLCAQLVCGSFGIGLTMAVLHVTAMFNLPFCGTVVDHFFCDIYPVMKLSCIDTTINEIINYGVSSFVIFVPIGLIFISYVLVISSILQIASAEGRKKTFATCVSHLTVVIVHCGCASIAYLKPKSESSIEKDLVLSVTYTIITPLLNPVVYSLRNKEVKDALCRVVGRNIS

SEQ ID NO: 39 - DNA, 1231 bp, Homo sapiens
  source (1)..(1231)
  CDS (201)..(1031)
gcaaaaacagaaaagggagaagatggtgaagtagctatataacatgagcgagaatgctcctgattacaaagcagagaaattgactttttttcttagtgttttctatagtcattgctctatccctgttctagaattcaagtcatgataagaatttcttcacgttgacttcctgcattgctttcagacattgcaattaaagaatgcgaagaaagaacctcacagaggtaacagagtttgttttcctgggattctccagattccacaaacatcacatcactctctttgtggtttttctcatcctgtacacattaactgtggctggcaatgccatcatcatgaccatcatctgcattgaccgtcacctccacactcccatgtacttcttcctgagcatgctggctagctcaaagacagtgtacacactgttcatcattccacagatgctctccagcttcgtaacccagacccagccaatctccctagccggttgtaccacccaaacgttcttctttgttaccttggccatcaacaattgcttcttgctcacagtgatgggctatgaccactatatggccatctgcaatcccttgagatacagggtcattacgagcaagaaggtgtgtgtccagctggtgtgtggagcctttagcattggcctggccatggcagctgtccaggtaacatccatatttaccttacctttttgtcacacggtggttggtcatttcttctgtgacatcctccctgtcatgaaactctcctgtattaataccactatcaatgagataatcaattttgttgtcaggttatttgtcatcctggtccccatgggtctggtcttcatctcctatgtcctcatcatctccactgtcctcaagattgcctcagctgagggttggaagaagacctttgccacctgtgccttccacctcactgtggtcattgtccattatggctgtgcttccattgcctacctcatgcccaagtcagaaaactctatagaacaagacctccttctctcagtgacctaaaccatcatcactcccctgctgaaccctgttgtttacagcctaaagaacaaggaggtcaaggatgccctatgcagggccatgggcagaaacatttcttaatgcattattcctctatataaatatacatttagtcatagaaatgtgtgtccttacttacattaaacaaccttacgactctgtcccatgcagtctatgctgca

SEQ ID NO: 40 - protein, 276 aa, Homo sapiens
MRRKNLTEVTEFVFLGFSRFHKHHITLFVVFLILYTLTVAGNAIIMTIICIDRHLHTPMYFFLSMLASSKTVYTLFIIPQMLSSFVTQTQPISLAGCTTQTFFFVTLAINNCFLLTVMGYDHYMAICNPLRYRVITSKKVCVQLVCGAFSIGLAMAAVQVTSIFTLPFCHTVVGHFFCDILPVMKLSCINTTINEIINFVVRLFVILVPMGLVFISYVLIISTVLKIASAEGWKKTFATCAFHLTVVIVHYGCASIAYLMPKSENSIEQDLLLSVT

SEQ ID NO: 41 - DNA, 994 bp, Homo sapiens
  source (1)..(994)
  CDS (201)..(794)
tcagacatcatctccacacccctatgtacttcctcctggtgaacttgtcctgtctggagatctggtatacctctaacatcatccccaaaatgttgctgattatcatagctgaatagaagactatctctgtggctggctggctggcacaattctacttcttcggatccctggctgccacggagtgcctcttgctcactgtgatgtcctatgatcgctacctagccatctgccagcctctttgctaccgtgtcctcatgactggccccctttgcatcaggctagctgctggctcttggttctgctgcttcctccttacagcaatcaccatggtcttgctatgtagactaaccttctgtggaccctatgaaactgatcacttcttttgtgacttcacccctctggttcatctctcctgcatggatacctcagtgactgagaccattgcctttgccacctcttctgcagtaactctgatcccatttctcctcattgtagcctcctactcctgcgtcctttctgctatcctaagaatcccatcttgcacaggccagaaaaaggccttctccacctgctcttcccacctcactgtggtcatagtgttttatgggacactgattgccacataccttgtgccctcagccaactcatcccaactcttgtgcaaagggtcctctctgctctacatcatcctgacacccatgtttaaccccatcatttatagcctgagaaatagagacatccatgaagctctgaagaagtgcttgaggaagaagtcaggtgtttgccttagataatacgaaaaggaaaaaagttgtatttgtctaaatgttgatgaactgggctgagtcatttaaattctacataaaaggcaattgcctaaatgaggagctacctaaaacagatgaccagatacctctactgagttatgacagccccaggtaaactgctgtcccaggatacgatctatgcaggtcagactgtgctccatcatctc

SEQ ID NO: 42 - protein, 197 aa, Homo sapiens
MSYDRYLAICQPLCYRVLMTGPLCIRLAAGSWFCCFLLTAITMVLLCRLTFCGPYETDHFFCDFTPLVHLSCMDTSVTETIAFATSSAVTLIPFLLIVASYSCVLSAILRIPSCTGQKKAFSTCSSHLTVVIVFYGTLIATYLVPSANSSQLLCKGSSLLYIILTPMFNPIIYSLRNRDIHEALKKCLRKKSGVCLR

SEQ ID NO: 43 - DNA, 1390 bp, Homo sapiens
  source (1)..(1390)
  CDS (201)..(1190)
cagggtagccttctatgcttccaaagaagagggtggggacaggtgattattctgagcaagtagacaacaggtctagggcattgctcagaggatggacatgctttttactgaaagccttggtccagcctactctgtttcatgattaactcatcatatgtttctttcctctgcccagctctttcaaacctagacctaccttgatgccaaagctaaattccacttttgtgactgagttcctctttgaaggtttctccagcttcaggcggcagcacaaacttgtcttctttgttgtcttcctaactttgtacctgctgactctctctggcaatgtgattatcatgaccattattcgcctggaccatcatcttcacacccccatgtacttcttcctgtgcatgctatccatctctgagacctgctacactgtggccatcattccccatatgctttctggtctcttgaatcctcatcagcccattgccacccaaagctgtgccactcagctcttcttctatctcacctttggcatcaacaactgcttcctgctcacagtcatgggatatgaccgctatgtggccatctgcaaccccctaaggtattcagtcatcatgggtaagagggcctgtatccaactggcctctggatcactggggattggccttggcatggccattgtccaagtaacatctgtgtttggcctgccattctgtgatgcctttgtcatctcccacttcttctgtgatgtgagacacctgctgaagctggcctgcacagacaccactgtcaatgagataatcaactttgttgtcagcgtctgtgtccttgttctacctatgggcctggtctttatctcctatgtcctcatcatctccaccattcttaagattgcctcagctgaaggtcagaagaaggcctttgccacctgcgcctcccacctcacagtggtcatcatccactatggctgtgcctccatcatctacctgaagcctaagtcccagagttccctgggacaggacagactcatctcagtgacctacactcatcactcccctactgaaccctgttgtgtacagcctgaagaacaaggaggtcaaagatgctctgcacagagccgtggggcaaaaaactctgtctccttaatgaagagaggttgtgaaggcttttcctttgcgtttataaatatgtactaatttttaatgctctttcaataatgcccttatgtatgggatcaagaagactagactaaattgaactgagtgctaaaactggaggtttctgtttgaggttgttgtgatcttctacgccctgctccagaacagttagaaaatagcttagcatacacttatgaatgtaggaaaaaaatgcatgcctggattatgcactcacatac

SEQ ID NO: 44 - protein, 329 aa, Homo sapiens
MPKLNSTFVTEFLFEGFSSFRRQHKLVFFVVFLTLYLLTLSGNVIIMTIIRLDHHLHTPMYFFLCMLSISETCYTVAIIPHMLSGLLNPHQPIATQSCATQLFFYLTFGINNCFLLTVMGYDRYVAICNPLRYSVIMGKRACIQLASGSLGIGLGMAIVQVTSVFGLPFCDAFVISHFFCDVRHLLKLACTDTTVNEIINFVVSVCVLVLPMGLVFISYVLIISTILKIASAEGQKKAFATCASHLTVVIIHYGCASIIYLKPKSQSSLGQDRLISVTYTHHSPTEPCCVQPEEQGGQRCSAQSRGAKNSVSLMKRGCEGFSFAFINMY

SEQ ID NO: 45 - DNA, 982 bp, Homo sapiens
  source (1)..(982)
  CDS (201)..(782)
attgatcgtcaccttcacacccccatgtacttctttgttagtatgctttccacttcagagactgtctacacattagtcattgtaccacggatgctctccagtctcttaagtctaagccaacctatctctttgggtggctgtgccacccagatgttttttttattaccttggccatcaacaactgctttctgctcacagcaatggggtatgatcgctatgtggccatctgtaaccctttgaggtacatgatcatcatgaacaagaaagtgtgtgtccagctggtatgtgggtcctgcagtgttgggctgcttgtggccatagttcagatttcatctgtgttcaggctgcctttttgtgataaacaggtggcccattatttctgtgatatccacccagttatgaaactttcctgtgttgataccactctacatgacctaattaattttgttgttagttccctggttattgtggtgccgctgggtttggtcttcatctcctacatcctcatcatctctaccatcctcaaggtcacctctcctgagggccggaaaaaggcttttgcaacttgtgcctcccacctcactgtggttatcatccactatggctgtgcctccattgcctacctcaagcccaagtcagagaacaccagggatcaggaccagctaatttcagtgacatacaccgtctttactccactacttaatcctgttgtgtacactttgaggaacaaggaggtcaagaatgcccttcaccgtgctattggcaaaaaaccttttgcctagaatcttcatcagtttgacatatagtcagtcatagtctgggtatttttttaagctcgagaaaattgaatcctatcattcatcctctaaccaaagagagttgcaaaatttggtggtaatgcgacattaaggaaccaagagtctccatgatttgactttgtttttaccatcattctcctataccttctactaaccacacaggt

SEQ ID NO: 46 - protein, 193 aa, Homo sapiens [sequence omitted]

SEQ ID NO: 47 - DNA, 1354 bp, Homo sapiens
  source (1)..(1354)
  CDS (201)..(1154)
taaaaatgatgaatagtaagtgctaataagagttagctattaatatttttacagtaatagtaatagtagtgagggcaacagtagtaatttcagtgctacttttaagttaaaaagagagagagagaaatgaagtcttggcatggattcagcagtcatctcaatccaatgttttcttctttccttctttacctcagcctcccatggatcaatacaaccattcaagcctggctgaatttgtgttccttggctttgccagtgtgggctatgtcaggggctggctttttgtcctgctgctattggcatacctgttcaccatctgtggtaacatgctcatcttctcagtcatccgactggatgcagctctgcacacacctatgtaccactttgtcagtgttctttccttcttggagttgtggtatacagctaccactatccctaagatgttgtctaatattctcagtgagaagaaaaccatttcttttgcaggatgcctccttcagacctacttcttccactccttgggagcgtctgaatgctaccttcttacagccatggcctatgatagatacctggccatttgtcggcccctccactaccctataattatgaccaccacactctgtgccaagatggctgctgcttgttggacttgtggcttcctgtgtcccatttctgaggtcatccttgcctcccagctcccattttgtgcttacaatgaaatccaacacattttctgtgactttccacctttgctgagcttggcctgcaaggacacatctgctaacattctggtggactttgccattaatgctttcataattcttatcactttcttctttatcatgatttcttatgcaaggatcattggggctgtgctgaagataaaaacagcatcaggaagaaagaaggccttttctacctgtgcctcacatcttgctgtggtcctcatcttctttgggagcatcatcttcatgtatgtgcggctaaagaagagctattccctgacccttgaccgaacacttgctatagtttactccgtactaacaccaatggtcaatccaattatctacagtcttcgtaacaaggaaatcattaaagctatcaagaggaccatcttccagaagggagataaagctagtcttgctcatctttgactttcttcccatgtcctttctcacctcaatgttcaattcataaaagttccttgagtaatcttcccatcatcacacatgctctgaatttcatttcctttcacctcttcaaagacttcatttctttatgattttctcgttttctacatctttatttctattttttactcgatcacttatgtcagcatttaagaatattttag

SEQ ID NO: 48 - protein, 317 aa, Homo sapiens
MDQYNHSSLAEFVFLGFASVGYVRGWLFVLLLLAYLFTICGNMLIFSVIRLDAALHTPMYHFVSVLSFLELWYTATTIPKMLSNILSEKKTISFAGCLLQTYFFHSLGASECYLLTAMAYDRYLAICRPLHYPIIMTTTLCAKMAAACWTCGFLCPISEVILASQLPFCAYNEIQHIFCDFPPLLSLACKDTSANILVDFAINAFIILITFFFIMISYARIIGAVLKIKTASGRKKAFSTCASHLAVVLIFFGSIIFMYVRLKKSYSLTLDRTLAIVYSVLTPMVNPIIYSLRNKEIIKAIKRTIFQKGDKASLAHL

SEQ ID NO: 49 - DNA, 1339 bp, Homo sapiens
  source (1)..(1339)
  CDS (201)..(1139)
gaggctgttgacaggaagggcagggagggatggaattgaaatgttgacctctcaaagcatttacttagagggctttactctggaggtgagagaagggagggcaatagtaatttgagggttgccttcttgttagaaccctatagttcaactttctttcctatccttccacacttcacatctagggacatgaatggtgagcaatggacacagggaactggagccaggtagcagaattcatcatcttgggcttcccccatctccagggtgtccagatttatctcttcctcttgttgcttctcatttacctcatgactgtgttgggaaacctgctgatattcctggtggtctgcctggactcccggcttcacacacccatgtaccactttgtcagcattctctccttctcagagcttggctatacagctgccaccatccctaagatgctggcaaacttgttcagtgagaaaaagaccatttcattctctgggtgtctcctgcagatctatttctttcactcccttggagcgactgagtgctatctcctgacagctatggcctacgataggtatttagccatctgccggcccctccactacccaaccctcatgaccccaacactttgtgcagagattgccattggctgttggttgggaggcttggctgggccagtagttgaaatttccttgatttcacgcctcccattctgtggccccaatcgcattcagcacgtcttttgtgacttccctcctgtgctgagtttggcttgcactgatacgtctacaaatgtcctagtagattttgttataaattcctgcaagatcctagccaccttcctgctgatcctctgctcctatgtgcagatcatctgcacagtgctcagaattccctcagctgccggcaagaggaaggccatctccacgtgtgcctcccacctcactgtggttctcatcttctatgggagcatcctttccatgtatgtgcggctgaagaagagctactcactggactatgaccaggccctggcagtggtctactcagtgctcacacccttcctcaaccccttcatctacagcttgcacaacaaggagatcaaggaggctgtgaggaggcagctaaagagaattgggatattggcatgagttggggctgagagtaggccaaggccgggcctgaggatatggtggccccagggatcaacagtggccagagacgagaaactaaaaattcagtgcttttctatgtggggtggtggagctgcagcaagtgctgactgacttccagtgttatagcgaccttcatactgtctgctggagccacatttggcttgagaccagagact

SEQ ID NO: 50 - protein, 312 aa, Homo sapiens [sequence omitted]

SEQ ID NO: 51 - DNA, 1396 bp, Homo sapiens
  source (1)..(1396)
  CDS (201)..(1196)
ttttttctgactttaaactagtgtacatattgtccaatgtttgatacaaaaaaaaatgtttgatatgaaaaaaatcaaacattggacaatatgtacatgagtttaaagtcaggaaaaaaaatgaaaccttcaaggtagttcttcttacttctcaaagatgtttagctgtacatcttatttatttttttctctaccctctcatgtgctggactatgccctctccatttacaggtagctctactagaaatatggagagcggaaaccaatcaacagtgactgaatttatcttcactggattccctcagcttcaggatggtagtctcctgtacttctttcctttacttttcatctatacttttattatcattgataacttattaatcttctctgctgtaaggctggacacccatctccacaaccccatgtataattttatcagtatattttcctttctggagatctggtacaccacagccaccattcccaagatgctctccaacctcatcagtgaaaagaaggccatctcaatgactggctgcatcttgcagatgtatttcttccactcacttgaaaactcagaggggatcttgctgaccaccatggccattgacagatacgttgccatctgcaaccctcttcgctatcaaatgatcatgaccccccggctctgtgctcaactctctgcaggttcctgcctcttcggtttccttatcctgcttcccgagattgtgatgatttccacactgcctttctgtgggcccaaccaaatccatcagatcttctgtgacttggtccctgtgctaagcctggcctgtacagacacgtccatgattctgattgaggatgtgattcatgctgtgaccatcatcattaccttcctaatcattgccctgtcctatgtaagaattgtcactgtgatattgaggatttcctcttctgaagggaggcaaaaggctttttctacctgtgcaggccacctcatggtcttcctgatattctttggcagtgtatcactcatgtacttgcgtttcagcgacacttatccaccagttttggacacagccattgcactgatgtttactgtacttgctccattcttcaatcccatcatttatagcctgagaaacaaggacatgaacaatgcgattaaaaaactgttctgtcttcaaaaagtgttgaacaagcctggaggttaatacagagccacaggttcccttccgttgcttttgttttgttttgttttttgagatggagtttcactcttgttgcctgggctggagtgcaatggcatgatcttggctcactgcaacctccacctcctggttttgaacaattctcctgcctcagcctccctagtagccgcgattacaggcatgcaccaccacacccagctaat

SEQ ID NO: 52 - protein, 331 aa, Homo sapiens
MCWTMPSPFTGSSTRNMESGNQSTVTEFIFTGFPQLQDGSLLYFFPLLFIYTFIIIDNLLIFSAVRLDTHLHNPMYNFISIFSFLEIWYTTATIPKMLSNLISEKKAISMTGCILQMYFFHSLENSEGILLTTMAIDRYVAICNPLRYQMIMTPRLCAQLSAGSCLFGFLILLPEIVMISTLPFCGPNQIHQIFCDLVPVLSLACTDTSMILIEDVIHAVTIIITFLIIALSYVRIVTVILRISSSEGRQKAFSTCAGHLMVFLIFFGSVSLMYLRFSDTYPPVLDTAIALMFTVLAPFFNPIIYSLRNKDMNNAIKKLFCLQKVLNKPGG

SEQ ID NO: 53 - DNA, 1375 bp, Homo sapiens
  source (1)..(1375)
  CDS (201)..(1175)
ttttttccacactacaacttaagtcgtaagcaactatagaatatggaccatgtccttcttccttgtcttcctctctatccccattacagggctctattcagacgctggcttcttgtaagtgtattcctttatccaatagtagatgcctcctagaaggcttgagtgcactggaaattgaaactctcactttcaacttggagatggagagccccaatcgaaccaccattcaggagtttatcttctccgctttcccttattcctgggttaagtctgttgtctgctttgttccactgctcttcatctatgctttcattgttgttggaaacctggtcatcatcacagtggtccagttgaatactcacctccacactcccatgtatacttttatcagtgctctttctttcctggagatttggtataccacagccacaatcccaaagatgctgtctagcctgcttagtgagaggagcatttccttcaatggttgtctcctgcagatgtatttcttccattccaccggcatctgtgaggtgtgtctcttgacagttatggcctttgaccactacctggccatatgcagccctcttcattatccctctatcatgacccccaagctatgtacccaactgactttaagttgctgtgtttgtggctttatcacaccccttcctgagattgcctggatctctacactgccattttgtggttcgaatcaccttgaacatatcttctgtgacttcctcccagtgctgcgtctggcctgcacagacacacgagccatcgtcatgattcaggtagtggatgtcattcatgcagtggagattattacagctgtgatgctcatcttcatgtcctacgatggtattgtggctgtaattctacgtattcattcagctggaggccgccgcacagcattttccacgtgtgtctctcacttcattgtcttttcgctcttctttggcagtgtgactctcatgtacctacgcttctctgccacctactctttgttctgggatatagccattgctctggcctttgcagttttgtctcccttcttcaaccccattatctatagcctgaggaataaagaaataaaagaagctataaaaaagcacataggtcaagctaagatatttttttccgtaagaccagggacctcaagtaagatattttagttgagattctgtatagttgctggttcctcttcaccttcagctctcagcaatctgtcttttcctatcaaccttctattcaaactggtctcccaaagctcaccaaaccaaaccaaaccaaaccaaaccaaacaaaaggaaacaaattcagcaatagctaacgtcaataacttctatttaatcattactcaattagacatatt

SEQ ID NO: 54 - protein, 324 aa, Homo sapiens
MESPNRTTIQEFIFSAFPYSWVKSVVCFVPLLFIYAFIVVGNLVIITVVQLNTHLHTPMYTFISALSFLEIWYTTATIPKMLSSLLSERSISFNGCLLQMYFFHSTGICEVCLLTVMAFDHYLAICSPLHYPSIMTPKLCTQLTLSCCVCGFITPLPEIAWISTLPFCGSNHLEHIFCDFLPVLRLACTDTRAIVMIQVVDVIHAVEIITAVMLIFMSYDGIVAVILRIHSAGGRRTAFSTCVSHFIVFSLFFGSVTLMYLRFSATYSLFWDIAIALAFAVLSPFFNPIIYSLRNKEIKEAIKKHIGQAKIFFSVRPGTSSKIF

SEQ ID NO: 55 - DNA, 1342 bp, Homo sapiens
  source (1)..(1342)
  CDS (201)..(1142)
tgggaatggacccatacatttgtgtctaatttaacaaatacttttttgaagtttgagtagagtctaaatcacagctgcctttttaagttgcaacaggaacaagagaaaaagaatccatatcatccaccttttaaagaagttaggcatctactggcaaggtggaagaaatcaacaaatctatcagggatatacctctcagaatggggcagaccaacgtaacctcctggagggattttgtcttcctgggcttctccagttctggggagttgcagctccttctctttgccttgttcctctctctgtatctagtcactctgaccagcaatgtcttcattatcatagccatcaggctggatagccatctgcacacccccatgtacctcttcctttccttcctatccttctctgagacctgctacactttgggcatcatccctagaatgctctctggcctggctgggggggaccaggctatctcctatgtgggctgtgctgcccagatgttcttttctgcctcatgggcctgtactaactgcttccttctggctgccatgggctttgacagatatgtggccatctgtgctccactccactatgccagccacatgaatcctaccctctgtgcccagctggtcattacttccttcctgactggatacctctttggactgggaatgacactagttattttccacctctcattctgcagctcccatgaaatccagcactttttttgtgacacgccacctgtgctgagcctagcctgtggagatacaggcccgagtgagctgaggatctttatcctcagtcttttggtcctcttggtctccttcttcttcatcaccatctcctacgcctacatcttggcagcaatactgaggatcccctctgctgaggggcagaagaaggccttctccacttgtgcctcgcaccttacagtggtcattattcattatggctgtgcttccttcgtgtacctgaggcccaaagccagctactctcttgagagagatcagcttattgccatgacctatactgtagtgacccccctccttaatcccattgtttatagtctaaggactagggctatacagacagctctgaggaatgctttcagagggagattgctgggtaaaggatgaaggttaccccaataggacactttcttctgtgtaggctgggcatagaccaagaacccaagccaaagggccaggtattcaaggcctcaggccaaagctgtcctacccccaatcttctgggaaagccttatcctgcctcttgcccttccccctgactgcttggaatgcagaggcggggcttcctgctctgctcactgtgcaca

SEQ ID NO: 56 - protein, 313 aa, Homo sapiens [sequence omitted]

SEQ ID NO: 57 - DNA, 1159 bp, Homo sapiens
  source (1)..(1159)
  CDS (201)..(959)
gtttctttcaaatttcagacattcaaacgatgaagatcaaccagacaatcctgaaggaattcattcttgttggcttttctgtgtacccacatgtacagacatttctttttgtggtcttcttttgtctctaccttctcacccttgcaggtaatctgaccatcatgggtctaacttgagtggacaggtccctccacacccctatgtatctcttccttagtgcactctccttctctgagacctgctatacactgaccatcgtccccaagatgctggaagatctactggccaaggacagaagcatttcagtcacaggttgtagcttacagatgtgcttcttcttgggacttggtggcacaaactgtatcattctcactttgatgggatatgaccgcttcctggccatttgtaaccctctaagatatccactgcttatgaccaacattgtatgtggacaacttgtggcctctgcttgcactgcaggcttctttatctctcttacagagactgcactgatattcagggactctttctgcagacccaaccttgtcaaacacttcttctgccatatgctggcagttattaggctgtcttgtatagacagtaaccacacagaattcattataacactgatctcagtgtctggtttgctgggtacccttctgctcatcatcctgactgatgtcttcattatttctactgtcctcaggatcccttcagctgagggcaagcagaaggccttcaccacctgtgcctcccacctcaccgtggttataatccactttggttttgcatctattgtttatttgaagccagaagcctcaggagatgacacactcatagcagtcccttatactgtcattacccccttcctcagccccatcatattcagcctgaggaataaggacatgaaaaatgcttttagaagaatgatgggaaacacagttgccttgaaaaaataatcttgggttgttgctgcttgtttgaagaagggctcaatgtccccagaattcaataggggcatttatcctgtgacccctggagaaacttgtaccatttgccttgttccagaggttgggatgtaagaagcaagtgacacagactgggaactaagtagccacaggcatctacttagcttgttagagaagctgtccaacccttc

SEQ ID NO: 58 - protein, 252 aa, Homo sapiens [sequence omitted]

SEQ ID NO: 59 - DNA, 1378 bp, Homo sapiens
  source (1)..(1378)
  CDS (201)..(1178)
agttaaaatataagctccctaaattccatcttttctcaaaagctttggttctcttcataattcaagaggcagtaagataaaaaagcagaaacctcctattgtgataaatttgctggtggtgggctctatcaatacaaataaccatagactagtgcttgtgtcatggaaggaactgactttgtctgtgcccacagccagtcatgaccaccataattctggaagtagataatcatacagtgacaacacgtttcattcttctggggtttccaacacgaccagccttccagcttctctttttctccattttcctggcaacctatctgctgacactgctggagaatcttcttatcatcttagctatccacagtgatgggcagctgcataagcccatgtacttcttcttgagccacctctccttcctggagatgtggtatgtcacagtcatcagccccaagatgcttgttgacttcctcagtcatgacaagagtatttccttcaatggctgcatgactcaactttacttttttgtgacctttgtctgcactgagtacatccttcttgctatcatggcctttgaccgctatgtagccatttgtaatccactacgctacccagtcatcatgaccaaccagctctgtggcacactggctggaggatgctggttctgtggactcatgactgccatgattaagatggtttttatagcacaacttcactactgtggcatgcctcagatcaatcactacttttgtgatatctctccactccttaacgtctcctgtgaggatgcctcacaggctgagatggtggacttcttcttggccctcatggtcattgctattcctctttgtgttgtggtggcatcctacgctgctatccttgccaccatcctcaggatcccttctgctcagggccgccaaaaggcattctccacctgtgcctcccacctgaccgtcgtaattctcttctattccatgacacttttcacctatgcccgtcccaaactcatgtatgcctacaattccaacaaagtggtatctgttctctacactgtcattgttccactcctcaaccccatcatttactgtctgaggaaccatgaagtaaaggcagccctcagaaagaccatacattgcagaggaagtgggccccagggaaatggggctttcagtagttaaaaaatgtatagattcctttcaggcttgaactgagagatgatcactacacactttccccctcagtcttgtctttggttatcccccaatctccagtactgtaacactgctctcctctgtgtgtgtgtgcatgtgtgtgtgtgtgtatacacaatcatgactggagaaacatgttctcaagaagtaacctctggtatcaggct

SEQ ID NO: 60 - protein, 325 aa, Homo sapiens
MTTIILEVDNHTVTTRFILLGFPTRPAFQLLFFSIFLATYLLTLLENLLIILAIHSDGQLHKPMYFFLSHLSFLEMWYVTVISPKMLVDFLSHDKSISFNGCMTQLYFFVTFVCTEYILLAIMAFDRYVAICNPLRYPVIMTNQLCGTLAGGCWFCGLMTAMIKMVFIAQLHYCGMPQINHYFCDISPLLNVSCEDASQAEMVDFFLALMVIAIPLCVVVASYAAILATILRIPSAQGRQKAFSTCASHLTVVILFYSMTLFTYARPKLMYAYNSNKVVSVLYTVIVPLLNPIIYCLRNHEVKAALRKTIHCRGSGPQGNGAFSS

SEQ ID NO: 61 - DNA, 1156 bp, Homo sapiens
  source (1)..(1156)
  CDS (201)..(956)
aaaaataggagtttgaatgcataccaatttagaagaacttctggttaaatttacaattcttttttctctcccatgcttgttgtttctcatccaaacaagactggcatagctactttatgagggtaggtctccctgaattttaagttccaaagatctctggacctgatcatattgactttattccgtgggatcaactcttcatggccaattcttcctctgtcactgagttcttagtgctgggcttctctagccttggggaattgcagcttgtcctctttgcagtctttctctgcctctatttgattatcttgagtggaaacatcatcatcatctcagtcattcatttggatcacagcctccacacacccatgtacttctttctaggtattctttctatctctgaaatcttctacacaactgttattctgcccaagatgcttatcaacttattctctgtattcaggacactctcctttgtgagttgtgccacccaaatgttcttcttcctcggttttgctgtcactaactgtctgcttctgggagtgatgggttatgatcgttatgctgccatctgtcagcctttgcaatacgctgttctcatgagctggagagtatgtggacaactgatagcaacttgtattattagtggcttcctaatatctctggtgggaacaacttttgtctttagcctccctttctgtggctccaacaaggtcaaccactacttttgtgatatttcaccagttatccgtctcgcctgtgctgacagctacatcagtgaactggtcatcttcatcttcggggtcttggtgcttgttgtgcccttgatatttatctgcatttcctatggcttcattgtccgcaccatcctgaagatcccatcagctgaaggcaaacaaaaagccttctccacctgtgcttcccatctcattgtagtcattgtccattatggttgagcttcctttgtctacttgcgaccctcagccaaatatacatcgggcaaagataggctggtgacagtgacctataccatcatcaccccagtcttgaaccccatggtatacagcctcaggaacaacgatgtgcagatggctattcggaaactgattggaaagtctgggttttctcttaagactctatgagcagaatactttct

SEQ ID NO: 62 - protein, 251 aa, Homo sapiens
MANSSSVTEFLVLGFSSLGELQLVLFAVFLCLYLIILSGNIIIISVIHLDHSLHTPMYFFLGILSISEIFYTTVILPKMLINLFSVFRTLSFVSCATQMFFFLGFAVTNCLLLGVMGYDRYAAICQPLQYAVLMSWRVCGQLIATCIISGFLISLVGTTFVFSLPFCGSNKVNHYFCDISPVIRLACADSYISELVIFIFGVLVLVVPLIFICISYGFIVRTILKIPSAEGKQKAFSTCASHLIVVIVHYG

SEQ ID NO: 63 - DNA, 1408 bp, Homo sapiens
  source (1)..(1408)
  CDS (201)..(1208)
tgggcccaaagtaatcataagggttcttaaaattgggagagagaatcagaaagtcagagaaagagatgtaactttgttgactttgaagatggaagaagaggaccatgaaccaatgaacatgagaggtagttaggaaccggaaaaggtgaataaaaggcaagattcttctttgtcaccacctgaaaggaacaaaggagtgcatgccccaaattcttatattcacatacctgaatatgttttacttctttccccctttgcagatcttggcagaaaacctcaccatggtcaccgaattcctgttgctgggtttttccagccttggtgaaattcagctggccctctttgtagtttttctttttctgtatctagtcattcttagtggcaatgtcaccattatcagtgtcatccacctggataaaagcctccacacaccaatgtacttcttccttggcattctctcaacatctgagaccttctacacctttgtcattctacccaagatgctcatcaatctactttctgtggccaggacaatctccttcaactgttgtgctcttcaaatgttcttcttccttggttttgccattaccaactgcctgctattgggtgtgatgggttatgatcgctatgctgccatttgtcaccctctgcattaccccactcttatgagctggcaggtgtgtggaaaactggcagctgcctgtgcaattggtggcttcttggcctctcttacagtagtaaatttagttttcagcctccctttttgtagcgccaacaaagtcaatcattacttctgtgacatctcagcagtcattcttctggcttgtaccaacacagatgttaacgaatttgtgatattcatttgtggagttcttgtacttgtggttccctttctgtttatctgtgtttcttatctctgcattctgaggactatcctgaagattccctcagctgagggcagacggaaagcgttttccacctgcgcctctcacctcagtgttgttattgttcattatggctgtgcttccttcatctacctgaggcctacagcaaactatgtgtccaacaaagacaggctggtgacggtgacatacacgattgtcactccattactaaaccccatggtttatagcctcagaaacaaggatgtccaacttgctatcagaaaagtgttgggcaagaaaggttctctaaaactatataattgaaatattattacattttagatttcttaataaataatgcctttttatcacaagcatattataactgtaacaaattcattgaaataataggagtccttaagaggcatgtcataaaatatgtttttctccttacagtctctttaaatttaatccacaagctaatgtttttcatttcctcatatggaatctcagggaactcctca

SEQ ID NO: 64 - protein, 335 aa, Homo sapiens
MPQILIFTYLNMFYFFPPLQILAENLTMVTEFLLLGFSSLGEIQLALFVVFLFLYLVILSGNVTIISVIHLDKSLHTPMYFFLGILSTSETFYTFVILPKMLINLLSVARTISFNCCALQMFFFLGFAITNCLLLGVMGYDRYAAICHPLHYPTLMSWQVCGKLAAACAIGGFLASLTVVNLVFSLPFCSANKVNHYFCDISAVILLACTNTDVNEFVIFICGVLVLVVPFLFICVSYLCILRTILKIPSAEGRRKAFSTCASHLSVVIVHYGCASFIYLRPTANYVSNKDRLVTVTYTIVTPLLNPMVYSLRNKDVQLAIRKVLGKKGSLKLYN

SEQ ID NO: 65 - DNA, 1342 bp, Homo sapiens
  source (1)..(1342)
  CDS (201)..(1142)
ctatcagttattcttttgcatattttgcctaattcttcttttagcaggcattttaatgggggaatgaagaattccatcaaatatctggaaatgcctgccacctgcaaactttgtgtgaaatttcccgtacatttccactctcctttctggatcctggtttctacctctgtccctgactctcctttatagaagtgctctccatggagcaagtcaataagactgtggtgagagagttcgtcgtcctcggcttctcatccctggccaggctgcagcagctgctctttgttatcttcctgctcctctacctgttcactctgggcaccaatgcaatcatcatttccaccattgtgctggacagagcccttcatactcccatgtacttcttccttgccatcctttcttgctctgagatttgctatacctttgtcattgtacccaagatgctggttgacctgctgtcccagaagaagaccatttctttcctgggctgtgccatccaaatgttttccttcctcttctttggctcctctcactccttcctgctggcagccatgggctatgatcgctatatggccatctgtaacccactgcgctactcagtgctcatgggacatggggtgtgtatgggactaatggctgctgcctgtgcctgtggcttcactgtctccctggtcaccacctccctagtatttcatctgcccttccactcctccaaccagctccatcacttcttctgtgacatctcccctgtccttaaactggcatctcagcactccggcttcagtcagctggtcatattcatgcttggtgtatttgccttggtcattcctctgctacttatcctagtctcctacatccgcatcatctctgccattctaaaaatcccttcctccgttggaagatacaagaccttctccacctgtgcctcccatctcattgtggtaactgttcactacagttgtgcctctttcatctacttaaggcccaagactaattacacttcaagccaagacaccctaatatctgtgtcatacaccatccttaccccattgttcaatccaatgatttatagtctgagaaataaggaattcaaatcagccctacgaagaacaatcggccaaactttctatcctcttagttaaagagctattttttaaactactaatgcctagtacatgccaggcagaacgtgtgttttatacattttttttcatttaattgtccagctccactgtaacataagaacattttacatatgagaagaatgaggctcacagaagttaagacagtctggctttctactctccatgatactttaacaagactaatcagatatgggaac

SEQ ID NO: 66 - protein, 313 aa, Homo sapiens
MEQVNKTVVREFVVLGFSSLARLQQLLFVIFLLLYLFTLGTNAIIISTIVLDRALHTPMYFFLAILSCSEICYTFVIVPKMLVDLLSQKKTISFLGCAIQMFSFLFFGSSHSFLLAAMGYDRYMAICNPLRYSVLMGHGVCMGLMAAACACGFTVSLVTTSLVFHLPFHSSNQLHHFFCDISPVLKLASQHSGFSQLVIFMLGVFALVIPLLLILVSYIRIISAILKIPSSVGRYKTFSTCASHLIVVTVHYSCASFIYLRPKTNYTSSQDTLISVSYTILTPLFNPMIYSLRNKEFKSALRRTIGQTFYPLS

SEQ ID NO: 67 - DNA, 1345 bp, Homo sapiens
  source (1)..(1345)
  CDS (201)..(1145)
ttctctgttacttcagattaataattttttggaaaaatcattaaagaggcatctatatctagatagactaagagaaagagatgttaacattatgaatctgacaatatacttaaagtgaaggcgttgggaaaatgttcgtattacaaagatagttatcattttgtctctttcaaacacattcacagaaagaagttcttcagatgcgaggtttcaacaaaaccactgtggttacacagttcatcctggtgggtttctccagcctgggggagctccagctgctgctttttgtcatctttcttctcctatacttgacaatcctggtggccaatgtgaccatcatggccgttattcgcttcagctggactctccacactcccatgtatggctttctattcatcctttcattttctgagtcctgctacacttttgtcatcatccctcagctgctggtccacctgctctcagacaccaagaccatctccttcatggcctgtgccacccagctgttctttttccttggctttgcttgcaccaactgcctcctcattgctgtgatgggatatgatcgctatgtagcaatttgtcaccctctgaggtacacactcatcataaacaaaaggctggggttggagttgatttctctctcaggagccacaggtttctttattgctttggtggccaccaacctcatttgtgacatgcgtttttgtggccccaacagggttaaccactatttctgtgacatggcacctgttatcaagttagcctgcactgacacccatgtgaaagagctggctttatttagcctcagcatcctggtaattatggtgccttttctgttaattctcatatcctatggcttcatagttaacaccatcctgaagatcccctcagctgagggcaagaaggcctttgtcacctgtgcctcacatctcactgtggtctttgtccactatggctgtgcctctatcatctatctgcggcccaagtccaagtctgcctcagacaaggatcagttggtggcagtgacctacacagtggttactcccttacttaatcctcttgtctacagtctgaggaacaaagaggtaaaaactgcattgaaaagagttcttggaatgcctgtggcaaccaagatgagctaacaaaaaataataataaaattaactaggatagtcacagaagaaatcaaaggcataaaattttctgacctttaatgcatgtctcagacagtgtttccaaggattaagactactcttgcctttttattttctcctattccaaaaagaaaaaaaatgcaagtcaatctacactctatattgtccgatgtctagttaaaaaaaaa

SEQ ID NO: 68 - protein, 314 aa, Homo sapiens
MRGFNKTTVVTQFILVGFSSLGELQLLLFVIFLLLYLTILVANVTIMAVIRFSWTLHTPMYGFLFILSFSESCYTFVIIPQLLVHLLSDTKTISFMACATQLFFFLGFACTNCLLIAVMGYDRYVAICHPLRYTLIINKRLGLELISLSGATGFFIALVATNLICDMRFCGPNRVNHYFCDMAPVIKLACTDTHVKELALFSLSILVIMVPFLLILISYGFIVNTILKIPSAEGKKAFVTCASHLTVVFVHYGCASIIYLRPKSKSASDKDQLVAVTYTVVTPLLNPLVYSLRNKEVKTALKRVLGMPVATKMS

SEQ ID NO: 69 - DNA, 1303 bp, Homo sapiens
  source (1)..(1303)
  CDS (201)..(1103)
cttgtgaattgcttgcatccaaaatatacacacagcgttaagggctggtttttatcttttatttttccaatcctcttttcttcttaaggtgtccaagacacacagagccatggaatctcacaggtatctcagaattcctcctcctgggactctcagaggatccagaactgcagcccgtcctccctgggctgtccctgtccatgtacctggtcacggtgctgaggaacctgctcatcatcctggctgtcagctctgactcccacctccacacccccatgtgcttcttcctctccaacctgtgctgggctgacatcggtttcacctcggccatggttcccaagatgattgtggacatgcagtcgcatagcagagtcatctcttatgcgggctgcctgacacagatgtctttctttgtcctttttgcatgtatagaagacatgctcctgacagtgatggcctatgaccgatttgtggccatctgtcaccccctgcactacccagtcatcatgaatcctcaccttggtgtcttcttagttttggtgtcctttttcctcagcctgttggattcccagctgcacagttggattgtgttacaattcaccttcttcaagaatgtggaaatctccaattttgtctgtgacccatctcaacttctcaaccttgcctgttctgacagtgtcatcaatagcatattcatatatttagatagtattatgtttggttttcttcccatttcagggatccttttgtcttacgctaacaatgtcccctccattctaagaatttcatcatcagataggaagtctaaagccttctccacctgtggctctcacctggcagttgtttgcttattttatggaacaggcattggcgtgtacctgacttcagctgtgtcaccaccccccaggaatggtgtggtggcatcagtgatgtacgctgtggtcacccccatgctgaaccctttcatctacagcctgagaaatagggacattcaaagtgccctgtggaggctgcgcagcagaacagtcgaatctcatgatctgttatctcaagatctgctccatcctttttcttgtgtgggtgagaaaggtcaaccacattaaatctctacatctgcaaatcctgccccttagtcacattattgttgttgcttgatggcttttattcatttccacatttcctatgtgaatattcctttcttcattttgcctttaactggaatgggtgagtattctgggatcttttgtgtagcataaacctcatgctgtatcctctatacctaggtggcctcctttagtttctg

SEQ ID NO: 70 - protein, 300 aa, Homo sapiens [sequence omitted]

SEQ ID NO: 71 - DNA, 1351 bp, Homo sapiens
  source (1)..(1351)
  CDS (201)..(1151)
agaagaaagagtgtggcttcaggaccagggtgttggctatcatgaaatgaggaagcataaacagtagaagtgatttcttaggttgttgagatagatagaataatataaatgtggcataccttgtgtttagttcaagaactataatctagatgtaacacctgaaaataaactcttttattgatattctacaggcagaagaaatgaagatagcaaacaacacagtagtgacagaatttatcctccttggtctgactcagtctcaagatattcagctcttggtctttgtgctgatcttaattttctaccttatcatcctccctggaaattttctcattattttcaccataaggtcagaccctgggctcacagcccccctctatttctttctgggcaacttggccttcctggatgcatcctactccttcattgtggctcccaggatgttggtggacttcttctctgagaagaaggtaatctcctacagaggctgcatcactcagctctttttcttgcacttccttggaggaggggagggattactccttgttgtgatggcctttgaccgctacatcgccatctgccggcctctgcactgttcaactgtcatgaaccctagagcctgctatgcaatgatgttggctctgtggcttgggggttttgtccactccattatccaggtggtcctcatcctccgcttgcctttttgtggcccaaaccagctggacaacttcttctgtgatgtccgacaggtcatcaagctggcttgcaccgacatgtttgtggtggagcttctgatggtcttcaacagtggcctgatgacactcctgtgctttctggggcttctggcttcctatgcagtcatcctctgccatgttcgtagggcagcttctgaagggaagaacaaggccatgtccatgtgcaccactcgtgtcattattatacttcttatgtttggacctgctatcttcatctacatgtgccctttcagggccttaccagctgacaagatggtttctctctttcacacagtgatctttccattgatgaatcctatgatttatacccttcgcaaccaggaagtgaaaacttccatgaagaggttattgagtcgacatgtagtctgtcaagtggattttataataagaaactgagaaggaggaattctggctggaattcatatcattcatttaacaagtcctgtttttcactgagtacctcccatttgccaggtaccattgtaggcaatggaggagagttatgcataatgagagaataaacttattatatttaaagaatataaaggaaaccccagagtggttgaagtataatgagtaagtgtgagaaatttaag

SEQ ID NO: 72 - protein, 316 aa, Homo sapiens
MKIANNTVVTEFILLGLTQSQDIQLLVFVLILIFYLIILPGNFLIIFTIRSDPGLTAPLYFFLGNLAFLDASYSFIVAPRMLVDFFSEKKVISYRGCITQLFFLHFLGGGEGLLLVVMAFDRYIAICRPLHCSTVMNPRACYAMMLALWLGGFVHSIIQVVLILRLPFCGPNQLDNFFCDVRQVIKLACTDMFVVELLMVFNSGLMTLLCFLGLLASYAVILCHVRRAASEGKNKAMSMCTTRVIIILLMFGPAIFIYMCPFRALPADKMVSLFHTVIFPLMNPMIYTLRNQEVKTSMKRLLSRHVVCQVDFIIRN

SEQ ID NO: 73 - DNA, 1171 bp, Homo sapiens
  source (1)..(1171)
  CDS (201)..(971)
aattttaaatgcagccttaagctaagaccctaatatttttggttttttttttttttttcgattttttttcactcatggaattttttatggaataagtaaataaactgtgtttgaataaagtgttgaaattttctgattttataggtaagacaatcagagaagtcactaactcatatcacatggctaggtaggaattccaaatggtcttgatattgcggtatcattactctgaattaattccaatctccatatcattaacaggcatcaagaaacacaaatccatggctgatgttaattttacattggttactgagtttatccttttggaactgacagatcgtgctgaactgaagatggtcctcttcgtgttgttcctgctgatctacaccatttccctggtgggaaatataggaatgctctttctaatctatgtaactcccaaactccacacacccatgtattatttcctcagctgtctgtcatttgttgatgcctgctattcatcagtttttgcacccagaatgctgctgaacttctttgttgagcgggagacaatcttattctctgcatgtattgtgcagtattttttattcgtgtctctccttaccactgagggcttcttgctggccacaatggcttacgaccgttacatggccattgtgaaccctttactttatacagtagctatgactaaaatagtttgtattgtgctcgcatttgggtcatgtatgggaggtttaatcaactcattgacacatacaattggcttggtgaaactgtctttctgtgggccaaatgtcatcagtcacttcttctgtgatcttcccccactgttgaagctgtcatgttctgagacatctatgaatgaattgttgcttttgatcttctctggcattattgccacgctcacttttttgactgtggtgatctcctacatcttcattgttgctgctatcctgaggatccgctaagcagcaggtagacgtaaagccttctccacctgcacctctcacctgattaccgtgaccttattctatggatcgataagctttagttacattcagccaaactcccagtattccctagaacaagaaaaggtggtgtctgtattttataccctggtggttcctatgttaaacccattgatttacagcctaaggaacaaggaagt

SEQ ID NO: 74 - protein, 256 aa, Homo sapiens
MVLILRYHYSELIPISISLTGIKKHKSMADVNFTLVTEFILLELTDRAELKMVLFVLFLLIYTISLVGNIGMLFLIYVTPKLHTPMYYFLSCLSFVDACYSSVFAPRMLLNFFVERETILFSACIVQYFLFVSLLTTEGFLLATMAYDRYMAIVNPLLYTVAMTKIVCIVLAFGSCMGGLINSLTHTIGLVKLSFCGPNVISHFFCDLPPLLKLSCSETSMNELLLLIFSGIIATLTFLTVVISYIFIVAAILRIR

SEQ ID NO: 75 - DNA, 1165 bp, Homo sapiens
  source (1)..(1165)
  CDS (201)..(965)
aaggaattatatatacctgagtaaaaacgagaggctggaatcatacaggtgcaaaggaattcctcctggtagggttaactgaaaatcctaatttgcagatcccactctttttgcttgtcactctgatttatttcatcactttgttggataatttgggtataattattttaatctggttaaatgcccaacttcatactccaatgtacttcttccttggcaacctctccttttgtgatatctgctactctactgtctttgctcctaagatgctagtcaatttcctatcaaaacataagtccagtacattttctggctgtgttctacagagtttcccttttgcagtatatgtaaccacaaaggacattctcctgtccatgatggcttatgaccattacgtggccatagctaatcccttgttgtatacagtcattatggcccaaaaagtttgtattcagatggtccttgcttcttacttaggtgggctcattaattccctgacacacacaataggtttgctcaaattagacttctgtggtcctaatattgtgaatcattatttctgtgatgttcctcctcttctgaggctttcttgctctgatgctcatatcaatgaaatgctgcccttggtcttctctgggctcattgcaatgttcactttcattgtcattatggtgtcttatatctgcatcatcattgccatccagagaatccatgcagctgagggaaggtacaaagccttctccacttgtgtctcccacctaaccacggtgaccttattctatgggtctgtttcttttagttatatccagccaagttctcagtattccttggaacaggagaaggtcttggctgtgttttatacactggtgatccccatgctaaacccacttatttatagcctgagaaataaggatgtaaaagatgcagccaaaaggttgatatggtgggggaaaaaccccacttgactcagtcctgcatatagctttgctaacctaacatttacctgcaaatatatggcctatctttaaaatgatatcaaacaattataaataaaactatactccagatgctcttgtacagtttggatcaggaatgatgagtttgacttgaagactgaaaatcactttatttcacaatttattgtgttgatgacttaataaaatca

SEQ ID NO: 76 - protein, 254 aa, Homo sapiens
MYFFLGNLSFCDICYSTVFAPKMLVNFLSKHKSSTFSGCVLQSFPFAVYVTTKDILLSMMAYDHYVAIANPLLYTVIMAQKVCIQMVLASYLGGLINSLTHTIGLLKLDFCGPNIVNHYFCDVPPLLRLSCSDAHINEMLPLVFSGLIAMFTFIVIMVSYICIIIAIQRIHAAEGRYKAFSTCVSHLTTVTLFYGSVSFSYIQPSSQYSLEQEKVLAVFYTLVIPMLNPLIYSLRNKDVKDAAKRLIWWGKNPT

SEQ ID NO: 77 - DNA, 1333 bp, Homo sapiens
  source (1)..(1333)
  CDS (201)..(1133)
aagttttcagttttataaaaaataaaaattatccgtaaatctctagctaacttcaggtcattaaattttactttccatttgtaaaactttcatgattggagtctaagtcaaatttgattatagggcctttagatttgaatccttctctaactttccttattgttattcagcaggtaagtcaaaggcctgagttgatgtaaatggctggcaacaatttcactgaggttaccgtcttcatcctctctggatttgcaaatcaccctgaattacaagtcagtcttttcttgatgtttctcttcatttatctattcactgttttgggaaacctgggactgatcacgttaatcagaatggattctcagcttcacacccctatgtactttttcctgagcaatttagcatttattgacatattttactcctctactgtaacacctaaggcattggtgaatttccaatccaatcggagatccatctcctttgttggctgctttgttcaaatgtacttttttgttggattggtgtgttgtgagtgtttccttctgggatcaatggcctacaatcgctacatagcaatctgcaatcccttactgtattcagtagtcatgtcccaaaaagtgtccaactggctgggagtaatgccatatgtgataggcttcacaagctcgctgatatctgtctgggtgataagcagtttggcgttctgtgattccagcatcaatcattttttttgtgacaccacagctcttttagcactctcctgtgtagatacattcggcacagaaatggtgagctttgtcttagctggattcactcttcttagctctctccttatcatcacagtcacttatatcatcatcatctcagccatcctgaggatccagtcagcagcaggcaggcagaaggccttctccacctgcgcatcccacctcatggctgtaactatcttttatgggtctctgattttcacctatttgcaacctgataacacatcatcgctgacccaggcgcaggtggcatctgtattctatacgattgtcattcccatgctgaatccactcatctacagtctgaggaacaaagatgtgaaaaatgctcttctgagagtcatacatagaaaactttttccatgacaaatttatgtatgttacaattaaaacaaaggtggatggcttcaggaattcagttatgccaacaactaggaaaatagtagagtaacctcaaaaagcataacacaaactaaatgagaacttagagtcttgaagtttgtgaattgaattattatttcatttgtttatatggaccactaactcactgtatttggaggtcaatt

SEQ ID NO: 78 - protein, 310 aa, Homo sapiens
MAGNNFTEVTVFILSGFANHPELQVSLFLMFLFIYLFTVLGNLGLITLIRMDSQLHTPMYFFLSNLAFIDIFYSSTVTPKALVNFQSNRRSISFVGCFVQMYFFVGLVCCECFLLGSMAYNRYIAICNPLLYSVVMSQKVSNWLGVMPYVIGFTSSLISVWVISSLAFCDSSINHFFCDTTALLALSCVDTFGTEMVSFVLAGFTLLSSLLIITVTYIIIISAILRIQSAAGRQKAFSTCASHLMAVTIFYGSLIFTYLQPDNTSSLTQAQVASVFYTIVIPMLNPLIYSLRNKDVKNALLRVIHRKLFP

SEQ ID NO: 79 - DNA, 1339 bp, Homo sapiens
  source (1)..(1339)
  CDS (201)..(1139)
ttttgtttgttttttgttttttgagtcagagtctggcacagtcgccagggctggaatgcaatggtgcgatcccggctcactgcaacctccgcctcccgcgttcaagcaattctcctgcctcagcttctccagtagctgggattacaggcgcccctgctacgtatcagctttgatttctcagcagtttagagcaggtgaacatgatgggtagaaggaataacacaaatgtggctgacttcatccttatgggactgacactttctgaagagatccagatggctctgtttatgctatttctcctgatatacctaattactatgctggggaatgtggggatgatattgataatccgcctggacctccagcttcacactcccatgtattttttccttactcacctgtcatttattgacctcagttactcaactgtcgtcacacctaaaaccttagcgaacttactgacttccaactatatttcctttacgggctgctttgcccagatgttcttttttgccttcttgggtactgctgaatgttaccttctctcctcaatggcccatgatcgctatgcagcgatctgcagtcctctacactacacagttattatgtccaaaaggctctgcctcgctctcatcactgggccttatgtgattggctttatagactcctttgtcaacgtggtttccatgagcagattgcatttctacgactcaaacgtaattcatcactttttctgtgacacttccccaattttagctctgtcctgcactgatacatacaacaccgaaatcctgatattcattattgttggttccaccctgatggtgtcccttttcacaatatctgcatcctatgtgttcattctctttaccatcctgaaaattaattccacttcaggaaagcagaaagctttctctacttgcgtctctcatctcttgggagtcaccatcttttatagcactctgatttttacttatttaaaaccaagaaagtcttattccttgggaagagatcaagtggcttctgttttttatactattgtgattcccgtgctgaatccactcatttatagtcttagaaacaaagaggtgaaaaatgctgtcatcagagtcatgcagagaagacaggactccaggtaattaatatagcaggaatgctgaacatttaaactcatcttttctttcattcctgttgggtattttcttagtctctctataaaaacaattgaatcttttaatttgtttgcatttctgttgtgctaccctttgcttcactaaacatgattttaaacatttcaaggcatatgtttttagaaatccaaatggtaattagaaatcat

SEQ ID NO: 80 - protein, 312 aa, Homo sapiens
MMGRRNNTNVADFILMGLTLSEEIQMALFMLFLLIYLITMLGNVGMILIIRLDLQLHTPMYFFLTHLSFIDLSYSTVVTPKTLANLLTSNYISFTGCFAQMFFFAFLGTAECYLLSSMAHDRYAAICSPLHYTVIMSKRLCLALITGPYVIGFIDSFVNVVSMSRLHFYDSNVIHHFFCDTSPILALSCTDTYNTEILIFIIVGSTLMVSLFTISASYVFILFTILKINSTSGKQKAFSTCVSHLLGVTIFYSTLIFTYLKPRKSYSLGRDQVASVFYTIVIPVLNPLIYSLRNKEVKNAVIRVMQRRQDSR

SEQ ID NO: 81 - DNA, 1339 bp, Homo sapiens
  source (1)..(1339)
  CDS (201)..(1139)
tttttgagtcggagtctggcacagttgctggggctgcaatgcaatagtgtgatcccagctcactgcaacctctggctcactgcaacctccggctcccatgttcaagcgattctcctgcctcagcttctccagtagctgggagtacaggcgcccctgctacgtatcaactttgatttctcagcagtttagagcaggtgaacatgatgggtagaaggaatgacacaaatgtggctgacttcatccttacgggactgtcagactctgaagaggtccagatggctctgtttatgctatttctcctcatatacctaattactatgctggggaatgtggggatgctattgataatccgcctggacctccagcttcacactcccatgtattttttccttactcacctgtcatttattgacctcagttactcaactgtcgtcacacctaaaaccttagcgaacttactgacttccaactatatttccttcacgggctgctttgcccagatgttctgttttgtcttcttgggtactgctgaatgttatcttctctcctcaatggcctatgatcgctatgcagcgatctgcagtcctctacactacacagttattatgcccaaaaggctctgcctcgctctcatcactgggccttatgtgattggctttatggactcctttgtcaatgtggtttccatgagcagattgcatttctgtgactcaaacataattcatcactttttctgtgacacttccccaattttagctctgtcctgcactgacacagacaacactgaaatgctgatattcattatcgctggttccaccctgatggtgtcccttatcacaatatctgcatcctatgtgtccattctctctaccatcctgaaaattaattccacttcaggaaagcagaaagctttctctacttgcgtctctcatctcttgggagtcaccatcttctatggaactatgatttttacttacttaaagccaagaaagtcttattccttgggaagagatcaagtggctcctgtgttttatactattgtgattcccatgctgaatccactcatttatagtcttagaaacagagaagtgaaaaatgctctcattagagtcatgcagagaagacaggactccaggtagttaaaatagcagaaatggaacatttaatctcatcttttctttcattcctattgggtattttcttagtctctctataaaaacaattgaatcctttaatttatttgcatttctgttgtgctactctttgcttgactaaacatgatttaaaacatttcaaggcatatgtttttagaaatccaaatggtaattagaatcataat

SEQ ID NO: 82 - protein, 312 aa, Homo sapiens
MMGRRNDTNVADFILTGLSDSEEVQMALFMLFLLIYLITMLGNVGMLLIIRLDLQLHTPMYFFLTHLSFIDLSYSTVVTPKTLANLLTSNYISFTGCFAQMFCFVFLGTAECYLLSSMAYDRYAAICSPLHYTVIMPKRLCLALITGPYVIGFMDSFVNVVSMSRLHFCDSNIIHHFFCDTSPILALSCTDTDNTEMLIFIIAGSTLMVSLITISASYVSILSTILKINSTSGKQKAFSTCVSHLLGVTIFYGTMIFTYLKPRKSYSLGRDQVAPVFYTIVIPMLNPLIYSLRNREVKNALIRVMQRRQDSR

SEQ ID NO: 83 - DNA, 1375 bp, Homo sapiens
  source (1)..(1375)
  CDS (201)..(1175)
ctttaattattatacttcctttaatcaaatgacaaaatcaaaatcaaaatttacaaaaaatgacatctctgtgattttactgaccttctatttgattccttagaagagagaataaagatacttttggttcatccataactcaagttaactcacatctgctgatactacctaggtccagtgggaaaaacaagaaaactaagatgttggagagtaattacaccatgccaactgagttcctatttgttggattcacagattatctacctctcagagtcacactgttcttggtattccttctggtatatacattaactatggtcggaaatatactcttaataattctagttaatattaattcaagccttcaaattcccatgtattattttcttagcaacttatctttcttagacatcagctgttctacagcaatcactcctaaaatgctggcaaacttcttggcatccaggaaaagcatctctccttatgggtgtgcactacaaatgtttttcttcgcttcttttgctgatgctgagtgccttatcctggcagcaatggcttatgaccgctatgcagccatctgcaacccactgctctatactacactgatgtctaggagagtctgtgtctgcttcattgtgttggcatatttcagtggaagtacaacatcactggtccatgtgtgcctcacattcaggctgtcattttgtggctccaatatcgtcaatcattttttctgtgatatcccacctcttctggctttatcatgtacagacactcagatcaaccagcttctgctctttgctttgtgcagcttcatccagaccagcacttttgtggtaatatttatttcttacttctgcatcctcatcactgtgttgagcatcaagtcctcaggtggcagaagcaaaacattctccacttgtgcttcccacctcatagcagtcaccttattctatggagcgctcctgtttatgtacttacagcccaccactagctattccctagacactgataaggtggtggcagtgttttatactgttgtatttcccatgtttaatccaataatttatagtttcagaaacaaggatgtgaaaaatgctctcaaaaagctattagaaagaattggatattcaaatgaatggtatttaaatcgtttaagaatagtcaatatctaacttacccttccaatctcataaacagcaattatgccatgaacatcttatgtgttaactattttaaatttatcacattttcagaaataaagataacttgttatactcagtgcattaaaatgcttcatcctctcttccaaaaatgttctctccacaattctactctataaaacattacctaattaaacatagtcattatttat

SEQ ID NO: 84 - protein, 324 aa, Homo sapiens
MLESNYTMPTEFLFVGFTDYLPLRVTLFLVFLLVYTLTMVGNILLIILVNINSSLQIPMYYFLSNLSFLDISCSTAITPKMLANFLASRKSISPYGCALQMFFFASFADAECLILAAMAYDRYAAICNPLLYTTLMSRRVCVCFIVLAYFSGSTTSLVHVCLTFRLSFCGSNIVNHFFCDIPPLLALSCTDTQINQLLLFALCSFIQTSTFVVIFISYFCILITVLSIKSSGGRSKTFSTCASHLIAVTLFYGALLFMYLQPTTSYSLDTDKVVAVFYTVVFPMFNPIIYSFRNKDVKNALKKLLERIGYSNEWYLNRLRIVNI

SEQ ID NO: 85 - DNA, 1243 bp, Homo sapiens
  source (1)..(1243)
  CDS (201)..(1043)
agaccattgtttattaaattcacatgctcatccatttgtcttctaatcatccttcagtcactttaattactatgccatattatcctaggtttttccatatgtgaatatccttattaacatttctatttttttctataaactttcaaagggagaaacattttcatctcatataaagttcgcacaaaatatatttgtcacaaatgaccagaaaaaattatacctcactgactgagttcatcctattgggattagcagacacgctggagctacagattatcctctttctgttatttcttgtgatttacacacttaccgtactgggaaatatcgggatgatcctcttaatcaggatcgattcccggcttcacacacccatgtatttcttcctggttaacctgtcctttgtggacatttgttactcaaccaccatcaccccaaagatgctggcagatttattatcagagaagaaaaccatctcttttgctggctgcttcctacagatgtacttctttatcgccctggcgacaaccgaatgcatcctctttgggttaatggcctatgaccggtatgtgaccatatgtcgcccgctgctttactccttgatcatgtccaggacagtctgcctaaaaatggcagccggggcttttgctgcagggttgctgaactccatggtcaacactagctatgtcagcagcttgtcattctgtggctccaatgtcatccatcacttcttctgcaacagtcccccactttttaagctttcttgttctgacacacacttgaaggaaagcatattttccacttttgctggtgtgaataaggtcggggctctgcttgtcatcctctcctcctattcctacgttctcttctccattttttctatgcattcaggggaggggaggcacagagctttctccacgtgtgcctctcacctgacagccataatcctcttctacaccacctccatctatacctacctgagacctagttccagctactccctgatcaggacaaagtggtttctgtgttctacacagtggtgatccccatattgaatcctctgatctacagcctcaggaataaggaagtaaagaaggctttagcgaatgtaattagcaggaaaaggatcccttcatttctgtgatttttttgcctaaaaatctgagctaaagagcatattttagttactttcaaagtctagttcatgcctacaatttttgttagaatattttctcattaaaca

SEQ ID NO: 86 - protein, 280 aa, Homo sapiens
MTRKNYTSLTEFILLGLADTLELQIILFLLFLVIYTLTVLGNIGMILLIRIDSRLHTPMYFFLVNLSFVDICYSTTITPKMLADLLSEKKTISFAGCFLQMYFFIALATTECILFGLMAYDRYVTICRPLLYSLIMSRTVCLKMAAGAFAAGLLNSMVNTSYVSSLSFCGSNVIHHFFCNSPPLFKLSCSDTHLKESIFSTFAGVNKVGALLVILSSYSYVLFSIFSMHSGEGRHRAFSTCASHLTAIILFYTTSIYTYLRPSSSYSLIRTKWFLCSTQW

SEQ ID NO: 87 - DNA, 1051 bp, Homo sapiens
  source (1)..(1051)
  CDS (201)..(851)
gatgttccttgtgaatttcttgcatccagcattaagggctggtttttatcttttatttttccaatcctctttccttctcaaggtgtccaagacacacagagccacggaatctcacaggtgtctgagaattcctcctcctgggactctcagaggatccagaactgcagccggtcctcgctttgctgtccctgtccctgtccatgtatctggtcacggtgctgaggaacctgctgagcatcccggctgtcagctctgactccccgctccacacccccacgtacttcttcctctccatcctgtgctgggctgacatcggtttcacctcggccacggtttccaagacgattgtggacatgcagtcacatagcagagtcatctctcatgcgggctgcctgacacagatgtctttcttggtcctttttgcatgtatagaaggcatgctcctgactgtgatggcctatgactgctttgtaggcatctgtcgccctctgcactacccagtcatcgtgaatcctcatctctgtgtcttctttgttttggtgtcctttttccttagcctgttggattcccagctgcacagttggattgtgttacaattcaccatcatcaagaatgtggaaatctctaattttgtctgtgacccctctcaacttctcaaacttgcctgttctgacagcgtcatcaatagcatcttcatatattttggtagtactatgtttggttttcttcccatttcagggatccttttgtcttactataaaatcgtcccctccattctaaggatttcatcgtcagatgggaagtataaagccttctccacctatggctctcacctagcagttttttgctgatttgatggaacaggcattggcgtgtacctgacttcagctgtggcaccacccctcaggaatggtgtggtggtgtcagtgatgtaagctgtggtcacccccatgctgaaccttttcatctacagcctgagaaacagggacatacaaagtgccctgcggaggctgcgcagcagaacagtcgaatctcatgatctgttccatcc

SEQ ID NO: 88 - protein, 216 aa, Homo sapiens [sequence omitted]

SEQ ID NO: 89 - DNA, 1054 bp, Homo sapiens
  source (1)..(1054)
  CDS (201)..(854)
  modified_base (975): a, t, c, g, unknown or other
ggcgcccctgttcctggtgttcttggtcatctacctcatcaccctggtgggcaaccttggcctgatggctctcatctggaaggacccccaccttcacacccccatatacttatttcttggcagtttagcctttgcagatgcatgcacttcatcctctgtaacttctaagatgcttatcaatttttttatcaaagaatcatatgctatccatggctaagtgtgccacccagttttacttttttggttccaatgcaaccacagaatgcttcctgctggtagtgatggcctatgaccgctatgtagccatatgcaatcccttgctttatccagtggtgatgtccaatagcctctgtactcagtttataggtatttcatattttattggttttctgcattcagcgattcatgtgggtttgttatttagattaactttctgcaggtccaatattatacattatttctactgtgaaattttacagctgttcaaaatttcttgcaccaatcctacagttaatatacttctgattttcatcttttcagcatttatacaagtcttcacttttatgactcttatcgtctcttactcctatattctctctgccatcctgaaaaagaagtctgagaagggtagaagcaaagccttctctacttgcagtgcccatctgctctctgtctctttgttctacggcaccctcttcttcatgtatgtgagttctaggtctggatcagctgcagatcaggccaaaatgtattctttattttacacaataataattcctttactaaatccttttatttacagcctaaggaacaaagaggttatagatgccctgagaagaatcatgaagaaataaatagttgtcagacaacattcaaaccatttcttctttatattctgctgaagaaaaccccaagtcctgtagattaggactagtggtcagggtggtccctgagctctgtgtaaggatctcagcttcatattatgtttactggantatggatccagtgaaggtttggtaacgttacccaaaatcagcttatttagaaacactgt

SEQ ID NO: 90 - protein, 217 aa, Homo sapiens [sequence omitted]

SEQ ID NO: 91 - DNA, 1351 bp, Homo sapiens
  source (1)..(1351)
  CDS (201)..(1151)
tgttcaaccaatagccacaaaagtagtagcctcaggagactcattctcgcagtgaattgggcatgcaccaaattccaggcaagatgaggagacattgtggaagatgctctccttcttttaagccaaagagacgtcaataattgtggcatattattaattagtgccttattcctctacaatttttttcagagaggtcaggaatggttgaagaaaatcataccatgaaaaatgagtttatcctcacaggatttacagatcaccctgagctgaagactctgctgtttgtggtgttctttgccatctatctgatcaccgtggtggggaatattagtttggtggcactgatatttacacactgtcggcttcacacaccaatgtacatctttctgggaaatctggctcttgtggattcttgctgtgcctgtgctattacccccaaaatgttagagaacttcttttctgagggcaaaaggatttccctctatgaatgtgcagtacagttttattttctttgcactgtggaaactgcagactgctttcttctggcagcagtggcctatgaccgctatgtggccatctgcaacccactgcagtaccacatcatgatgtccaagaaactctgcattcagatgaccacaggcgccttcatagctggaaatctgcattccatgattcatgtagggcttgtatttaggttagttttctgtggattgaatcacatcaaccacttttactgtgatactcttcccttgtatagactctcctgtgttgaccctttcatcaatgaactggttctattcatcttctcaggttcagttcaagtctttaccataggtagtgtcttaatatcttatctctatattcttcttactattttcagaatgaaatccaaggagggaagggccaaagccttttctacttgtgcatcccacttttcatcagtttcattattctatggatctatttttttcctatacattagaccaaatttgcttgaagaaggaggtaatgatataccagctgctattttatttacaatagtagttcccttactaaatcctttcatttatagtctgagaaacaaggaagtaataagtgtcttaagaaaaattctgctgaaaataaaatctcaaggaagtgtgaacaaatgacatctatcctagcttaatggtttaatgctcaaaaaacttctaaataaaattacacagaggaagtgtactaattgtatacaaaatattaaaacatatcaaaatacaatcaaattaagcagaaatatgtgacagggaaaattcatggaaaggagtgaactgtgctaaatatttactcagaatttaaaagcacatgcagacat

SEQ ID NO: 92 - protein, 316 aa, Homo sapiens
MVEENHTMKNEFILTGFTDHPELKTLLFVVFFAIYLITVVGNISLVALIFTHCRLHTPMYIFLGNLALVDSCCACAITPKMLENFFSEGKRISLYECAVQFYFLCTVETADCFLLAAVAYDRYVAICNPLQYHIMMSKKLCIQMTTGAFIAGNLHSMIHVGLVFRLVFCGLNHINHFYCDTLPLYRLSCVDPFINELVLFIFSGSVQVFTIGSVLISYLYILLTIFRMKSKEGRAKAFSTCASHFSSVSLFYGSIFFLYIRPNLLEEGGNDIPAAILFTIVVPLLNPFIYSLRNKEVISVLRKILLKIKSQGSVNK

SEQ ID NO: 93 - DNA, 1351 bp, Homo sapiens
  source (1)..(1351)
  CDS (201)..(1151)
tttcatcactagccaaagaggtaattcctttatggaaattcattctccccatgaatggggcatgcaccaaagtccaggcaacatgaggaaacattgtggaagatgctctccttcctttaagccaaagagacctaaataactgtggcatattataaattagtgccttctttctccacaattttttttcagacaagtcaggaatggctgaagaaaatcataccatgaaaaatgagtttatcctcacaggatttacagatcaccctgagctgaagactctgctgtttgtggtgttctttgccatctatctgatcaccgtggtggggaatattagtttggtggcactgatatttacacaccgtcggcttcacacaccaatgtacatctttctgggaaatctggctcttgtggattcttgctgtgcctgtgctattacccccaaaatgttagagaacttcttttctgagaacaaaaggatttccctctatgaatgtgcagtacagttttattttctttgcactgtggaaactgcagactgctttcttctggcagcaatggcctatgaccgctatgtggccatatgcaacccactgcagtaccacatcatgatgtccaagaaactctgcattcagatgaccacaggggccttcatagctggaaacctgcattccatgattcatgtagggcttgtatttaggttagttttctgtggatcgaatcacatcaaccacttttactgtgatattcttcccttgtatagactctcttgtgttgatccttatatcaatgaactggttctattcatcttctcaggttcagttcaagtctttaccataggtagtgtcttaatatcttatctctatattcttcttactattttcaaaatgaaatccaaagagggaagggccaaagctttttctacctgtgcatcccactttttgtcagtttcattattctatggatctcttttcttcatgtacgttagaccaaatttgcttgaagaaggggataaagatataccagctgcaattttatttacaatagtagttcccttactaaatcctttcatttatagcctgagaaatagggaagtaataagtgtcttaagaaaaattctgatgaaagaaataatctcaagaagatggaaacagtgacatctactatagcttaatgacttaaatgcagcataaacttccatgtgaaattacacaggggaaagcataaattataagtaaaattttaatatataagaatacattcaaattaagtggcaagaggtaagggtagaatatacaaaaaagagtaaactgtggtaaatcttaattcaaaataacaaaaatgaaattctaatttt

SEQ ID NO: 94 - protein, 316 aa, Homo sapiens
MAEENHTMKNEFILTGFTDHPELKTLLFVVFFAIYLITVVGNISLVALIFTHRRLHTPMYIFLGNLALVDSCCACAITPKMLENFFSENKRISLYECAVQFYFLCTVETADCFLLAAMAYDRYVAICNPLQYHIMMSKKLCIQMTTGAFIAGNLHSMIHVGLVFRLVFCGSNHINHFYCDILPLYRLSCVDPYINELVLFIFSGSVQVFTIGSVLISYLYILLTIFKMKSKEGRAKAFSTCASHFLSVSLFYGSLFFMYVRPNLLEEGDKDIPAAILFTIVVPLLNPFIYSLRNREVISVLRKILMKEIISRRWKQ

SEQ ID NO: 95 - DNA, 1213 bp, Homo sapiens
  source (1)..(1213)
  CDS (201)..(1013)
tttatccccagtttcaactcacaactccattccaagtgttcctttacatttatttcattttttagaggacatgcagtgaggacatggaggaggaaaatacaacattgctgacagagtttgttctcacaggatttttatatcaaccacagtggaaaatacccctgttcctggcattcttggtaatatagctcatcaccatcatggggaatcttggtctaattgttctcatctggaaagaccctcaccttcatatcccaatgtatttattccgtgggagtttggcctttgtggatgcttggttatcatccacagtgactccaaagatgctgatcaacttcttagctaagagtaagatgatatctctctctgaatgcatggtacaatttttttcctttgtaatcagtgtaaccacagaatgttttatctcggcatcaatggcatatgatcgctatgtagccatttgcaaagctttactttatccagtcattatgaccaacggactatgcatccagctattagtcttgtcatttataggtggccttcttcatgctttaatccatgaaatttttttattcagattaaccttctgtaattccaacataatacaacacttttactgtgacattatcccattgttaaagatttcctgtactgattcttttattaactttctaatggtttttattttcgcagattcaattcaagtttttaccattggaactattcttatatcttatacacttgtcctccttataatcttaaaaaataagtctgtcaaagggatacaaaaagctgtctccacctgtggagctcatctcttatctgtatctttatactatgggccccttgtcttcatgtatgtgggctctgcatccccgcaagcagatgaccaagatatgatggagtctctattttacactgtcatcgttcctttattaaattccatgatctacagcctgagaaacaagcaagtaatagcttcattcacaaaaatgttcaaaagaaatgtttagatctcatacaatctctgttctctgtttactaaaattttcccaagattgttcaagttaaaggtatctgtgttttgctagcattcaaagattttgcaaagtcctagcactttaaggacctaaggtgttaatatctagtaaactaataaatacactcctaatgttattcaacggcatttaaaaatttttagtcatgttcatat

SEQ ID NO: 96 - protein, 270 aa, Homo sapiens
MGNLGLIVLIWKDPHLHIPMYLFRGSLAFVDAWLSSTVTPKMLINFLAKSKMISLSECMVQFFSFVISVTTECFISASMAYDRYVAICKALLYPVIMTNGLCIQLLVLSFIGGLLHALIHEIFLFRLTFCNSNIIQHFYCDIIPLLKISCTDSFINFLMVFIFADSIQVFTIGTILISYTLVLLIILKNKSVKGIQKAVSTCGAHLLSVSLYYGPLVFMYVGSASPQADDQDMMESLFYTVIVPLLNSMIYSLRNKQVIASFTKMFKRNV

SEQ ID NO: 97 - DNA, 1345 bp, Homo sapiens
  source (1)..(1345)
  CDS (201)..(1145)
catttttagaattaaaataattgcatttattttgatttcttatatttcccaaaacagtttccatctattacaggaatatgaaagaaaattaaaagggtattgtaataagagtatgtttttctatcaacttccctcccccagtatttgctgtataagtcttagtgaatgctcttttacatttactgcatttcatttcagggatgtcgaatgaggacatggaacaggataatacaacattgctgacagagtttgttctcacaggacttacatatcagccagagtggaaaatgcccctgttcttggtgttcttggtgatctatctcatcactattgtgtggaaccttggtctgattgctcttatctggaatgacccacaacttcacatccccatgtacttttttcttgggagtttagcctttgttgatgcttggatatcttccacagtaactcccaaaatgttggttaatttcttggccaaaaacaggatgatatctctgtctgaatgcatgattcaatttttttcctttgcatttggtggaactacagaatgttttctcttggcaacaatggcatatgatcgctatgtagccatatgcaaacctttactatatccagtgattatgaacaattcactatgcatacggctgttagccttctcatttttaggtggcttcctccatgccttaattcatgaagtccttatattcagattaaccttctgcaattctaacataatacatcatttttactgtgatattataccactgtttatgatttcctgtactgacccttctattaattttctaatggtttttattttgtctggctcaattcaggtattcaccattgtgacagttcttaattcttacacatttgctcttttcacaatcctaaaaaagaagtctgttagaggcgtaaggaaagccttttccacctgtggagcccatctcttatctgtctctttatattatggcccacttatcttcatgtatttgcgccctgcatctccacaagcagatgaccaagatatgatagactctgtcttttatacaatcataattcctttgctaaatcccattatctacagtctgagaaataaacaagtaatagattcattcacaaaaatggtaaaaagaaatgtttagatttcatagtgatatctctcattttcagtaaaaagaattttgcagttagataaggtgttttgctaagtgttcaaagttattgtaaatataattgttttagcattttaatgacttagggttttatacctaataaactccttaaaatatttatatatgttattcaaaagcatccaaggaattttaacctggtgttcatgtta

SEQ ID NO: 98 - protein, 314 aa, Homo sapiens
MSNEDMEQDNTTLLTEFVLTGLTYQPEWKMPLFLVFLVIYLITIVWNLGLIALIWNDPQLHIPMYFFLGSLAFVDAWISSTVTPKMLVNFLAKNRMISLSECMIQFFSFAFGGTTECFLLATMAYDRYVAICKPLLYPVIMNNSLCIRLLAFSFLGGFLHALIHEVLIFRLTFCNSNIIHHFYCDIIPLFMISCTDPSINFLMVFILSGSIQVFTIVTVLNSYTFALFTILKKKSVRGVRKAFSTCGAHLLSVSLYYGPLIFMYLRPASPQADDQDMIDSVFYTIIIPLLNPIIYSLRNKQVIDSFTKMVKRNV

SEQ ID NO: 99 - DNA, 1207 bp, Homo sapiens
  source (1)..(1207)
  CDS (201)..(1007)
caaataattgcatttttccacctcttcagttcccctactatagttttcattagcacagtgtaataaatgcatgaataggacattctgatgagtgtatgattttattttaactcctctcctccagtattcactttataaattcttattgaatattctttttatatttatttcagttcactcagggtacatccaatgaggacatggatgacgaaaatgcaacattgctgacagagtttgttctcacaggacttacatatcaatcagagtggaaaatacccctgttcctggcattcttggtaatatatctcatcaccatcatggcaaatcttggtctgattgctgtcatctggaaagactcacaccttcacattccaatgtacttattccttgggagtttagcctttgtggatgcttggttatcatcctcagtgacccctaagatgctgatcagctttttagctaagagtatgattatttctgtctctgaatgcaagatacaatttttttcctttggaatcagtggaaccacagaatgttttctcttggcaacaatggcatatgatcgctatgtagccatatgcaaacctttactttatccagtcattatgaccaatggactgtgtatctggctattagtcttgtcatttataggtggctttcttcatgccttaattcatgaaggtattttattcagattaaccttctgtaattccaacataatacatcacttttactgtgacattatcccattgttaaagatttcctgtactgacccttctattaattttttaatgctttttattttgtctggttcaatacaggtattcactattttgactgttcttgtctcttatacatttgtcctctttacaatcttaaaaaaaaaagtctgccaaagacataaggaaagccttttccacctgtggagcccatctcttatctgtttctttatactatggcccccttctcttcatgtatgtgcaccctgcatctccacaagcagatgatcaagatatggtggagtctctattttacactgtcataattcctttcttaaatcccattatctacagcctgagaaataagcaagtcatagattcactgacaaaaacattaaaaggaaatgtttagatctcatactggaatgtattctctatttaaagtcacataatcatgcaggctagatgtcagtatatgttagtgtatg

SEQ ID NO: 100 - protein, 268 aa, Homo sapiens [sequence omitted]

SEQ ID NO: 101 - DNA, 1378 bp, Homo sapiens
  source (1)..(1378)
  CDS (201)..(1178)
ataatgcgtctttttaactctcagtctgttaactcctacacaattttcaaaccaaattcattattatttccatgtatttaaatcctcaaatatagggttcatcaattatagcactgatcaaaaaaaattaagagggctcgataattacatagtttatttcaacacctcttccccaatttcaactcacaattccattgcaaatgttcctttacctttgcttcatttttcagaggacatgcagtgaggagatggaagaggaaaatgcaacattgctgacagagtttgttctcacaggatttttacatcaacctgactgtaaaataccgctcttcctggcattcttggtaatatatctcatcaccatcatggggaatcttggtctaattgttctcatctggaaagaccctcaccttcatatcccaatgtacttattccttgggagtttagcctttgtggatgcttcgttatcatccacagtgactccgaagatgctgatcaacttcttagctaagagtaagatgatatctctctctgaatgcatggtacaatttttttcccttgtaaccactgtaaccacagaatgttttctcttggcaacaatggcatatgatcgctatgtagccatttgcaaagctttactttatccagtcattatgaccaatgaactatgcattcagctattagtcttgtcatttataggtggccttcttcatgctttaatccatgaagctttttcattcagattaaccttctgtaattccaacataatacaacacttttactgtgacattatcccattgttaaagatttcctgtactgattcctctattaactttctaatggtttttattttcgcaggttctgttcaagtttttaccattggaactattcttatatcttatacaattatcctctttacaatcttagaaaagaagtctatcaaagggatacgaaaagctgtctccacctgtggggctcatctcttatctgtatctttatactatggccccctcaccttcaaatatctgggctctgcatctccgcaagcagatgaccaagatatgatggagtctctattttacactgtcatagttcctttattaaatcccatgatctacagcctgagaaacaagcaagtaatagcttcattcacaaaaatgttcaaaagcaatgtttagatctcatacaatctctcttctctatttactaaaattgtcccaagattgtgcaagttagaggtgtctatgtcttgccagcattcaaagatgatgcaaagtcctagcactttaatggcctaaggttttagtacctattaaactaataaatatatccctaatgttattcaatagcacttaagaaattttaatcatgttcatat

SEQ ID NO: 102 - protein, 325 aa, Homo sapiens
MFLYLCFIFQRTCSEEMEEENATLLTEFVLTGFLHQPDCKIPLFLAFLVIYLITIMGNLGLIVLIWKDPHLHIPMYLFLGSLAFVDASLSSTVTPKMLINFLAKSKMISLSECMVQFFSLVTTVTTECFLLATMAYDRYVAICKALLYPVIMTNELCIQLLVLSFIGGLLHALIHEAFSFRLTFCNSNIIQHFYCDIIPLLKISCTDSSINFLMVFIFAGSVQVFTIGTILISYTIILFTILEKKSIKGIRKAVSTCGAHLLSVSLYYGPLTFKYLGSASPQADDQDMMESLFYTVIVPLLNPMIYSLRNKQVIASFTKMFKSNV

SEQ ID NO: 103 - DNA, 1288 bp, Homo sapiens
  source (1)..(1288)
  CDS (201)..(1088)
cttgtgaattgcttgcatccaaaatatacacacagcattaagcgctggtttttatcttttatttttccaatcctcttttcttctcaaggcgtccaagtcacacagagccacggaatctcacgggtgtctgagaattcctcctcctgggaatctcagaggatccagaactgcagcccgtcctcgctgggctgaccctgtccatgtacctggtcacggtgctgaggaacctgctcatcatcctggctgtcagctctgactcccacctccacacctccatgtacttcgtcctctccaacctgcgctgggttgacatcggtttcacctcggccacggttcccaagatgattgtggacatgcagtcgcatagcagagtcatctcttatgcgggctgcctgacacagatgtctttcttggtcttttttgcatgtatagaagacatgctcctgactgtgatgtcctatgaccaatttttggccatctgtcaccccctgcactacccagtcatcgtgaatcctcacttctgtgtcttcttagttttggtgtcctttttccttagcctgttggattcccagctgcatagatggattgtgttacaattcaccttcttcaagaatgtggaaatctctaattttgtctgtgagccatctcaacttctcaaccttgcctgttctgacagcgtcatcaatatcatattcatatatttagatagtactatgtttggttttcttcccatttcagggatccttttgtcttactataaaattgtcccctccattctaaggatgtcattgtcagatgtgaagtataaagccttctccacctgtggctctcacctggcagttttttgcttattttacggagcaggcattggcgtgtacctgacttcagctgtgtcaccaccttccggcaatggtgtggtggcttcagtgatgtacactgtggtcacccccatgctgaaccctttcatctacagcctgagaaacagggacattcaaagtgccccgtggaggctgcgcagcacaacagttgaatctcatgatctcttccatcctttttcttgtgtctgtaagaaagggcaaccacattaaatccctacatctgcaaatcctgccccttagtcacattttttttgttgcttgatggcttttattcctttccacatttgctatgtgaatattgctttcttcgttatgcctttaactggaatgggtgagtattctggaatcctttgtttagcagaaacctcttgactgagtcctctatacctaggcggcctcctttagtttct

SEQ ID NO: 104 - protein, 295 aa, Homo sapiens [sequence omitted]

SEQ ID NO: 105 - DNA, 1441 bp, Homo sapiens
  source (1)..(1441)
  CDS (201)..(1241)
ttgacacttcccagaataattctggcagtattggtagctttgaatgtgctgctgtgtagtcctaagatatattgggtttctcaatgtctcaattttcataatcaataaaactagtacaatatccatactgttttgcttactgagagtattctaagaatcaaacacaatatcggaagcaaatttgtattgaaaatttgtagatgtacagatttacagattttgatgtatcaaacatttcaatttacctgaatcatgtccttttctatactacccagcaggcaggtgacctagaacacatggagacaagaaattactctgccatgactgaattctttctggtggggctttcccaatatccagagctccagctttttctgttcctgctctgcctcatcatgtacatgataatcctcctgggaaatagcctcctcattatcatcaccatcttggattctcgcctccatactcccatgtatttctttcttggaaacctctcattcttggacatctgttacacatcctcatccattcctccaatgcttattatatttatgtctgagagaaaatccatctccttcattggctgtgctctgcagatggttgtgtcccttggcttgggctccactgagtgtgtcctcctggctgtgatggcctatgaccactatgtggccatctgcaacccactgaggtactccatcatcatgaacggagtgctgtatgtgcaaatggctgcatggtcctggatcataggctgtctgacctccctattgcaaacagttctgacaatgatgttgcctttctgtgggaataatgtcattgatcatattacctgtgaaattttggcccttctaaaacttgtttgttcagatatcaccatcaatgtgcttatcatgacagtgacaaatattgtttcactggtgattcttctactgttaattttcatctcctatgtgtttattctctcttccatcctgagaattaattgtgctgagggaagaaagaaagccttctctacctgttcagcgcactcgattgtggtcatcttattctacggttcagccctttttatgtacatgaaacccaagtcaaagaacactaatacatctgatgagattattgggctgtcttatggagtggtaagcccaatgttaaatcccatcatctatagcctcaggaataaagaggtcaaagaggctgtaaagaaagtcctgagcagacatctgcatttattgaaaatgtgaaaaaccttgggcatgcgatatcctcaatggggcaagagagcttgtcttttgtatttagatactgcaaaacctactgtcacgagagcttgtgtgtttgcaaaaccaactattagattcccattcttttcaacgtagaattttcatgctcatgtaaccttcttaatagtgccttgtctgctgggtttgtagctgtaagcagt

SEQ ID NO: 106 - protein, 346 aa, Homo sapiens
MYRFTDFDVSNISIYLNHVLFYTTQQAGDLEHMETRNYSAMTEFFLVGLSQYPELQLFLFLLCLIMYMIILLGNSLLIIITILDSRLHTPMYFFLGNLSFLDICYTSSSIPPMLIIFMSERKSISFIGCALQMVVSLGLGSTECVLLAVMAYDHYVAICNPLRYSIIMNGVLYVQMAAWSWIIGCLTSLLQTVLTMMLPFCGNNVIDHITCEILALLKLVCSDITINVLIMTVTNIVSLVILLLLIFISYVFILSSILRINCAEGRKKAFSTCSAHSIVVILFYGSALFMYMKPKSKNTNTSDEIIGLSYGVVSPMLNPIIYSLRNKEVKEAVKKVLSRHLHLLKM

SEQ ID NO: 107 - DNA, 1165 bp, Homo sapiens
  source (1)..(1165)
  CDS (201)..(965)
ttgacagaaaacatgtgctaacaaagaatggatcagaaaaatggaagttctttcactggatttatcctactgggtttctctgacaggcctcagctggagctagtcctctttgtggttttttgatcttctatatcttcactttgctggggaacaaaaccatcattgtattatctcacttggacccacatcttcacaatcctatgtattttttcttctccaacctaagctttttggatctgtgttacacaaccggcattgttccacagctcctggttaatctcaggggagcagacaaatcaatctcctatggtggttgtgtagttcagctgtacatctctctaggcttgggatctacagaatgcgttctcttaggagtgatggcatttgaccgctatgcagctgtttgcaggcccctccactacacagtagtcatgcacccttgtctgtatgtgctgatggcttctacttcatgggtcattggttttgccaactccctattgcagacggtgctcatcttgcttttaacactttgtggaagaaataaattagaacactttctttgtgaggttcctccattgctcaagcttgcctgtgttgacactactatgaatgaatctgaactcttctttgtcagtgtcattattcttcttgtacctgttgcattaatcatattctcctatagtcagattgtcagggcagtcgtgaggataaagtcagcaacagggcagagaaaagtgtttgggacatgtggctcccacctcacagtggtttccctgttctacggcacagctatctatgcttacctccagcccggcaacaactactctcaggatcagggcaagttcatctctctcttctacaccatcattacacccatgatcaaccccctcatatatacactgaggaacaaggatgtgaaaggagcacttaagaaggtgctctggaagaactacgactccagatgacttggagagaaagacattgcagtggaggaactttgaatgccagagcccttaagatgtatgcgttctccatgtgtcatccaaaatttcccctgcaactctccaggaaatttctttacataaatctctaaggaaaacaagtaattaaaatctaagttcatgaatttatttcaccctccagagatgttgatttcatattccag

SEQ ID NO: 108 - protein, 254 aa, Homo sapiens
MYFFFSNLSFLDLCYTTGIVPQLLVNLRGADKSISYGGCVVQLYISLGLGSTECVLLGVMAFDRYAAVCRPLHYTVVMHPCLYVLMASTSWVIGFANSLLQTVLILLLTLCGRNKLEHFLCEVPPLLKLACVDTTMNESELFFVSVIILLVPVALIIFSYSQIVRAVVRIKSATGQRKVFGTCGSHLTVVSLFYGTAIYAYLQPGNNYSQDQGKFISLFYTIITPMINPLIYTLRNKDVKGALKKVLWKNYDSR

SEQ ID NO: 109 - DNA, 1030 bp, Homo sapiens
  source (1)..(1030)
  CDS (201)..(830)
agatcctcgcctccatacccctatgtatttcttcctctccaatctctcttttatggatctttgtttgaccacttgtactgtccctcagacactggtcaactttaaggggaaggacaagaccatcacctatggtggctgcgtgacccagctattcattgccttgggactcggggggagtggagtgtgtcttattgtctgccatggcctatgaccgctatgcagccgtctgccgcccactccactacatggtgagcatgcatccccaactttgcttgcagttggttgtaaccacttggctcacagggtttggcaattctgtgatacagacagcattgaccatgactctccccctctgtgataaaaaccaagtggatcatttcttctgtgaagttccagtgatgctgaaactgtcctgcaccaacacctccatcaacgaggctgaaatctttgctgtcagtgtcttcttcttggtggtgcctctctcactcatcttagcatcctatggtcacattactcatgcagtcctgaagataaagtcagctcaagggaggcagaaggcttttggaacctgtggttctcacctcctggtagtgatcattttctttgggacactcatctccatgtacctccagcctccctccagttattcacaggatgtgaacaaaagcattgcactcttctatactctggtgactcctctactgaatcccctaatttacactctgaggaacaaggaagtcaaaggggcaactaagaagactagtggggaggaccatagatgcatgagaaagttaacgcagggtttgcagttccaaacatttgtgcactagaagactgctgagaagctacaaactagttttaactgaattcaacaaatcttcctaaagcatctactgtgtaccaggcactgtttaggtacttgagatatacacagatatatagatatcagtgagtgaaacagagacccctgtcctcatgaagttaaccttatggggagagcataagttaagtaagataagctaaaattaaa

SEQ ID NO: 110 - protein, 209 aa, Homo sapiens [sequence omitted]

SEQ ID NO: 111 - DNA, 1339 bp, Homo sapiens
  source (1)..(1339)
  CDS (201)..(1139)
tgttactttttgtaataatgtaaacaaaattggtatatgttggtctcaatgagtacctcatttattaaagtagttgcatataaaatcccatggccatgtcttgtacaaatgatagagttcaccttttcttttgttttacaagataccttttaaaatttgctaaatgcttgggtttgacagaaaacatgtgctaacaaagaatggatcagaaaaatggaagttctttcactggatttatcctactgggtttctctgacaggcctcagctggagctagtcctctttgtggttcttttgatcttctatatcttcactttgctggggaacaaaaccatcattgtattatctcacttggacccacatcttcacactcctatgtattttttcttctccaacctaagctttttggatctgtgttacacaaccggcattgttccacagctcctggttaatctcaggggagcagacaaatcaatctcctatggtggttgtgtagttcagctgtacatctctctaggcttgggatctacagaatgcgttctcttaggagtgatggtatttgaccgctatgcagctgtttgcaggcccctccactacacagtagtcatgcacccttgtctgtatgtgctgatggcttctacttcatgggtcattggttttgccaactccctattgcagacggtgctcatcttgcttttaacactttgtggaagaaataaattagaacactttctttgtgaggttcctccattgctcaagcttgcctgtgttgacactactatgaatgaatctgaactcttctttgtcagtgtcattattcttcttgtacctgttgcattaatcatattctcctatagtcagattgtcagggcagtcatgaggataaagttagcaacagggcagagaaaagtgtttgggacatgtggctcccacctcacagtggtttccctgttctacggcacagctatctatgcttacctccagcccggcaacaactactctcaggatcagggcaagttcatctctctcttctacaccatcattacacccatgatcaaccccctcatatatacactgaggaacaaggatgtgaaaggagcacttaagaaggtgctctggaagaactacgactccagatgacttggagagaaagacattgcagtggaggaactttgaatgccagagcccttaagatgtatgcgttctccatgtgtcatccaaaatttcccctgcaactctccaggaaatttctttacataaatctctaaggaaaacaagtaattaaaatctaagttcatgaatttatttcaccctccagagatgttcatttcctattccag

SEQ ID NO: 112 - protein, 312 aa, Homo sapiens
MDQKNGSSFTGFILLGFSDRPQLELVLFVVLLIFYIFTLLGNKTIIVLSHLDPHLHTPMYFFFSNLSFLDLCYTTGIVPQLLVNLRGADKSISYGGCVVQLYISLGLGSTECVLLGVMVFDRYAAVCRPLHYTVVMHPCLYVLMASTSWVIGFANSLLQTVLILLLTLCGRNKLEHFLCEVPPLLKLACVDTTMNESELFFVSVIILLVPVALIIFSYSQIVRAVMRIKLATGQRKVFGTCGSHLTVVSLFYGTAIYAYLQPGNNYSQDQGKFISLFYTIITPMINPLIYTLRNKDVKGALKKVLWKNYDSR

SEQ ID NO: 113 - DNA, 1123 bp, Homo sapiens
  source (1)..(1123)
  CDS (201)..(923)
agatcataacagatatatatatatatatctttaatatttagccatctaaaagccaaaaatgtaaaacttgtgaggttgaatcatgcaaaacaacaatactctccctccagatattcttggcttggtaagaaaattctgagctggaaggattctgattgtgattagtgttccatacattattttgtcttttgtctgaagcaatgctgaatacaacctcagtcactgaatttctccttttgggagtgacagacattcaagaactgcagccttttctcttcgttgttttccttaccatctacttcatcagtgtggctgggaatggagccattctgatgattgtcatctctgatcctagactccattcccctatgtatttcttcctgggaaacctgtcctgcctggacatctgctactccagcgtaacactgccaaaaatgctgcagaacttcctctctgcacacaaagcaatttctttcttgggatgcataagccaactccatttcttccacttcctgggcagcacagaggccatgttgttggccgtgatggcatttgaccgctttgtggctatttgcaagccacttcgctacactgtcattatgaaccctcagctctgtacccagatggccatcacaatctggatgattggttttttccatgccctgctgcactccctaatgacctctcgcttgaacttctgtggttctaaccgtatctatcacttcttctgtgatgtgaagccattgctaaagctgagcttaatcagtggctgctcagtactgtcacagggacaatcgccatgggccccttctttctcacattactctcctatttctacattatcacccatctcttcttcaagactcattcttttagcatgctccgcaaagcactgtccacttgtgcctcccacttcatggtagttattcttttgtatgcacctgttctcttcacctatattcatcatgcctcagggacctccatggaccaggaccggatcactgccatcatgtatactgtggtcactccagtactaaacccactgatctacactttgaggaacaaggaagtgaaaggggcctttaatagagcaatgaaaaggtggctttggcctaaagaaatc

SEQ ID NO: 114 - protein, 240 aa, Homo sapiens
MLNTTSVTEFLLLGVTDIQELQPFLFVVFLTIYFISVAGNGAILMIVISDPRLHSPMYFFLGNLSCLDICYSSVTLPKMLQNFLSAHKAISFLGCISQLHFFHFLGSTEAMLLAVMAFDRFVAICKPLRYTVIMNPQLCTQMAITIWMIGFFHALLHSLMTSRLNFCGSNRIYHFFCDVKPLLKLSLISGCSVLSQGQSPWAPSFSHYSPISTLSPISSSRLILLACSAKHCPLVPPTSW

SEQ ID NO: 115 - DNA, 1066 bp, Homo sapiens
  source (1)..(1066)
  CDS (201)..(866)
attttacacttagttggataaacagataaaacattagaacaatggtgaaatataaaatacttatattttctttcaatcccattatgtacttttcctagctatatatactgctaatattatatctaaatatattcattatggcttccaaaatgttgactattttttaaattttcacagctgatattcagaaaatagcaaaaatgatcaatgatagttactttggttggcttatgctccttgggttccctgggaagcctcagctggagatgatcatctctggggttgtctttttcttctatgcaatttctttgatgggaaatatggtccttatcctgctgccattactggataaacatctccaaacccccatatatttctttcttagaaatctggctatcttggatctttgttacaccacaaatatagtcccacagatgttggtcaatgcctggggtaaagacaagaaaatcacttttggtggctgtgcttttcaacttttcactaatgtgacgctatgcacggttgaatgtatgcttctggctgtgatgtcatatgacccattcaatgctgtctgcaagcctctggactatatgaccataatgaacccccaactctgtcaaggcctggtggccatgacctggttaattggtgtcactaattgcatgatactttccccctgtcctgtgagtcttcctcgatgcggagaccaccacctggatcactatttttgtgaaatatctgcaatggtcaaaattgcatgtggggctaccacagtcatggaggaaactgtaagagttaaagaaagaagaaagaaacacgaaacgtggctggcagttaaagacaggttttccttaattaaaacctgacagcactcctggctgatttcatatattggttttagggtgagggggctaagaacatatattggttttagggtgagggggcttattacaagcttggaatgtttatgtgtgtggagaagtttatggcggggttggaatctctctgggaagaggggaggttatcttggggcagacatctttctggcctggaggggggttatctc

SEQ ID NO: 116 - protein, 221 aa, Homo sapiens [sequence omitted]

SEQ ID NO: 117 - DNA, 1219 bp, Homo sapiens
  source (1)..(1219)
  CDS (201)..(1019)
tgtactggaaccatcacaggcttttgaggaactacttttgaaccgttccccagagaggcatttgccccagtagctatgattataatttgcaatgacagccacagtgatttcatccttctgggcttctctaacaagccacatttggagaagatactttttggatcatttttattttttattttttgactcttgcaggaaatatggtcatagttcttgtgtccttgaaggatccaaaactccacatccctatgtatttctttctttccaacctttccttggtagacctctgtttgaccagcagctgtgttccacagatgttgattaacttctggggcccagaaaagaccatcagctacattggctgtgccattcaactctatgtttttttgtggcttggggccacggaatatgtccttcttgttgtcatggctgtggattgttatgtagcagtgtgtcatccactgcaaaataccatgatcatgcacccaaaactttgtctgcagctggctatcttggcatgggggactggcttggcccagtctctgatccagtcccctgccaccctccggttacccttctgctcccagcggatggtggatgatgttgtttgtgaagtcccagctctgattcagctctccagtactgatactacctacagtgaaattcagatgtctatcgccagtgttgtcctcctggtgatgcccttgatcattatcctttcctcttctggtgctattgctaaggctgtgctgagaattaagtcaactgcaggacagaagaaagcatttggcacctgcatctctcaccttcttgtggtttctctcttttatggcactgtcacaggtgtctaccttcaaccaaaaaatcactatcctcatgaatggggcaaatttctcactcttttctacactgtagtaaccccaactcttaatcccctcatctacactctaaggaacaaggaggtaaagggagcactaataagattggggaggaggacctgggattcccagaataactaacaaggttaacatatgtttacctttgcttaacctaagaatagagaacaacctcatcacaaaaagctggagatacacctcctaagccaaaagtaggagagaaagagctgcattctgttcaggttgagatttcagtttccttcatcaatcaattgggcccttaaattcttcatattgtggatttagacacagtatggtataaa

SEQ ID NO: 118 - protein, 272 aa, Homo sapiens [sequence omitted]

SEQ ID NO: 119 - DNA, 967 bp, Homo sapiens
  source (1)..(967)
  CDS (201)..(767)
actttttatatcagtacgagctttataattcttcttttgttaagttcattactactaatggttaaattgtcctacaattaaatgatggcaagcccttcaaactggattttattttttttacgtatcctgatgttttttggagcatttgtttactgctttttgagtttacctgattttttttttctctcaggtaataggaaatgaatgatgatggaaaagtcaatgctagctctgaggggtactttattttagttggattttctaattggccttatctggaagtagttctctttgtggttattttgatcttctgcttgatgacactgataggaaacctgttcatcatcatcctgacgtacctggactcccatctccatactcccttgtatttcttcctttcaaatctctcatttctggatctctgctacaccaccagctctatccctcagttgctggtcagtctctggggtgtggaaaagaccatttcttatgctggttgcatggttcaactttacttttttctcacactgggaaccacagagtgtgtcctactggtggtgatgtcctatgaccgttatgcagctgtgtgtagacctttgcattacactgtcctcatgcactctcgtttctgccacttgttggctgtggcttcttgggtaagtggttttacaaacccagcacttcattcctccttcaccttctgggtacctctgtgtggacaccgccaaatagatcactttttctgtgaagttccggcacttttatgattatcatttgtcaatacccgtgaaaataaactgaccctcatgatcacaagctccatttttgttctgctacttctcaccctcattttcacttcctatggtgctattgcccaggctgtactgaggatgcagtcaaccactgggcttcagaaagtatttggaacatgtggagctcatcatatggttgtatctctctttttcat

SEQ ID NO: 120 - protein, 188 aa, Homo sapiens
MNDDGKVNASSEGYFILVGFSNWPYLEVVLFVVILIFCLMTLIGNLFIIILTYLDSHLHTPLYFFLSNLSFLDLCYTTSSIPQLLVSLWGVEKTISYAGCMVQLYFFLTLGTTECVLLVVMSYDRYAAVCRPLHYTVLMHSRFCHLLAVASWVSGFTNPALHSSFTFWVPLCGHRQIDHFFCEVPALL

SEQ ID NO: 121 - DNA, 1207 bp, Homo sapiens
  source (1)..(1207)
  CDS (201)..(1007)
tcattttcagataaaaactcaaattttctgacctttctatcacacttcagtccttgacagacttccattaaggaatgggagtcaaccaatcatgggtcacagaattcatcctggtgggattccagctcagtgccgagatggaagtgctcctcttttagatcttctccctgttatacatcttcagcctgctggcaaatggcatgatcttgggactcatctgtctggaccacattctgcctacccccatgtacttcttcctctcacacctggccatcattgacatgtcctatgcttccaacaatgttcccaagatgttggcaaatctgatgaacaagaaaagaaccatctcctttcttccatgcataatgcagacctatttgtatttctcttttgctgctacagagtgtctgattttggtggtgatgtcctatgataggtatgtggccatttgccaccctctccagtacactgtcatcatgagctggagagtgtgcacgatcctggctctcacatcctggtcatgtgggtttgccctgtccctggtacatgcaattcttcttctaaggttgccgttctgcgggccccgggatgtgaaccacctcttctgtgaaattctgtctgtcctcaagctggcctgttctgacacctgggttaaccaagtggtcatatttgctacctgtgtgtttgtcttagttggacctctttgtttgatgcttgtctcctacatgcacatcctctgggccatcctaaagatccagacaaaggaaggccgcataaaggccttctcgacctgctcctcccacctgtgtgtggttggactcttctttggcatagccatggtggtttacatagtcccagactctaatcaacgagaggagcaggagaaaatgctgtccctgtttcacagtgtcttgaacccaattctgaaccccctgatctacagtctgaggaatgctcaggtgaagggcgccctccacagagcactgcagaggacgctgtctatgtaaggagtggacagagtgttagttggataggactttgcttttaaacaagtggtttgctaaagcaaaaactgataaatttttttcagttagaagtttgatataaatatgggaatttttcgaattctggctctgaaaatacgacaagattacagtgaaaaaaacagcacattatattttacactacctttcccactgaaaactct

SEQ ID NO: 122 - protein, 268 aa, Homo sapiens [sequence omitted]

SEQ ID NO: 123 - DNA, 985 bp, Homo sapiens
  source (1)..(985)
  CDS (201)..(785)
tggactccagactccacacccccatgtacttcttcctctcacacctggccgtcgtcaacatcgcctatgcctgcaacacagtgccccagatgctggtgaacctcctgcatccagccaagcccatctcctttgctggctgcatgacatagacctttctctttttgagttttgcacatactgaatgcctcctgttggtgctgatgtcctacgatcggtacgtggccatctgccaccctctccgatatttcatcatcatgacctggaaagtctgcatcactctggccatcacttcctggacatgtggctccctcctggctatggtccatgtgagcctcatcctaagactgcccttttgtgggcctcgtgaaatcaaccacttcttctgtgaaatcctgtctgtcctcaggctggcctgtgctgatacctggctcaaccaggtggtcatctttgcagcctgcatgttcatcctggtgggaccactctgcctggtgctggtctcctactcacacatcctggcggccatcctgaggatccagtctggggagggccgcagaaaggccttctccacctgctcctcccacctctgcgtagtgggactcttctttggcagcgccatcgtcatgtacatggcccctaagtcccgccatcctgaggagcagcagaaggtcctttttctattttacagttctttcaacccgatgctaaaccccctgatttacaacctgaggaatgtagaggtcaagggtgccctgaggagagcactgtgcaaggaaagtcattcctaagaggtgtgacatttgaactgccagcctcagttgtcacgtggactcttgatgcccaattattgcctcaatccagaaaagtttacttctctttatctgtgctttactgacagaagggcaagtcttctctcgttttttgcagataaaattttagatgtgttgcattcattgggtttctatgagatgtggttttatcagacaat

SEQ ID NO: 124 - protein, 194 aa, Homo sapiens
MSYDRYVAICHPLRYFIIMTWKVCITLAITSWTCGSLLAMVHVSLILRLPFCGPREINHFFCEILSVLRLACADTWLNQVVIFAACMFILVGPLCLVLVSYSHILAAILRIQSGEGRRKAFSTCSSHLCVVGLFFGSAIVMYMAPKSRHPEEQQKVLFLFYSSFNPMLNPLIYNLRNVEVKGALRRALCKESHS

SEQ ID NO: 125 - DNA, 1330 bp, Homo sapiens
  source (1)..(1330)
  CDS (201)..(1130)
acatgtatgtattcttattattccattgatacaatgcgatttttttctcatttttatgagcacacttggttagttttggcaacatatctgagaataaattctagaaaattcattcaaagttataatttctaagtgctccctctgtgcatctttgactggcccacagctctgaccttcctgtcctagatgtccacaagagcatggaaggcaacaagacatggatcacagacatcaccttgccgcgattccaggttggtccagcactggagattctcctctgtggacttttctctgccttctatacactcaccctgctggggaatggggtcatctttgggattatctgcctggactgtaagcttcacacacccatgtacttcttcctctcacacctggccattgttgacatatcctatgcttccaactatgtccccaagatgctgacgaatcttatgaaccaggaaagcaccatctccttttttccatgcataatgcagacattcttgtatttggcttttgctcacgtagagtgtctgattttggtggtgatgtcctatgatcgctatgcggacatctgccaccccttacgttacaatatcctcatgagctggagagtgtgcactgtcctggctgtggcttcctgggtgttcagcttcctcctggctctggtccctttagttctcatcctgaggctgcccttctgcgggcctcatgaaatcaaccacttctgtgaaatcctgtctgtcctcaagttggcctgtgctgacacctggctcaaccaggtggtcatctttgcagcctgcgtgttcatcctggtggggccactctgcctggtgctggtctcctacttgcgcatcctggccgccatcttgaggatccagtctggggagggccgcagaaaggccttctccacctgctcctcccacctttgcgtggtgggactcttctttggcagcgccattgtcacgtacatggcccccaagtcccgccatcctgaggagcagcagaaagttctttccctgttttacagccttttcaatccaatgctgaaccccctgatatatagcctaaggaatgcagaggtcaagggcgccctgaggagggcactgaggaaggagaggctgacgtgagacatctcaaagggaaccatggggagggagccttgctccctgcaaaatatagaagttggcttttttttttgtcttctgctagaataaatgctaccttaaactggaatactatagacctatacatataaactgaagacacaaatcttttagaaaagataggtaaatgcatttataatcctggataggcataaattcataaa

SEQ ID NO: 126 - protein, 309 aa, Homo sapiens
MEGNKTWITDITLPRFQVGPALEILLCGLFSAFYTLTLLGNGVIFGIICLDCKLHTPMYFFLSHLAIVDISYASNYVPKMLTNLMNQESTISFFPCIMQTFLYLAFAHVECLILVVMSYDRYADICHPLRYNILMSWRVCTVLAVASWVFSFLLALVPLVLILRLPFCGPHEINHFCEILSVLKLACADTWLNQVVIFAACVFILVGPLCLVLVSYLRILAAILRIQSGEGRRKAFSTCSSHLCVVGLFFGSAIVTYMAPKSRHPEEQQKVLSLFYSLFNPMLNPLIYSLRNAEVKGALRRALRKERLT

SEQ ID NO: 127 - DNA, 1333 bp, Homo sapiens
  source (1)..(1333)
  CDS (201)..(1133)
aactacagattttaaatatctctaaaagccaaatttgtaagtcaacatcataggactttgggctggatgtacccatgaaatactgatttgtggcctctggcataaaattcatgctctataatgaaatgttttttattttctcccattagctgtgaaatttctgtcttaagtacatcacaagatttttctgtcacgagaacatggaaagcaatcagacctggatcacagaagtcatcctgttgggattccaggtggacccagctctggagttgttcctctttgggtttttcttgctattctacagcttaaccctgatgggaaatgggattatcctggggctcatctacttggactctagactgcacacacccatgtatgtcttcctgtcacacctggccattgtggacatgtcctatgcctcgagtactgtccctaagatgctagcaaatcttgtgatgcacaaaaaagtcatctcctttgctccttgcatacttcagacttttttgtatttggcgtttgctattacagagtgtctgattttggtgatgatgtgctatgatcggtatgtggcaatctgtcaccccttgcaatacaccctcattatgaactggagagtgtgcactgtcctggcctcaacttgctggatatttagctttctcttggctctggtccatattactcttattctgaggctgcctttttgtggcccacaaaagatcaaccactttttctgtcaaatcatgtccgtattcaaattggcctgtgctgacactaggctcaaccaggtggtcctatttgcgggttctgcgttcatcttagtggggccgctctgcctggtgctggtctcctacttgcacatcctggtggccatcttgaggatccagtctggggagggccgcagaaaggccttctctacctgctcctcccacctctgcgtggtggggcttttctttggcagcgccattgtcatgtacatggcccccaagtcaagccattctcaagaacggaggaagatcctttccctgttttacagccttttcaacccgatcctgaaccccctcatctacagccttaggaatgcagaggtgaaaggggctctaaagagagtcctttggaaacagagatcaatgtgaagaatcatttgagatatcctgagtgtgtaagcatggttctcatgaccctgggtcctgaaatttcctttttaattctttaatttaccacacccaatactgtttatctttagacttcttataaaaagagaaactggcctggcgtggtggctgaagcctgtaatcccaacactttgggaggctgacctgggcggattacctga

SEQ ID NO: 128 - protein, 310 aa, Homo sapiens
MESNQTWITEVILLGFQVDPALELFLFGFFLLFYSLTLMGNGIILGLIYLDSRLHTPMYVFLSHLAIVDMSYASSTVPKMLANLVMHKKVISFAPCILQTFLYLAFAITECLILVMMCYDRYVAICHPLQYTLIMNWRVCTVLASTCWIFSFLLALVHITLILRLPFCGPQKINHFFCQIMSVFKLACADTRLNQVVLFAGSAFILVGPLCLVLVSYLHILVAILRIQSGEGRRKAFSTCSSHLCVVGLFFGSAIVMYMAPKSSHSQERRKILSLFYSLFNPILNPLIYSLRNAEVKGALKRVLWKQRSM

SEQ ID NO: 129 - DNA, 1357 bp, Homo sapiens
  source (1)..(1357)
  CDS (201)..(1157)
agaggatttttttaatttcatgagcataattgagttggttccagtaacatatttgaaaacaaattcaacaaagaatccattcaaaataatacatttcttaatgctccctctgaaacactcagcaaatattgtgcatctttgacccacagctctgaccttcctgtcctagatgagggtttgtctttctctgccacaagagcatggaaggcaaccagacatggatcacagacatcaccctgctgggattccaggttggtccagcactggcgattctcctctgtggactcttctctgtcttctatacactcaccctgctggggaatggggtcatctttgggattatctgcctggactctaagcttcacacacccatgtacttcttcctctcacacctggccatcattgacatgtcctatgcttccaacaatgttcccaagatgttggcaaacctaatgaaccagaaaagaaccatctcctttgttccatgcataatgcagacttttttgtatttggcttttgctgttacagagtgcctgattttggtggtgatgtcctatgataggtatgtggccatctgccaccctttccagtacactgtcatcatgagctggagagtgtgcacgatcctggttctcacgtcctggtcatgtgggtttgccctgtccctggtacatgaaattctccttctaaggttgcccttctgtgggccccgggatgtgaaccacctcttctgtgaaattctgtctgtcctcaagctggcctgtgctgacacctgggttaaccaagtggtcatatttgctacctgtgtgtttgtcttagtcgggcctctttccttgattctggtctcctacatgcacatcctcggggccatcctgaagatccagacaaaggagggccgcataaaggccttctccacctgctcctcccacctgtgtgtggttggactattctttggcatagccatggtggtttacatggtcccagactctaatcaacgagaggagcaggagaaaatgctgtccctgtttcacagtgtcttgaacccaatgctgaaccccctgatctacagcctgaggaatgctcagttgaagggcgccctccacagagcactccagaggaagaggtccatgagaacggtgtatgggctttgcctttaaaacatgtggtttgctgaagcaagaattttgaatatattttgcagaagaagtttaatataaaaatggtgagtgattgaattcaagctttgaaaatagggcaatattcaatggaatgtatgttctctaaaatcgaggaatcatctcagtagataggagagcaaattatcagaatatttagcctttcctttaaaagtggttag

SEQ ID NO: 130 - protein, 318 aa, Homo sapiens
MEGNQTWITDITLLGFQVGPALAILLCGLFSVFYTLTLLGNGVIFGIICLDSKLHTPMYFFLSHLAIIDMSYASNNVPKMLANLMNQKRTISFVPCIMQTFLYLAFAVTECLILVVMSYDRYVAICHPFQYTVIMSWRVCTILVLTSWSCGFALSLVHEILLLRLPFCGPRDVNHLFCEILSVLKLACADTWVNQVVIFATCVFVLVGPLSLILVSYMHILGAILKIQTKEGRIKAFSTCSSHLCVVGLFFGIAMVVYMVPDSNQREEQEKMLSLFHSVLNPMLNPLIYSLRNAQLKGALHRALQRKRSMRTVYGLCL

SEQ ID NO: 131 - DNA, 1051 bp, Homo sapiens
  source (1)..(1051)
  CDS (201)..(851)
gacgttccttgtgaattgcttgcatctagcattaacggctggtttttatcttttatttttccaatcctctttccttctcaaggtgtccaagacacacagagccacggaatctcacaggtgtctgagaattcctcctcctgggactctcagaggatccagaactgcagccggtcctcgctttgctgtccctgtccctgtccatgtatctggtcacggtgctgaggaacctcctcagtatcctggctgtcagctctgactcccccctccacacccccatgtacttcttcctctccaacctgtgctgggctgacatcggtttcacctcggccatggttcccaagatgattgtggacatgcagtcgcatagcagagtcatctctcatgagggctgcctgacacagatgtttttcttggtcctttttgcatgtatagaaggcatgatcctgactgtgatggcctatgactgctttgtagccatctgtcgccctctgaattacccagtcatcgtgaatcctcacctctgtgtcttcttcattttgatgtcctttttccttagcctgttggattcccagctgcacagttggattgtgttacaattcacaatcatcaagaatgtggaaatctctaattttgtctgtgacccctctcaacttctcaaacttgcctgttctgacagcgtcatcaatagcatattcacatatttccatagtactatgtttgcttttcttcccatttcagcaatccttttatcttactataaaatcgtcacctccattctcaggatttcatcttcagatgggaagtataaagccttctccacctgtgactctcacctagcagttgtttgctgattttatggaacagacattgggatgtacctgacttcagctgtgtcaccacctcccaggaatggtgtagtggcgtcaatgatgtacgctgtggtcacccccatgctgaaccttttcatctacagcctgagaaacagggacatacaaagtgccttgcggaggctgcgcagcagaacagtcgaatctcatgatctgttccatcc

SEQ ID NO: 132 - protein, 216 aa, Homo sapiens
MYLVTVLRNLLSILAVSSDSPLHTPMYFFLSNLCWADIGFTSAMVPKMIVDMQSHSRVISHEGCLTQMFFLVLFACIEGMILTVMAYDCFVAICRPLNYPVIVNPHLCVFFILMSFFLSLLDSQLHSWIVLQFTIIKNVEISNFVCDPSQLLKLACSDSVINSIFTYFHSTMFAFLPISAILLSYYKIVTSILRISSSDGKYKAFSTCDSHLAVVC

SEQ ID NO: 133 - DNA, 1156 bp, Homo sapiens
  source (1)..(1156)
  CDS (201)..(956)
gggatgtacaacttctgagatattgggagtgatgtcatcctctcccctctggaagttagggacaatatcacaggggtagtgtacaccctctgggatgttgggactaatatctcacaggtgtctgagaattcctcctcctgggactctcagaggatccacaactgcagccggccctcgctttgctgtccctgtccctgtccatgtatctggtcacggtgctgaggaacctgttcagcatcctggctgtcagctctgactgccccctccacacccccatgtacttcttcctctccaacctgtgctggcctgacatcggtttcacctcggccatggttcccaagatgattgtggacacgcagtcgcatagcagagtcatctctcatgcgggctgcctgacacagatgtctttcctgctccttgttgcatgtatagaaggcatgctcctgactgtgatggcctatgactgctttgtagccatctgtcgccctctgcactacccagtcatcgtgaatcctcacctctgtgtctttttcgttttggtgtcctttttccttagcctgttggattcccagctgcacagttggattgtgttacaattaaccatcatcaagaatgtggaaatctctaatttggtctgtgacccctctcaacttctcaatcttgcctgttctgacagcgtcatcaataacatattcatatatttcgatagtactatgtttggttttcttcccatttcagggatctttttgtcttactataaaattgtcccctccattctaaggatttcatcgtcagatgggaagtataaagccttctccacctgtggctgtcatctagcagttgtttgctggttttatggaacaggcattggcatgtacctgacttcagctgtgtcaccaccccccaggaatggtgtggtggcttcagtgatgtacgctgtggtcaccccatgctgaaccttttcatctgcagcctgagaaacagggacatacaaagtgccctgcggaggctgggcagcagagcattcgaatctcatgatctgttccatcctttttcttgtgtgggtgagaaagggcaatcacattaaatctctttatctgcaaatcctgcccctcagtcacattctttttgtggcttgatggcttttattcctttc

SEQ ID NO: 134 - protein, 251 aa, Homo sapiens
MYLVTVLRNLFSILAVSSDCPLHTPMYFFLSNLCWPDIGFTSAMVPKMIVDTQSHSRVISHAGCLTQMSFLLLVACIEGMLLTVMAYDCFVAICRPLHYPVIVNPHLCVFFVLVSFFLSLLDSQLHSWIVLQLTIIKNVEISNLVCDPSQLLNLACSDSVINNIFIYFDSTMFGFLPISGIFLSYYKIVPSILRISSSDGKYKAFSTCGCHLAVVCWFYGTGIGMYLTSAVSPPPRNGVVASVMYAVVTPC

SEQ ID NO: 135 - DNA, 1156 bp, Homo sapiens
  source (1)..(1156)
  CDS (201)..(956)
gggatgtacaacttctgagatattgggagtgatgtcatcctctcccctctggaagttagggacaatatcacaggggtagtgtacaccctctgggatgttgggactaatatctcacaggtgtctgagaattcctcctcctgggactctcagaggatccagaactgcagccggccctcgctttgctgtccctgtccctgtccatgtatctggtcacggtgctgaggaacctgttcagcatcctggctgtcagctctgactgccccctccacacccccatgtacttcttcctctccaacctgtgctggcctgacatcggtttcacctcggccatggttcccaagatgattgtggacacgcagtcgcatagcagagtcatctctcatgcgggctgcctgacacagatgtctttcctgctccttgttgcatgtatagaaggcatgctcctgactgtgatggcctatgactgctttgtagccatctgtcgccctctgcactacccagtcatcgtgaatcctcacctctgtgtcttcttcgttttggtgtcctttttccttagcctgttggattcccagctgcacagttggattgtgttacaattaaccatcatcaagaatgtggaaatctctaatttggtctgtgacccctctcaacttctcaaacttgcctgttctgacagtgtcatcaataacatattcatatatttcgatagtactatgtttggttttcttcccatttcagggatctttttgtcttactataaaattgtcccctccattctaaggatttcatcgtcagatgggaagtataaagccttctccacctgtggctgtcatctagcagttgtttgctggttttatggaacaggcattggcatgtacctgacttcagctgtgtcaccaccccccaggaatggtgtggtggcatcagtgatgtacgctgtggtcaccccatgctgaaccttttcatctgcagcctgagaaacagggacatacaaagtgccctgcggaggctgggcagcagagcattcgaatctcatgatctgttccatcctttttcttgtgtgggtgagaaagggcaatcacattaaatctctttatctgcaaatcctgccccttagtcacattctttttgtggcttgatggtttttattcctttc

SEQ ID NO: 136 - protein, 251 aa, Homo sapiens
MYLVTVLRNLFSILAVSSDCPLHTPMYFFLSNLCWPDIGFTSAMVPKMIVDTQSHSRVISHAGCLTQMSFLLLVACIEGMLLTVMAYDCFVAICRPLHYPVIVNPHLCVFFVLVSFFLSLLDSQLHSWIVLQLTIIKNVEISNLVCDPSQLLKLACSDSVINNIFIYFDSTMFGFLPISGIFLSYYKIVPSILRISSSDGKYKAFSTCGCHLAVVCWFYGTGIGMYLTSAVSPPPRNGVVASVMYAVVTPC

SEQ ID NO: 137 - DNA, 1318 bp, Homo sapiens
  source (1)..(1318)
  CDS (201)..(1118)
cttgtgaattgcttgcatccaaaatatacacacagcattaagggctggtttttatcttttatttttccaatcctcttttcttcccaaggtgtccaagacacacagagccacggaatctcacaggtgtctgagaattcctccttctgggactctcagaggatccagaactgcagaccatccttgctgggctgtccctgtccatgtatctggtcacggtgctgaggaacctgctcagcatcctggctgtcagctctgactcccacccccacacacccatgtacttcttcctctccaacctgtgctgggctgacatcggtttcaccttggccacggttcccaaaatgattgtggacatggggtcgcatagcaaagtcatctcttatgggggctgcctgacacagatgtctttcttggtactttttgcatgtatagtagacatgttcctgactgtgatggcttatgactgctttgtagccatctgtcgccctctgcactacccagtcatcgtgaatcctcacctctgtgtcttcttcgttttggtgtcctttttccttagcctgttggattcccagctgcacagttggattgtgttacaattcaccttcttcaagaatgtggaaatctctaattttgtctgtgagccatctcaacttctcaagcttgcctcttatgacagcgtcatcaatagcatattcatatattttgataatactatgtttggttttcttcccatttcagggatccttttgtcttactataaaattgtcccctccattctaaggatttcatcatcagatgggaagtacaaagccttctcagcctgtggctgtcacctggcagttgtttgcttattttatggaacaggcattggcgtgtacctgacttcagctgtggcaccacccctcaggaatggtatggtggcgtcagtgatgtacgctgtggtcacccccatgctgaaccctttcatctacagcctgagaaacagggacattcaaagtgccctgtggagggtgtgcaacaaaacagtcgaatctcatgatctgttccatcctttttcttgtgtggttgagaaagggcaaccacattcaatccctacatctgcaaatcctgccccttagtcacattatttttgtggcttgatggcttttattcctttccgcatttcctttgtgaatgttgctttcttcgttatgcctttaactggaatgggtgaggattctgggatcctttgtttagcaaaaacctcatgacagaatcctctctacctaggcggcctcctttagtttctgagcaataaccctgtcatccaggtgaaatc

SEQ ID NO: 138 - protein, 305 aa, Homo sapiens [sequence omitted]

SEQ ID NO: 139 - DNA, 1051 bp, Homo sapiens
  source (1)..(1051)
  CDS (201)..(851)
aatgttccttgtgaattgcttgcatccagcattaagggctggtttttatcttttatttttccaatcctctttccttctcaaggtgtccaagacacacagagccacggaatctcacaggtgtctgagaattcctcctcctgggactctcagaggatccagaactgcagccagtcctcgctttgctgtccctgtccctgtccatgtatctggtcacggtgctgaggaacttgctgagcatcctggctgtccgctctgagtccccgctccacacaaccatgtacttcttcctctccatcctgtgctgggctgacatcggtttcacctcagccacagttcccaagatgattgtggacatgcagtggtatagcaaagtcatctctcatgcgggctgcctgacacagatgtctttcttggtcctttttgcatgtatagaaggcatgctcctgactgtgatggcctatgactgctttgtaggcatctgtcgccctctgcactacccagtcatcgtgaatcctcatctctgtgtcttctttgttttggtgtcctttttccttagcctgttggattcccagctgcacagttggattgtgttacaattcaccatcatcaagaatgtggaaatctctaattttgtctgtgacccctctcaacttctcaaacttgcctgttctgacagcgtcatcaatagcatcttcatatattttggtagtactatgtttggttttcttcccatttcagggatccttttgtcttactataaaatcgtcccctccattctaaggatttcatcgtcagatgggaagtataaagccttctccacctatggctctcacctagcagttttttgctgatttgatggaacaggcattggcgtgtacctgacttcagctgtggcaccacccctcaaggaatggtgtggtggtgtcagtgaagtaagctgtggtcaccccccatgccgaaccttttcatctacagcctggagaaacagggacatacaaagtgccctgcggaggctgcccaacaaaacagtcgaatctcatgatctgttcca

SEQ ID NO: 140 - protein, 216 aa, Homo sapiens
MYLVTVLRNLLSILAVRSESPLHTTMYFFLSILCWADIGFTSATVPKMIVDMQWYSKVISHAGCLTQMSFLVLFACIEGMLLTVMAYDCFVGICRPLHYPVIVNPHLCVFFVLVSFFLSLLDSQLHSWIVLQFTIIKNVEISNFVCDPSQLLKLACSDSVINSIFIYFGSTMFGFLPISGILLSYYKIVPSILRISSSDGKYKAFSTYGSHLAVFC

SEQ ID NO: 141 - DNA, 1051 bp, Homo sapiens
  source (1)..(1051)
  CDS (201)..(851)
aatgttccttgtgaattgcttgcatccagcattaagggctggtttttatcttttatttttccaatcctctttccttctcaaggtgtccaaaacacacagagccacggaatctcacaggtgtctgagaattcctcctcctgggactctcagaggatccagaactgcagccggtcctcgctttgctgtccctgtccctgtccatgtatctggtcacagtgctgaggaacctgctcagcatcccggctgtcagctctgactcccacctccacacccccacgtacttcttcctctccatcctgtgctgggctgacatcggtttcacctcggccacggttcccaagatgattgtggacatgcagtggtatagcagagtcatctctcatgcgggctgcctgacacagatgtctttcttggtcctttttgcatgtatagaaggcatgctcctgactgtaatggcctatgactgctttgtaggcatctatcgccctctgcactacccagtcatcgtgaatcctcatctctgtgtcttctttgttttggtgtcctttttccttagcctgttggattcccagctgcacagttggattgtgttacaattcaccatcatcaagaatgtggaaatctctaattttgtctgtgacccctctcaacttctcaaacttgcctcttatgacagcgtcatcaatagcatattcatatatttcgatagtacaatgtttggttttcttcctatttcagggatcctttcatcttactataaaattgtcccctccattctaaggatgtcatcgtcagatgggaagtataaaactttctccacctatggctctcacctagcatttgtttgctgattttatggaacaggcattgacatgtacctggcttcagctatgtcaccaacccccaggaatggtgtggtggtgtcagtgatgtaagctgtggtcacccccatgctgaaccttttcatctacagcctgagaaacagggacatacaaagtgccctgcggaggctgcgcagcaaaacagtcgaatctcatgatctgttccatcc

SEQ ID NO: 142 - protein, 216 aa, Homo sapiens
MYLVTVLRNLLSIPAVSSDSHLHTPTYFFLSILCWADIGFTSATVPKMIVDMQWYSRVISHAGCLTQMSFLVLFACIEGMLLTVMAYDCFVGIYRPLHYPVIVNPHLCVFFVLVSFFLSLLDSQLHSWIVLQFTIIKNVEISNFVCDPSQLLKLASYDSVINSIFIYFDSTMFGFLPISGILSSYYKIVPSILRMSSSDGKYKTFSTYGSHLAFVC

SEQ ID NO: 143 - DNA, 1051 bp, Homo sapiens
  source (1)..(1051)
  CDS (201)..(851)
gatgttccttgtgaattgcttgcatccagcattaagggctggtttttatcttttatttttccaatcctctttccttctcaaggtgtccaagacacacagagccacggaatctcacaagtgtctgagaattcctcctcctgggactctcagaggatccagaactgcagccgctcctcgctttgctgtccctgtccctgtccatgcatctggtcatggtgctgaggaacctgctcaacatcctggctgtcagctctgactcccccctccacacccccacgtacttcttcctctccaacctgtgctgggctgacatcggtttcacctcggccacggttcccaatatgattgtggacatgcagtcgcatagcagagtcatctctcatgcggactgcctgacacagatttccttcttgctcctttttgcatgtatagaaggcatgctcctgactgtgatgacctatgactgctttgtagccatctgttgccctctgcactacccagtcatcgtgaatcctcacctctgtgtcttcttcgttttggtgtcctttttccttagcctgttggattcccagctgcacagttggattgtgttacaattcaccatcatcaagaatgtggaaatctctaattctgtctgtgacccctctcaacttctcaaacttgcttgttctgacagcgtcatcaatagcatattcatgcatttccataatactatgtttggttttcttcccatttcagggatccttgtgtcttactataaaatcgtcccctccattcttaggatttcatcgtcagatgggaagtataaagccttctccacctgtggctctcacctagcagttgtttgctgattttatggaacaggcattggcgtgtacttgacttcagctctgtcaccaccccccaggaatggtgtggtggcgtcagtgatgtacgctgtggtcacccccatgctgaaccttttcatctacagcctgagaaacagggacatacaaagtgccctgtggaggctgctcagcagaacagtcgaatctcatgatctgttccatcc

SEQ ID NO: 144 - protein, 216 aa, Homo sapiens [sequence omitted]

SEQ ID NO: 145 - DNA, 1249 bp, Homo sapiens
  source (1)..(1249)
  CDS (201)..(1049)
taggccatattttactgagatcacggatttgttatatatgacgttttggtcttctaatattcttcagtggattttctctaaagtagtatgtacagaaagccttgtacagcaaaaaagtaaatcacgtaataattctgagatttttggaattgtcacagctgagaaacattgctggcggtgtatgctccgcaagtgtgaagatgttccttgtgaattgcttgcatccagcattaagggctggtttttatcttttatttttccaatcctctttccttctcaaggtgtccaagacacagagagccacggaatctcacaggtgtctgagaattcctcctcctgggactctcagaggatccagaactgcagccgtcctcgctttgctgtccctgtccctgtccatgtatctggtcacggtgctgaggaacctgctcagcatcctggctgtccgctctgactcccccctccacacccccatatacttcttcctctccaacctgtgctgggctgacatcggtttcacctcggccacagttcccaagatgattgtggacatgcagtcgcatagcagagtcatctctcatgcaggctgcctgacgcagatgtctttcttggtcctttttgcatgtatagaaggcatgctcctgactgtgatggcctatgactgctttgtagccatctgtcaccctctgcactacccagtcatcgtgaatcctcacctctgtgtcttcttcgttttggtgtcctttttccttagcctgttggattcccagctgcacagttggattgtgttacaattcaccatcatcaagaatgtggaaatctctaattttgtctgtgacccctctcaacttctcaaatttgcctgttctgacagcatcatcaatagcatattcatatatttccatagtactatgtttggttttcttcccatttcagggatccttttgtcttactataaaatcatcccctccattctaaggatttcatcatcagatgggaagtataaagccttctccacctgtggctctcacctagcagttgtttgctgattttatggaacagacattggcatgtacctgacttcagctgtgtcaccaccccccaggaatggtgtggtggcatcagtgatgtacgctgtggtcacccccatgttgaaccttttcatctacagcctgagaaacagggacatacaaagtgccctgtgggggctgcacagcagaacagtcgaatctcatgatctgttccatcc

SEQ ID NO: 146 - protein, 282 aa, Homo sapiens
MFLVNCLHPALRAGFYLLFFQSSFLLKVSKTQRATESHRCLRIPPPGTLRGSRTAAVLALLSLSLSMYLVTVLRNLLSILAVRSDSPLHTPIYFFLSNLCWADIGFTSATVPKMIVDMQSHSRVISHAGCLTQMSFLVLFACIEGMLLTVMAYDCFVAICHPLHYPVIVNPHLCVFFVLVSFFLSLLDSQLHSWIVLQFTIIKNVEISNFVCDPSQLLKFACSDSIINSIFIYFHSTMFGFLPISGILLSYYKIIPSILRISSSDGKYKAFSTCGSHLAVVC

SEQ ID NO: 147 - DNA, 1057 bp, Homo sapiens
  source (1)..(1057)
  CDS (201)..(857)
atcctgctgatgtacctggtgatcctactgggcaatggggtcctcatcctggtgaccatccttgactcccgcctggacacacccatgtacttcttcctggggaacctctccttcctggacatctgctatacaacctcctcatccttgacagcttcctgacccccaggaaaaccatctccttctcagcctgtgcagtacagatgttcctctcccttgccatgggagccacagagtgtgttctcctgagcatgatggcgtttgatcgctacgtggccatctgcaaccccctttggtaccctgaagtcatgaacaaagctacttatgtgcccatggctgctggctcctgggtagctggaagcctcactgccatggtgcagacaccccttgcattgaggctgcccttctgtggagacaacatcatcaatcacttcacctgtgagattctggctgtcctgaagttggcctgtgctgatatctctgtcaatgtgatcagtatgggagtggccaatgtgatcttcctgggggtccctgttctgttcatctctttctcctatgtcttcatcattgccaccatcctgaggatcccctcagctgaggggaggaaaaaggccttctccacctgctctgcccacctcactgtcgtgatcgtcttctacgggaccatcctcttcatgtacgggaagcccaagtctaaggacccactgggagcagacaaacaggaccttgcagacaaactcatttcccttttctatggggtggtgacccccatgctcaaccccatcatctacagcctgaggaacaaggaagtgaaggctgctgtgaggaacctggtatttcagaaacgcttcctgcagtgatggtggaggggtcctgatggctctgtgcttcctgactgctcccacctgagagtcccagaggacaagatgaaagaccaagttgatcaaaggttacatgggtaaatctcattacacagaatctcattacatagaagggctctgtaggaacaggacacatttaatgcaactccaccaaagtatgttcttgtttgtctagcctc

SEQ ID NO: 148 - protein, 218 aa, Homo sapiens [sequence omitted]

SEQ ID NO: 149 - DNA, 1444 bp, Homo sapiens
  source (1)..(1444)
  CDS (201)..(1244)
aactcaggaacatgtcctcaacagcaggaaaggttccgtctgcatgtgtgtctgatcgtgggtagatcttcacatattggcgatgcggtataggtgcttccatcattcccaatttcattgtattctagtcacacacattactgaagataactggatgtcagaacttcaagcaagcactccttctaatatgtgtcaaaagaatgattgttcagttaatttgtactgtttgtttcttggcagtaaatacatttcatgttagatcttcttttgatttcctgaaagcagatgacatgggtgagattaaccagacacttgtgtcagaatttcttcttctgggtctttctggatacccaaagattgagattgtttactttgctctcattctagttatgtacctagtgattctaattggcaatggtgttctaatcatagccagcatctttgattctcattttcacacaccaatgtacttcttcctgggcaacctctctttcctggatatctgctatacatcctcctctgttccctcaacattggtgagcttaatctcaaagaaaagaaacatttccttctctggatgtgcagtgcagatgttctttgggtttgcaatggggtcaacagaatgtctgcttcttggcatgatggcatttgatcgttatgtggccatctgcaacccactgagataccccatcatcctgagcaaggtggcgtatgtattgatggcttctgtgtcctggctgtccggtggaataaattcagctgtgcaaacattacttgccatgagactgcctttctgtgggaataatattatcaatcatttcgcatgtgaaatattagctgtcctcaagctggcctgtgctgatatatccctcaatattatcaccatggtgatatcaaatatggccttcctggttcttccactgatggtcatttttttctcctatatgttcatcctctacaccatcttgcaaatgaattcagccacaggaagacgcaaggcattttccacgtgctcagctcacctgactgtggtgatcatattttacggtaccatcttctttatgtatgcgaaaccgaagtctcaagacctgattggggaagaaaaattgcaagcattagacaagctcatttctctgttttatggggtagtgacacccatgctgaatcctatactctatagcttgagaaataaggatgtaaaagctgctgtaaaatatttgctgaacaaaaaaccaattcactaatgaaaccaggacatgtaggtctttgtttaacagtcacaaagatggactcttaggtaaatcagcctgaaccttttttggagaaaccatggttagagagacagatttttatcctttgcctttactagccctgctcatctagaatcactgataactatagtttgctacaaactccagcatgccctgatccacgtttcacaaac

SEQ ID NO: 150 - protein, 347 aa, Homo sapiens
MIVQLICTVCFLAVNTFHVRSSFDFLKADDMGEINQTLVSEFLLLGLSGYPKIEIVYFALILVMYLVILIGNGVLIIASIFDSHFHTPMYFFLGNLSFLDICYTSSSVPSTLVSLISKKRNISFSGCAVQMFFGFAMGSTECLLLGMMAFDRYVAICNPLRYPIILSKVAYVLMASVSWLSGGINSAVQTLLAMRLPFCGNNIINHFACEILAVLKLACADISLNIITMVISNMAFLVLPLMVIFFSYMFILYTILQMNSATGRRKAFSTCSAHLTVVIIFYGTIFFMYAKPKSQDLIGEEKLQALDKLISLFYGVVTPMLNPILYSLRNKDVKAAVKYLLNKKPIH

SEQ ID NO: 151 - DNA, 1357 bp, Homo sapiens
  source (1)..(1357)
  CDS (201)..(1157)
gcatagaaactctaaacatcctagtgtggctgtattctaggcacaaatactattgaagataactcaatggcagagctttaaaacaaacagtctctatttcaccctagagtaatgtttattcaagttattttttacatttgttgcttggctgtgaaaatattatacattgggtcttcctttggcatcctgaaagctgggacatggacaagataaaccagacatttgtgagagaattcattcttctgggactctctggttaccccaaacttgagatcattttctttgctctgattctagttatgtacgtagtgattctaattggcaatggtgttctgatcatagcaagcatcttggattctcgtcttcacatgcccatgtacttcttcctgggcaacctctctttcctggatatctgctatacaacctcctccattccctcaacactggtgagcttaatctcaaagaaaagaaacatttccttctctggatgtgcagtgcagatgttctttgggtttgcaatggggtcaacagaatgtttcctccttggcatgatggcatttgatcgttatgtggccatctgtaaccctctgagataccccatcatcatgaacaaggtggtgtatgtactgctgacttctgtatcatggctttctggtggaatcaattcaactgtgcaaacatcacttgccatgcgatggcctttctgtgggaacaatattattaatcatttcttatgcgagatcttagctgtcctaaaattagcttgttctgatatatctgtcaatattgttaccctagcagtgtcaaatattgctttcctagttcttcctctgctcgtgatttttttctcctatatgttcatcctctacaccatcttgcgaacgaactcggccacaggaagacacaaggcattttctacatgctcagctcacctgactgtggtgatcatattttatggtaccatcttctttatgtatgcaaaacctaagtcccaggacctccttgggaaagacaacttgcaagctacagaggggcttgtttccatgttttatggggttgtgacccccatgttaaaccccataatctatagcttgagaaataaagatgtaaaagctgctataaaatatttgctgagcaggaaagctattaaccagtaagatcaaagggatatatgggtcttttatgtataattagcttgccttagccatttgacaatgtacatatgatatggtttggctgtgtccccatccaattcttgaattgtagctcctatagtccccatatgttgtaggattgacctggtgggaggtaactgaaccatgggagtgggtttttcacatgctgctctcgtgatagt

SEQ ID NO: 152 - protein, 318 aa, Homo sapiens
MDKINQTFVREFILLGLSGYPKLEIIFFALILVMYVVILIGNGVLIIASILDSRLHMPMYFFLGNLSFLDICYTTSSIPSTLVSLISKKRNISFSGCAVQMFFGFAMGSTECFLLGMMAFDRYVAICNPLRYPIIMNKVVYVLLTSVSWLSGGINSTVQTSLAMRWPFCGNNIINHFLCEILAVLKLACSDISVNIVTLAVSNIAFLVLPLLVIFFSYMFILYTILRTNSATGRHKAFSTCSAHLTVVIIFYGTIFFMYAKPKSQDLLGKDNLQATEGLVSMFYGVVTPMLNPIIYSLRNKDVKAAIKYLLSRKAINQ

SEQ ID NO: 153 - DNA, 1360 bp, Homo sapiens
  source (1)..(1360)
  CDS (201)..(1160)
acttcctgcttaaatttttcttattagtgacaaatttcttcaatatatattactatcactaacctagagaaccattgaagaacagaacacaagttcatataaataaaacatgccagatatgtgaaggagggggttatgttttatatatgtgtgacgttaatccttctatgcatacgtacaggtgaacataacataaaaaaatgttcccggcaaattggacatctgtaaaagtatttttcttcctgggattttttcactaccccaaagttcaggtcatcatatttgcggtgtgcttgctgatgtacctgatcaccttgctgggcaacatttttctgatctccatcaccattctagattcccacctgcacacccctatgtacctcttcctcagcaatctctcctttctggacatctggtactcctcttctgccctctctccaatgctggcaaactttgtttcagggagaaacactatttcattctcagggtgcgccactcagatgtacctctcccttgccatgggctccactgagtgtgtgctcctgcccatgatggcatatgaccggtatgtggccatctgcaaccccctgagataccctgtcatcatgaataggagaacctgtgtgcagattgcagctggctcctggatgacaggctgtctcactgccatggtggaaatgatgtctgtgctgccactgtctctctgtggtaatagcatcatcaatcatttcacttgtgaaattctggccatcttgaaattggtttgtgtggacacctccctggtgcagttaatcatgctggtgatcagtgtacttcttctccccatgccaatgctactcatttgtatctcttatgcatttatcctcgccagtatcctgagaatcagctcagtggaaggtcgaagtaaagccttttcaacgtgcacagcccacctgatggtggtagttttgttctatgggacggctctctccatgcacctgaagccctccgctgtagattcacaggaaatagacaaatttatggctttggtgtatgccggacaaacccccatgttgaatcctatcatctatagtctacggaacaaagaggtgaaagtggccttgaaaaaattgctgattagaaatcattttaatactgccttcatttccatcctcaaataacaatcacactcatatagataatcaacattacccagaaaactgcataatagtttacttaaaccaaccctggaaactacttattttcaatagaagtttactattatatcctctattctgatttgtcttataagtaaaacttttcatattaacaaatcatttatgaagaataaattaagtttccaagaaagcaattagcattt

SEQ ID NO: 154 - protein, 319 aa, Homo sapiens
MFPANWTSVKVFFFLGFFHYPKVQVIIFAVCLLMYLITLLGNIFLISITILDSHLHTPMYLFLSNLSFLDIWYSSSALSPMLANFVSGRNTISFSGCATQMYLSLAMGSTECVLLPMMAYDRYVAICNPLRYPVIMNRRTCVQIAAGSWMTGCLTAMVEMMSVLPLSLCGNSIINHFTCEILAILKLVCVDTSLVQLIMLVISVLLLPMPMLLICISYAFILASILRISSVEGRSKAFSTCTAHLMVVVLFYGTALSMHLKPSAVDSQEIDKFMALVYAGQTPMLNPIIYSLRNKEVKVALKKLLIRNHFNTAFISILK

SEQ ID NO: 155 - DNA, 1369 bp, Homo sapiens
  source (1)..(1369)
  CDS (201)..(1169)
aagtagctatatcgactaaaccttcatttctttttcagcacatttgcagcaaaatatgtggcaaatgtaagaaaatatgaagacattctctaagtcaaaagaacatctctattatactatgccacagttatcatttcttattccaagacataccatttttttccttcaaatttccctagtgccctccagctgatataaacatgagccctgagaaccagagcagcgtgtccgagttcctcctcctgggcctccccatccggccagagcagcaggccgtgttcttcgccctgttcctgggcatgtacctgaccacggtgctggggaacctgctcatcatgctgctcatccagctagactctcaccttcacacccccatgtacttcttccttagccacttggccctcactgacatctccttttcatctgtcactgtccctaagatgctgatgaacatgcagactcagcacctagccgtcttttacaagggatgcatttcacagacatattttttcatattttttgctgacttagacagtttccttatcacttcaatggcatatgacaggtatgtggccatctgtcatcctctacattatgccaccatcatgactcagagccagtgtgtcatgctggtggctgggtcctgggtcatcgcttgtgcgtgtgctcttttgcataccctcctcctggcccagctttccttctgtgctgaccacatcatccctcactacttctgtgaccttggtgccctgctcaagttgtcctgctcagacacctccctcaatcagttagcaatctttacagcagcattgacagccattatgcttccattcctgtgcatcctggtttcttatggtcacattggggtcaccatcctccagattccctctaccaagggcatatgcaaagccttgtccacttgtggatcccacctctcagtggtgactatctattatcggacaattattggtctctattttcttcccccatccagcaacaccaatgacaagaacataattgcttcagtgatatacacagcagtcactcccatgttgaacccattcatttacagtctgagaaataaagacattaagggagccctaagaaaactcttgagtaggtcaggcgcagtggctcatgcctgtaatctcaacactttgggaggctgaggcagacggatcacctgagatcaggagttcgagaccagcctggccaacatggcgaaacccagtctctactaaaaatacaaaaaaattagccgggcatggtggtgcatgcctatagtcccagctactcgggagactgaggcagaagaatcacttgaacccaggaggcggaggttgcagtgagccaagatcgtgccactgca

SEQ ID NO: 156 - protein, 322 aa, Homo sapiens
MSPENQSSVSEFLLLGLPIRPEQQAVFFALFLGMYLTTVLGNLLIMLLIQLDSHLHTPMYFFLSHLALTDISFSSVTVPKMLMNMQTQHLAVFYKGCISQTYFFIFFADLDSFLITSMAYDRYVAICHPLHYATIMTQSQCVMLVAGSWVIACACALLHTLLLAQLSFCADHIIPHYFCDLGALLKLSCSDTSLNQLAIFTAALTAIMLPFLCILVSYGHIGVTILQIPSTKGICKALSTCGSHLSVVTIYYRTIIGLYFLPPSSNTNDKNIIASVIYTAVTPMLNPFIYSLRNKDIKGALRKLLSRSGAVAHACNLNTLGG

SEQ ID NO: 157 - DNA, 1342 bp, Homo sapiens
  source (1)..(1342)
  CDS (201)..(1142)
ggcattaagcccagaatgcattatatattttttctgatgctcttcctccccacagacccccgataggccccagtgtgtgttgttcctctccctgtgtctatgttaaaacgtacatcttttaatatgactgctaaaaatgataatttcagagcctctaatattctcaagcattcttcatctccatcagagggcaaaggagtatgagccctgagaaccagagcagcgtgtccgagttcctccttctgggcctccccatccggccagagcagcaggctgtgttcttcaccctgttcctgggcatgtacctgaccacggtgctggggaacctgctcatcatgctgctcatccagctggactctcaccttcacacccccatgtacttcttcctcagccacttggctctcactgacatctccttttcatctgtcactgtccctaagatgctgatggacatgcggactaagtacaaatcgatcctctatgaggaatgcatttctcagatgtatttttttatattttttactgacctggacagcttccttattacatcaatggcatatgaccgatatgttgccatatgtcaccctctccactacactgtcatcatgagggaagagctctgtgtcttcttagtggctgtatcttggattctgtcttgtgccagctccctctctcacacccttctcctgacccggctgtctttctgtgctgcgaacaccatcccccatgtcttctgtgaccttgctgccctgctcaagctgtcctgctcagatatcttcctcaatgagctggtcatgttcacagtaggggtggtggtcattaccctgccattcatgtgtatcctggtatcatatggctacattggggccaccatcctgagggtcccttcaaccaaagggatccacaaagcattgtccacatgtggctcccatctctctgtggtgtctctctattatgggtcaatatttggccagtaccttttcccgactgtaagcagttctattgacaaggatgtcattgtggctctcatgtacacggtggtcacacccatgttgaacccctttatctacagccttaggaacagggacatgaaagaggcccttgggaaactcttcagtagagcaacatttttctcttggtgacatctgactttttaaaaaattagaatctcattttggtttatctcatgtatttgattttccatttgaatatgtctcaaaacatgttatgtcctgaagccctaagacaaatgttaacatgttgaatgtaattggtaaatatttgttggccagaattccattctcttattaacaatgttattctttatagtttttggtcagtg

SEQ ID NO: 158 - protein, 313 aa, Homo sapiens
MSPENQSSVSEFLLLGLPIRPEQQAVFFTLFLGMYLTTVLGNLLIMLLIQLDSHLHTPMYFFLSHLALTDISFSSVTVPKMLMDMRTKYKSILYEECISQMYFFIFFTDLDSFLITSMAYDRYVAICHPLHYTVIMREELCVFLVAVSWILSCASSLSHTLLLTRLSFCAANTIPHVFCDLAALLKLSCSDIFLNELVMFTVGVVVITLPFMCILVSYGYIGATILRVPSTKGIHKALSTCGSHLSVVSLYYGSIFGQYLFPTVSSSIDKDVIVALMYTVVTPMLNPFIYSLRNRDMKEALGKLFSRATFFSW

SEQ ID NO: 159 - DNA, 1342 bp, Homo sapiens
  source (1)..(1342)
  CDS (201)..(1142)
ctcttggcgaattatcccattttgagtgataaaaccatctacttgaaatgattttttgtagggacatagcaatgtagacagacattggcatattcatcagtagcaaggatcttattcttatctgctgctgtaaatcaacatttgtttgtttctgcctttttcaatgtccctctatttccagcagagagaagactgtcagcatgaagagggagaatcagagcagtgtgtctgagttcctcctcctggacctccccatctggccagagcagcaggctgtgttcttcaccctgttcttgggcatgtacctgatcacggtgctggggaacctgctcatcatcctgctcatccggctggactctcaccttcacacccccatgttcttcttcctcagccacttggctctcactgacatctccctttcatctgtcactgtcccaaagatgttattaagcatgcaaactcaggatcaatccattctttatgcagggtgtgtaactcagatgtattttttcatatttttcactgatctagacaatttccttctcacttcaatggcatacgatcggtatgtggccatctgtcaccccctccgctacaccactatcatgaaagagggactgtgtaacttactagtcactgtgtcctggatcctctcctgtaccaatgccctgtctcacactctcctcctggcccagctgtccttttgtgctgacaacaccatcccccatttcttctgtgatcttgttgccctactcaagctctcatgctcagacatctccctcaatgagctggtcattttcacagtgggacaggcagtcattactctaccactaatatgcatcttgatctcttatggccacattggggtcaccatcctcaaggctccatctactaagggcatcttcaaagctttgtccacctgtggctctcacctctctgtggtgtctctgtattatggcacaattattggactgtattttctcccctcatccagtgcctccagtgacaaggacgtaattgcctctgtgatgtacacggtgatcaccccattgctgaatcccttcatttatagcctaaggaacagggacataaagggagccctggagagactcttcaacagggcaacagtcttatctcaatgacatttactcttctttataacagacatatgtactgacctatttccagatcatagatccttacttctgatcccagcaagggataagtgctcagtaactctctgatgacttgaattgcatcctgttacagttattctcccttttcctctttagtgcaaattgtgaattctgagtttacataattgtttatttatcttgcctat

SEQ ID NO: 160 - protein, 313 aa, Homo sapiens
MKRENQSSVSEFLLLDLPIWPEQQAVFFTLFLGMYLITVLGNLLIILLIRLDSHLHTPMFFFLSHLALTDISLSSVTVPKMLLSMQTQDQSILYAGCVTQMYFFIFFTDLDNFLLTSMAYDRYVAICHPLRYTTIMKEGLCNLLVTVSWILSCTNALSHTLLLAQLSFCADNTIPHFFCDLVALLKLSCSDISLNELVIFTVGQAVITLPLICILISYGHIGVTILKAPSTKGIFKALSTCGSHLSVVSLYYGTIIGLYFLPSSSASSDKDVIASVMYTVITPLLNPFIYSLRNRDIKGALERLFNRATVLSQ

SEQ ID NO: 161 - DNA, 1336 bp, Homo sapiens
  source (1)..(1336)
  CDS (201)..(1136)
gattaaatagtggtaaagagaggagaaagggggaaaatgagactctgatgaagagagaaaagaagcaggatcagaatgaagataaagtcaggattaggaatataatgaacttaaagggagatttgggagtcagcccacacagttgtagatgaaatctagcattctaactgtcttccctcagctccagatgctgcagagtcatggaaaaccaatccagcatttctgaatttttcctccgaggaatatcagcgcctccagagcaacagcagtccctcttcggaattttcctgtgtatgtatcttgtcaccttgactgggaacctgctcatcatcctggccattggctctgacctgcacctccacacccccatgtactttttcttggccaacctgtcttttgttgacatgggtttaacgtcctccacagttaccaagatgctggtgaatatacagactcggcatcacaccatctcctatacgggttgcctcacgcaaatgtatttctttctgatgtttggtgatctagacagcttcttcctggctgccatggcgtatgaccgctatgtggccatttgccaccccctctgctactccacagtcatgaggccccaagtctgtgccctaatgcttgcattgtgctgggtcctcaccaatatcgttgccctgactcacacgttcctcatggctcggttgtccttctgtgtgactggggaaattgctcactttttctgtgacatcactcctgtcctgaagctgtcatgttctgacacccacatcaacgagatgatggtttttgtcttgggaggcaccgtactcatcgtcccctttttatgcattgtcacctcctacatccacattgtgccagctatcctgagggtccgaacccgtggtggggtgggcaaggccttttccacctgcagttcccacctctgcgttgtttgtgtgttctatgggaccctcttcagtgcctacctgtgtcctccctccattgcctctgaagagaaggacattgcagcagctgcaatgtacaccatagtgactcccatgttgaacccctttatctatagcctaaggaacaaggacatgaagggggccctaaagaggctcttcagtcacaggagtattgtttcctcttagatgtggtgacagcaacatttaatgaaaagacataggcttggagtcagacaaacgggcttcattttggggtctaccacacactagccataagattgtagtctggttacttagcctctctgagccttggttttctcatttataaaatggagataacagtttctatctaataatgtaacttggaggattaactgaaataaact

SEQ ID NO: 162 - protein, 311 aa, Homo sapiens
MENQSSISEFFLRGISAPPEQQQSLFGIFLCMYLVTLTGNLLIILAIGSDLHLHTPMYFFLANLSFVDMGLTSSTVTKMLVNIQTRHHTISYTGCLTQMYFFLMFGDLDSFFLAAMAYDRYVAICHPLCYSTVMRPQVCALMLALCWVLTNIVALTHTFLMARLSFCVTGEIAHFFCDITPVLKLSCSDTHINEMMVFVLGGTVLIVPFLCIVTSYIHIVPAILRVRTRGGVGKAFSTCSSHLCVVCVFYGTLFSAYLCPPSIASEEKDIAAAAMYTIVTPMLNPFIYSLRNKDMKGALKRLFSHRSIVSS

SEQ ID NO: 163 - DNA, 1330 bp, Homo sapiens
  source (1)..(1330)
  CDS (201)..(1130)
tgcccttatggagcccatagatttgggaagggaggaccccatcaaggaccatgaggtgaacaagccatcccacaattagcacagtagctaattgtgaccaaacagaagaaacaaagacttgctaggttctcatgattggtgttatgaaatcagagcatgttaaatgacaaaacttcttgtttataactgagcccaagtcaatggaaagaatcaaccacaccagcagtgtctccgagtttatcctcctgggactctcctcccggcctgaggaccaaaagacactctttgttctcttcctcatcgtgtacctggtcaccataacagggaacctgctcatcatcctggccattcgcttcaacccccatcttcagacccctatgtatttcttcttgagttttctgtctctcactgatatttgctttacaacaagcgttgtccccaagatgctgatgaacttcctgtcagaaaagaagaccatctcctatgctgggtgtctgacacagatgtattttctctatgccttgggcaacagtgacagctgccttctggcagtcatggcctttgaccgctatgtggccgtctgtgaccctttccactatgtcaccaccatgagccaccaccactgtgtcctgctggtggccttctcctgctcatttcctcacctccactcactcctgcacacacttctgctgaatcgtctcaccttctgtgactccaatgttatccaccactttctctgtgacctcagccctgtgctgaaattgtcctgctcttccatatttgtcaatgaaattgtgcagatgacagaagcacctattgttttggtgactcgttttctctgcattgctttctcttatatacgaatcctcactacagttctcaagattccctctacttctgggaaacgcaaagccttctccacctgtggtttttacctcaccgtggtgacgctcttttatggaagcatcttctgtgtctatttacagcccccatccacctacgctgtcaaggaccacgtggcaacaattgtttacacagttttgtcatccatgctcaatccttttatctacagcctgagaaacaaagacctgaaacagggcctgaggaagcttatgagcaagagatcctaggaagcaccctcttgaaaaactcgtaagtggaatctgctcaacttggacgtgttttctactggtttctggtgaacagtcaaagctgttggaagctagcacttctgacccatgtgagacaaggctattgtgggcacttacatccattgatgatgacccaacaattcggcctgtatctcttaaatcacaatcgtttcctgtct

SEQ ID NO: 164 - protein, 309 aa, Homo sapiens
MERINHTSSVSEFILLGLSSRPEDQKTLFVLFLIVYLVTITGNLLIILAIRFNPHLQTPMYFFLSFLSLTDICFTTSVVPKMLMNFLSEKKTISYAGCLTQMYFLYALGNSDSCLLAVMAFDRYVAVCDPFHYVTTMSHHHCVLLVAFSCSFPHLHSLLHTLLLNRLTFCDSNVIHHFLCDLSPVLKLSCSSIFVNEIVQMTEAPIVLVTRFLCIAFSYIRILTTVLKIPSTSGKRKAFSTCGFYLTVVTLFYGSIFCVYLQPPSTYAVKDHVATIVYTVLSSMLNPFIYSLRNKDLKQGLRKLMSKRS

SEQ ID NO: 165 - DNA, 1357 bp, Homo sapiens
  source (1)..(1357)
  CDS (201)..(1157)
taaaggagaaaataaatacatattaaggaagcgaaatcctagaccttagggagggagagtagatggtcaagttcgaatctaggtctttaacgatctttagtaacgtaatataattaactagaaatgctatgatccctaacatcagacccatgactttctttttgacttaaactgtctttcaggcaggctgactgtcactcatgatgagctttgcccctaatgcttcacactctccggtttttttgctccttgggttctcgagagctaacatctcctacactctcctcttcttcctgttcctggctatttacctgaccaccatactggggaatgtgacactggtgctgctcatctcctgggactccagactgcactcacccatgtattatctgcttcgtggcctctctgtgatagacatggggctatccacagttacactgccccagttgctggcccatttggtctctcattacccaaccattcctgctgcccgctgcttggctcagttctttttcttctatgcatttggggttacagatacacttgtcattgctgtcatggctctggatcgctatgtggccatctgtgaccccctgcactatgctttggtaatgaatcaccaacggtgtgcctgcttactagccttgagctgggtggtgtccatactgcacaccatgttgcgtgtgggactcgtcctgcctctttgctggactggggatgctgggggcaacgttaaccttcctcacttcttttgtgaccaccggccacttctgcgagcctcttgttctgacatacattctaatgagctggccatattctttgagggtggcttccttatgctgggcccctgtgccctcattgtactctcttatgtccgaattggggccgctattctacgtttgccttcagctgctggtcgccgccgagcagtctccacctgtggatcccacctcaccatggttggtttcctctacggcaccatcatttgtgtctacttccagcctcccttccagaactctcagtatcaggacatggtggcttcagtaatgtatactgccattacacctttggccaacccatttgtgtatagcctccacaataaggatgtcaagggtgcactctgcaggctgcttgaatgggtgaaggtagacccctgattagcctgctgtgggccatattgaataggtgagaaaagtcatgggcatattctgagcagagttggttttggggagatcagaggggtggagggcctagataacttaaggaactccagatttggctcttgtcaatgttgtgctttgatggagccatgaacattccacattcatagacacataagatcagggctcccttatca

SEQ ID NO: 166 - protein, 318 aa, Homo sapiens
MMSFAPNASHSPVFLLLGFSRANISYTLLFFLFLAIYLTTILGNVTLVLLISWDSRLHSPMYYLLRGLSVIDMGLSTVTLPQLLAHLVSHYPTIPAARCLAQFFFFYAFGVTDTLVIAVMALDRYVAICDPLHYALVMNHQRCACLLALSWVVSILHTMLRVGLVLPLCWTGDAGGNVNLPHFFCDHRPLLRASCSDIHSNELAIFFEGGFLMLGPCALIVLSYVRIGAAILRLPSAAGRRRAVSTCGSHLTMVGFLYGTIICVYFQPPFQNSQYQDMVASVMYTAITPLANPFVYSLHNKDVKGALCRLLEWVKVDP

SEQ ID NO: 167 - DNA, 1375 bp, Homo sapiens
  source (1)..(1375)
  CDS (201)..(1175)
acctcaaagatcttttaaaaagtgaaaacacactttcagttctgattctccatgctcaggaagaaaaataaactacagagtaaatgctctattaataactactcagtgtaagaacaacgtggaaagatgcatgttgtagatgacataagaattatgtcattaattgacagtgttgcttatctttaggtgagtacaagtccatgggaatgtccaacctgacaagactctctgaatttattctcttgggactctcctctcggtctgaagaccagaggccactctttgccctctttcttatcatatacctggtcactttgatgggaaatctgctcatcatcttggctatccactctgatcctcgacttcaaaaccctatgtattttttcctaagcatcttgtcctttgctgatatttgctacacaacagtcatagtcccaaagatgctcgtgaacttcttatcagagaaaaagaccatttcctatgctgaatgtctggcacagatgtatttcttcctggtttttggaaacatagatagttatctcctggcggctatggccatcaaccgctgtgtagccatttgtaacccattccattatgtcactgttatgaaccgcagatgctgtgtgttgctactagcattccccatcactttctcctatttccactctctcctacatgtcctcctggtgaatcggctcaccttttgtacatcaaatgttatccatcattttttttgtgatgtcaaccctgtgctgaaactgtcctgctcctccacctttgtcaatgaaattgtggccatgacagaagggctggcctctgtgatggctccatttgtctgtatcatcatctcttatctaagaattctcatcgctgttctcaagattccctcagcagctggaaaacacaaagccttctccacctgcagctcccatctcactgtggtgattctgttttatgggagtattagctatgtctatttgcagcctttgtccagctatactgtcaaggaccgaatagcaacaatcaactacactgtgttgacatcagtgttgaacccatttatctacagtttaagaaacaaagacatgaaacggggcttacagaaattgataaacaagattaagtctcaaatgagtaggttctctacaaagaccaataaaatctgtggaccctgattacaaggtgtgtgtgtgtgtgtgtgtgtgtgtgttagcacctgatgccactcttttcttgaaaaaacgttccttcatcttcaccatttgtagcttcacctcgtggttttccaccctgtggtctctgtcatcgtatgattgaacaattaggatgtcttggtatcaatgccccaatcacagactcacctcataatatatct

SEQ ID NO: 168 - protein, 324 aa, Homo sapiens
MGMSNLTRLSEFILLGLSSRSEDQRPLFALFLIIYLVTLMGNLLIILAIHSDPRLQNPMYFFLSILSFADICYTTVIVPKMLVNFLSEKKTISYAECLAQMYFFLVFGNIDSYLLAAMAINRCVAICNPFHYVTVMNRRCCVLLLAFPITFSYFHSLLHVLLVNRLTFCTSNVIHHFFCDVNPVLKLSCSSTFVNEIVAMTEGLASVMAPFVCIIISYLRILIAVLKIPSAAGKHKAFSTCSSHLTVVILFYGSISYVYLQPLSSYTVKDRIATINYTVLTSVLNPFIYSLRNKDMKRGLQKLINKIKSQMSRFSTKTNKICGP

SEQ ID NO: 169 - DNA, 1336 bp, Homo sapiens
  source (1)..(1336)
  CDS (201)..(1136)
agcttggcatcctttaacttttcttttgttgaattttactatctgtttctatgtagtttcagaattaaatgttctttcgaagtataatagcagtaagatttttaaaatagatttgaggtggggaagaagctgtcttggtcaaactgtcctttacatctctcccattgcttctctaaaccctatccaggaagtccagagacatggagacaaagaattatagcagcagcacctcaggcttcatcctcctgggcctctcttccaaccctaagctgcagaaacctctctttgccatcttcctcatcatgtacctactcactgcggtggggaatgtgctcatcatcctggccatctactctgaccccaggctccacacccctatgtacttttttctcagcaacttgtctttcatggatatctgcttcacaacagtcatagtgcctaagatgctggtgaattttctatcagagacaaagattatctcttatgtgggctgcctgatccagatgtacttcttcatggcatttgggaacactgacagctacctgctggcctctatggccatcgaccggctggtggccatctgcaaccccttacactatgatgtggttatgaaaccatggcattgcctactcatgctattgggttcttgcagcatctcccacctacattccctgttccgcgtgctacttatgtctcgcttgtctttctgtgcctctcacatcattaagcactttttctgtgacacccagcctgtgctaaagctctcctgctctgacacatcctccagccagatggtggtgatgactgagaccttagctgtcattgtgacccccttcctgtgtaccatcttctcctacctgcaaatcatcgtcactgtgctcagaatcccctctgcagccgggaagtggaaggccttctctacctgtggctcccacctcactgtagtggtcctgttctatgggagtgtcatctatgtctattttaggcctctgtccatgtactcagtgatgaagggccgggtagccacagttatgtacacagtagtgacacccatgctgaaccctttcatctacagcctgaggaacaaagatatgaaaaggggtttgaagaaattaagacacagaatttactcatagaaagaacaaaatgttggcatgtcaaaatcaggacatgacctaaaagattattatcagtttatcctcccttcctaacccttttccacatggcattcaaagaggtcatgaaaagtggtgttggatatcagtaagagaattaacctgggagcaaaacactcagtttctttatatatatatatatatatatgtatacacacaca

SEQ ID NO: 170 - protein, 311 aa, Homo sapiens
METKNYSSSTSGFILLGLSSNPKLQKPLFAIFLIMYLLTAVGNVLIILAIYSDPRLHTPMYFFLSNLSFMDICFTTVIVPKMLVNFLSETKIISYVGCLIQMYFFMAFGNTDSYLLASMAIDRLVAICNPLHYDVVMKPWHCLLMLLGSCSISHLHSLFRVLLMSRLSFCASHIIKHFFCDTQPVLKLSCSDTSSSQMVVMTETLAVIVTPFLCTIFSYLQIIVTVLRIPSAAGKWKAFSTCGSHLTVVVLFYGSVIYVYFRPLSMYSVMKGRVATVMYTVVTPMLNPFIYSLRNKDMKRGLKKLRHRIYS

SEQ ID NO: 171 - DNA, 1426 bp, Homo sapiens
  source (1)..(1426)
  CDS (201)..(1226)
ctttgcacgccagcctgggtaacaagagcaaaactccatctcaaaaacaaaaaaaggcttctgcaatgacttctaagagttagaaacaggttttgagaggttacgtggcttgctcaaggtcacagcaattttgttgcacaggtgagctgaaacccaagcctacctaactcccagtacaggatgctttcttctccctggccatggccttgccattgctcttatctccctcctgctttgcctcttctcagtctctgtccagtaggatgaactcagagaacctcacccgggccgcggttgcccctgctgaattcgtcctcctgggcatcacaaatcgctgggacctgcgtgtggccctcttcctgacctgcctgcctgtctacctggtgagcctgctgggaaacatgggcatggcgctgctgatccgcatggatgcccggctccacacacctatgtacttcttcctggccaacctctccctgctggatgcctgctattcctccgccatcggccccaagatgctagtggacctgctgctgccccgagccaccatcccttacacagcctgtgccctccagatgtttgtctttgcaggtctggctgatactgagtgttgcttgctggcagccatggcctatgaccgctacgtggccatcagaaacccacttctctatacaacagctatgtcgcagcgtctatgcctggccttgctgggagcatcaggcctgggtggggcagtgagtgcctttgttcacacaaccctcaccttccgcctgagcttctgccgctcccggaagatcaatagcttcttctgcgatatccctccactgctggccatctcgtgcagtgacaccagtctcaatgaactccttctcttcgccatctgtggcttcatccagacagccacggtgttagctatcacggtgtcttatggcttcatcgctggggctgtgatccacatgcgctcggtcgagggcagtcggcgagcagcctccaccggtggttcccacctcacagccgtggccatgatgtacgggacactcattttcatgtacctgcgccccagctccagctatgccctggacactgacaagatggcctctgtgttctataccctggtcatcccgtctctcaacccactcatctacagcctccgcaataaggaggtcaaggaggccctcaggcagacctggagccgattccactgtccagggcaggggtcccagtgattggtccagggaggctgggtaggtctgactatgaggggatgaggaaggtcggggcctctttctggccccgtcactgtcggtaaagatgggatgttcctctggcttggatgtctcatgtcattgtttaagggacagtaaagagggaaatgaaagcttatagcagggagaaaaagatttggggttcatctagggctagacct

SEQ ID NO: 172 - protein, 341 aa, Homo sapiens
MALPLLLSPSCFASSQSLSSRMNSENLTRAAVAPAEFVLLGITNRWDLRVALFLTCLPVYLVSLLGNMGMALLIRMDARLHTPMYFFLANLSLLDACYSSAIGPKMLVDLLLPRATIPYTACALQMFVFAGLADTECCLLAAMAYDRYVAIRNPLLYTTAMSQRLCLALLGASGLGGAVSAFVHTTLTFRLSFCRSRKINSFFCDIPPLLAISCSDTSLNELLLFAICGFIQTATVLAITVSYGFIAGAVIHMRSVEGSRRAASTGGSHLTAVAMMYGTLIFMYLRPSSSYALDTDKMASVFYTLVIPSLNPLIYSLRNKEVKEALRQTWSRFHCPGQGSQ

SEQ ID NO: 173 - DNA, 1351 bp, Homo sapiens
  source (1)..(1351)
  CDS (201)..(1151)
aggttcagggaggtgaaatgacttgcccatagtcatacctgtgcctagggccagggctacctgactctaaactcttgatattttcccatggccaggaagccttgaacaatttatcccctcaccttttccgttagacatcggggaggtgacccatcaatagaaaggagcccttcaggttccaggcgaataaccagcctgccatggaggctgccaatgagtcttcagagggaatctcattcgttttattgggactgacaacaagtcctggacagcagcggcctctctttgtgctgttcttgctcttgtatgtggccagcctcctgggtaatggactcattgtggctgccatccaggccagtccagcccttcatgcacccatgtacttcctgctggcccacctgtcctttgctgacctctgtttcgcctccgtcactgtgcccaagatgttggccaacttgttggcccatgaccactccatctcgctggctggctgcctgacccaaatgtacttcttctttgccctgggggtaactgatagctgtcttctggcggccatggcctatgactgctacgtggccatccggcaccccctcccctatgccacgaggatgtcccgggccatgtgcgcagccctggtgggaatggcatggctggtgtcccacgtccactccctcctgtatatcctgctcatggctcgcttgtccttctgtgcttcccaccaagtgccccacttcttctgtgaccaccagcctctcttaaggctctcgtgctctgacacccaccacatccagctgctcatcttcaccgagggcgccgcagtggtggtcactcccttcctgctcatcctcgcctcctatggggccatcgcagctgccgtgctccagctgccctcagcctctgggaggctccgggctgtgtccacctgtggctcccacctggctgtggtgagcctcttctatgggacagtcattgcagtctacttccaggccacatcccgacgcgaggcagagtggggccgtgtggccactgtcatgtacactgtagtcacccccatgctgaaccccatcatctacagcctctggaatcgcgatgtacagggggcactccgagcccttctcattgggcgaaggatctcagctagtgactcctgagggcaggaccccactgaggacagactgcatcacccacactggcaactgttgaacgtgaccctctgtcctctgctatgctcaaaaatcataacagctgtcatttcctgagcacctgcccggaagcagatccttgcctgatctcattttattcccacagccacccaggatgcagatattatgatccggttttacacacaaga

SEQ ID NO: 174 - protein, 316 aa, Homo sapiens
MEAANESSEGISFVLLGLTTSPGQQRPLFVLFLLLYVASLLGNGLIVAAIQASPALHAPMYFLLAHLSFADLCFASVTVPKMLANLLAHDHSISLAGCLTQMYFFFALGVTDSCLLAAMAYDCYVAIRHPLPYATRMSRAMCAALVGMAWLVSHVHSLLYILLMARLSFCASHQVPHFFCDHQPLLRLSCSDTHHIQLLIFTEGAAVVVTPFLLILASYGAIAAAVLQLPSASGRLRAVSTCGSHLAVVSLFYGTVIAVYFQATSRREAEWGRVATVMYTVVTPMLNPIIYSLWNRDVQGALRALLIGRRISASDS

SEQ ID NO: 175 - DNA, 1102 bp, Homo sapiens
  source (1)..(1102)
  CDS (201)..(902)
atttcaggtgggatgcagagagagataaaagctctccatagtaactgccagttgtggactcaagatggtaaatactttttttctctctgagcagaggctgggacatttacttaacatctgacgctgaagaaagcaaagacctttagttctggaatctcaatttcattatcttcttcaggtgaaccagctatattgagcctatggccaaaagaaatctcagcactgtgacagagttcattcttgtagtcttcacagatcaccctgaactggcagttccactcttcctagtgtttctcagtttctatcttgtcacttttctggggaatggggggatgatcattctaatccaagtggatgcccaactccacacccccgtgtacttcttcctgagccaccttgctttcctggatgcctgctgtgcctcagtaatcacccctcagattctggccacactggccacagacaagacagttatctcctatggctgccgtgctgtgcagttctctttcttcaccatatgtgcaggcacagagtgttacctgctgtcagtgatggcctatgaccgctttgttgccattagcaatccactgcactgtaacatgaccatgactccaggtacctgcagggtctttttggccagtgccttcatctgtggggtgtcaggggccattctgcataccacgtgcaccttcaccctctccttctgttgtgacaatcagatcaacttcttcttctgtgacctcccacccctgctgaagctcgcctgcagcagcatgacacaaactgagattgtcattctcctttgtgcaaaatgcatgttcctagccaatgtcatggttatcctgatctgctacatgctcattatcagagccattttgagggtgaagtcggcaggtgggtaagccaagaccttctccacctgcacctcccatctcaccactgttgtcctcttctttgggacacttgccttcatgtaccagagaagtaactccgccaaatcctcagaggaagacaagatagtgtctgtcttttacactgtaatcatccctatgttgaaccccttgatctacagtctgaggaacaaagatgtaaaagctgcatt

SEQ ID NO: 176 - protein, 233 aa, Homo sapiens
MAKRNLSTVTEFILVVFTDHPELAVPLFLVFLSFYLVTFLGNGGMIILIQVDAQLHTPVYFFLSHLAFLDACCASVITPQILATLATDKTVISYGCRAVQFSFFTICAGTECYLLSVMAYDRFVAISNPLHCNMTMTPGTCRVFLASAFICGVSGAILHTTCTFTLSFCCDNQINFFFCDLPPLLKLACSSMTQTEIVILLCAKCMFLANVMVILICYMLIIRAILRVKSAGG

SEQ ID NO: 177 - DNA, 1345 bp, Homo sapiens
  source (1)..(1345)
  CDS (201)..(1145)
agcttaaggctcagttccataaaatgcaagagatgcccaaggaaaatcagccagtttcagaatttcttaaaaacaaactctacaaatagacccagaattaaaaccaaaacttccaccatagagggaaagattctgtccttcaattctgagattctttttatttcattatcatcctcagaccaacagtccacattgtctccatggccaagaataatctcaccagagtaaccgaattcattctcatgggctttatggaccaccccaaattggagattcccctctttctggtgtttctgagtttctacctagtcacccttcttgggaatgtggggatgattatgttaatccaagtagatgtcaaactctacaccccaatgtacttcttcctgagccacctctccctgctggatgcctgttacacctcagtcatcacccctcagatcctagccacattggccacaggcaaaacggtcatctcctacggccactgtgctgcccagttctttttattcaccatctgtgcaggcacagagtgctttctgctggcagtgatggcctatgatcgctatgctgccattcgcaacccactgctctataccgtggccatgaatcccaggctctgctggagcctggtggtaggagcctatgtctgtggggtgtcaggagccatcctgcgtaccacttgcaccttcaccctctccttctgtaaggacaatcaaataaacttcttcttctgtgacctcccacccctgctgaagcttgcctgcagtgacacagcaaacatcgagattgtcatcatcttctttggcaattttgtgattttggccaatgcctccgtcatcctgatttcctatctgctcatcatcaagaccattttgaaagtgaagtcttcaggtggcagggccaagactttctccacatgtgcctctcacatcactgctgtggcccttttctttggagcccttatcttcatgtatctgcaaagtggctcaggcaaatctctggaggaagacaaagtcgtgtctgtcttctatacagtggtcatccccatgctgaaccctctgatctacagcttaagaaacaaagatgtaaaagacgccttcagaaaggtcgctaggagactccaggtgtccctgagcatgtagatctaagtaagaggaattcttgttttagtccactttcttcccatatgaatatatcctaataggcaccattactatatgcaacctatacccacaaacagagaagacagaagataggtaccaccaggcacacaggaaaaactacaattgtggtgaaattagtttccagcaattccatgttctttcttcttatccccttcttc

SEQ ID NO: 178 - protein, 314 aa, Homo sapiens
MAKNNLTRVTEFILMGFMDHPKLEIPLFLVFLSFYLVTLLGNVGMIMLIQVDVKLYTPMYFFLSHLSLLDACYTSVITPQILATLATGKTVISYGHCAAQFFLFTICAGTECFLLAVMAYDRYAAIRNPLLYTVAMNPRLCWSLVVGAYVCGVSGAILRTTCTFTLSFCKDNQINFFFCDLPPLLKLACSDTANIEIVIIFFGNFVILANASVILISYLLIIKTILKVKSSGGRAKTFSTCASHITAVALFFGALIFMYLQSGSGKSLEEDKVVSVFYTVVIPMLNPLIYSLRNKDVKDAFRKVARRLQVSLSM

SEQ ID NO: 179 - DNA, 1333 bp, Homo sapiens
  source (1)..(1333)
  CDS (201)..(1133)
cgaactcctgggctcaagtgatcccactgcctcgcttccaaagtgctgatattacaggtgtgagccacagcacctggcacacctggcatattttgtccacagtacattttcaataaatgtgaactacaaatacaggtaaatcctatttgcaccttcctaacttgcttcccattctacatgtctcagggaccactggtgtcatggcagagatgaacctcaccttggtgaccgagttcctccttattgcattcactgaatatcctgaatgggcactccctctcttcctcttgtttttatttatgtatctcatcaccgtattggggaacttagagatgattattctgatcctcatggatcaccagctccacgctccaatgtatttccttctgagtcacctcgctttcatggacgtctgctactcatctatcactgtcccccagatgctggcagtgctgctggagcatggggcagctttatcttacacacgctgtgctgctcagttctttctgttcaccttctttggttccatcgactgctacctcttggccctcatggcctatgaccgctacttggctgtgtgccagcccctgctttatgtcaccatcctgacacagcaggcccgcttgagtcttgtggctggggcttacgttgctggtctcatcagtgccttggtgcggacagtctcagccttcactctctccttctgtggaaccagtgagattgactttattttctgtgacctccctcctctgttaaagttgacctgtggggagagctacactcaagaagtgctgattattatgtttgccatttttgtcatccctgcttccatggtggtgatcttggtgtcctacctgtttatcatcgtggccatcatggggatccctgctggaagccaggccaagaccttctccacctgcacctcccacctcactgctgtgtcactcttctttggtaccctcatcttcatgtacttgagaggtaactcagatcagtcttcggagaagaatcgggtagtgtctgtgctttacacagaggtcatccccatgttgaatcccctcatctacagcctgaggaacaaggaagtgaaggaggccctgagaaaaattctcaatagagccaagttgtcctaaccatctccaaacttggaaaatcccgagaaccacctactctgtagtgtcagaattctggacgctcattatttatagcatgctcaatgtttaaatgaatatattatggtactaggtataaaaaagaaccagaacttttagctccagggagaggaaggaagacaaggaaaagtcaacctgaaaagagattggagtgggagttt

SEQ ID NO: 180 - protein, 310 aa, Homo sapiens
MAEMNLTLVTEFLLIAFTEYPEWALPLFLLFLFMYLITVLGNLEMIILILMDHQLHAPMYFLLSHLAFMDVCYSSITVPQMLAVLLEHGAALSYTRCAAQFFLFTFFGSIDCYLLALMAYDRYLAVCQPLLYVTILTQQARLSLVAGAYVAGLISALVRTVSAFTLSFCGTSEIDFIFCDLPPLLKLTCGESYTQEVLIIMFAIFVIPASMVVILVSYLFIIVAIMGIPAGSQAKTFSTCTSHLTAVSLFFGTLIFMYLRGNSDQSSEKNRVVSVLYTEVIPMLNPLIYSLRNKEVKEALRKILNRAKLS

SEQ ID NO: 181 - DNA, 1360 bp, Homo sapiens
  source (1)..(1360)
  CDS (201)..(1160)
  modified_base (20)..(119): a, t, c, g, unknown or other
agacttcgtctcaaaagatnnnnnnnnnnnnnnnnnnnnnnnnnnnnnnnnnnnnnnnnnnnnnnnnnnnnnnnnnnnnnnnnnnnnnnnnnnnnnnnnnnnnnnnnnnnnnnnnnnnnactccgtctcaaaaagaaaaaaaagaaataaagcaactcagccaagaagagctcagcgggtcctattcttttgcataagacatgcctgtggggaaacttgtcttcaaccagtctgagcccactgagtttgtgttccgtgcgttcaccacagccactgaattccaggttcttctcttccttctcttcctcctcctctacttgatgatcctctgtggcaacacagccatcatctgggtggtgtgcacacacagcaccctccgcaccccgatgtatttcttcctgtccaacctgtctttcctggaactctgctacaccaccgtggtagtacccttgatgctttccaacattttgggggcccagaagcccatttcgttggctggatgtggggcccaaatgttcttctttgtcaccctcggcagcacggactgtttcctcttggcgatcatggcctatgaccgctatgtggctatctgccacccgctgcactacaccctcatcatgacccgcgagctgtgcacgcagatgctgggtggggccctgggcctggccctcttcccctccctgcagctcaccgccttaatcttcaccctgcccttttgcggccaccaccaggaaatcaaccacttcctctgcgatgtgcctcccgtcctgcgcctggcctgcgctgacatccgcgtgcaccaggctgtcctctatgtcgtgagcatcctcgtgctgaccatccccttcctgctcatctgcgtctcctacgtgttcatcacctgtgccatcctgagcatccgttctgccgagggccgccgccgggccttctccacctgctccttccacctcaccgtggtcctgctgcagtatggctgctgcagcctcgtgtacctgcgtcctcggtccagcacctcagaggatgaggacagccaaatcgcgttggtctacacctttgtcacccccttactcaaccctttgctttacagccttaggaacaaggatgtcaaaggtgctctgaggagtgccattatccgtaaagcagcctctgacgccaactgaaggcttaggggcactgggctgggtgtctgtctgttgctgtgtcaaagaactctaaatgacacagaactgtagtactttctcacactgtgcacttgatgtttcttttttgccatatttgccccaagttcacaattcatgctcatttttctgaagtgctttgactaagatatgaaaatttggacagaacttacagcgtagga

SEQ ID NO: 182 - protein, 319 aa, Homo sapiens
MPVGKLVFNQSEPTEFVFRAFTTATEFQVLLFLLFLLLYLMILCGNTAIIWVVCTHSTLRTPMYFFLSNLSFLELCYTTVVVPLMLSNILGAQKPISLAGCGAQMFFFVTLGSTDCFLLAIMAYDRYVAICHPLHYTLIMTRELCTQMLGGALGLALFPSLQLTALIFTLPFCGHHQEINHFLCDVPPVLRLACADIRVHQAVLYVVSILVLTIPFLLICVSYVFITCAILSIRSAEGRRRAFSTCSFHLTVVLLQYGCCSLVYLRPRSSTSEDEDSQIALVYTFVTPLLNPLLYSLRNKDVKGALRSAIIRKAASDAN

SEQ ID NO: 183 - DNA, 1354 bp, Homo sapiens
  source (1)..(1354)
  CDS (201)..(1154)
ttcattttgtactaatattatttgttttctcatgtccctcatgaactgtgaattctttgagggtaagaacagtgtgttgacatcatgtttctcttctgaagtgaaaggcattttagtacaacatcctccaacctcacaggttctctttgagctctcattgtctatgaggctatgagtttgctgagctctcactgccacatatgcaaccatataccaaaaactggacccaggtaactgaatttgtcatgatgggctttgctggcatccatgaagcacacctcctcttcttcatactcttcctcaccatgtacctgttcaccttggtggagaatttggccatcattttagtggtgggtttggaccaccgactacggagacccatgtatttcttcctgacacacttgtcctgccttgaaatctggtacacttctgttacagtgcccaagatgctggctggttttattggggtggatggtggcaagaatatctcttatgctggttgcctatcccagctcttcatcttcacctttcttggggcaactgagtgtttcctactggctgccatggcctatgatcgttatgtggccatttgtatgcctctccactatggggcttttgtgtcctggggcacctgcatccgtctggcagctgcctgttggctggtaggtttcctcacacccatcttgccaatctacctcttgtctcagctaacattttgtggcccaaatgtcattgaccatttctcctgtgatgcctcacccttgctagccttgtcgtgctcagatgtcacttggaaggagactgtggatttcctggtgtctctggctgtgctactggcctcctctatggtcattgctgtgtcctatggcaacatcgtctggacactgctgcacatccgctcagctgctgagcgctggaaggccttctctacctgtgcagctcacctgactgtggtgagcctcttctatggcactcttttctttatgtatgtccagaccaaggtgacctcctccatcaacttcaacaaggtggtatctgtcttctactctgttgtcacgcccatgctcaatcctctcatctacagtcttaggaacaaggaagtgaagggagctctgggtcgagtcttttctctcaacttttggaagggacagtgaggaggcaggtgggaacccagtttccttgccttggatatttaaaaacaggttagtcaataacatttaagctgagaccaaatcaagaatgcagttccatttataacagccacaaaaaatacaatacctaggaatacaactaaccaaggaagtgaaagatatttataaggggaaccacaaaacactgctaaaagaaatcagag

SEQ ID NO: 184 - protein, 317 aa, Homo sapiens
MQPYTKNWTQVTEFVMMGFAGIHEAHLLFFILFLTMYLFTLVENLAIILVVGLDHRLRRPMYFFLTHLSCLEIWYTSVTVPKMLAGFIGVDGGKNISYAGCLSQLFIFTFLGATECFLLAAMAYDRYVAICMPLHYGAFVSWGTCIRLAAACWLVGFLTPILPIYLLSQLTFCGPNVIDHFSCDASPLLALSCSDVTWKETVDFLVSLAVLLASSMVIAVSYGNIVWTLLHIRSAAERWKAFSTCAAHLTVVSLFYGTLFFMYVQTKVTSSINFNKVVSVFYSVVTPMLNPLIYSLRNKEVKGALGRVFSLNFWKGQ

SEQ ID NO: 185 - DNA, 1360 bp, Homo sapiens
  source (1)..(1360)
  CDS (201)..(1160)
aacagatgctgatgccatgcttgcacagcctgcagaaccaggagccaaataaatctcttttctttataaatttacccagtttcagatattccttaatagcaacacaaaacagattgaaattcttcctcattgtaccttgcacagatgtagacgtgctcaagtaatactgtttgagtgattgccaactgtaacctctgcagatgacacctggagaactagcccttgccagtggcaaccacaccccagtcaccaagttcatcttgcagggattctccaattatccagacctccaggagcttctcttcggagccatcctgctcatctatgccataacagtggtgggcaacttgggaatgatggcactcatcttcacagactcccatctccaaagcccaatgtatttcttcctcaatgtcctctcgtttcttgatatttgttactcttctgtggtcacacctaagctcttggtcaacttcctggtctctgacaagtccatctcttttgagggctgtgtggtccagctcgccttctttgtagtgcatgtgacagctgagagcttcctgctggcctccatggcctatgaccgcttcctagccatctgtcaacccctccattatggttctatcatgaccagggggacctgtctccagctggtagctgtgtcctatgcatttggtggagccaactccgctatccagactggaaatgtctttgccctgcctttctgtgggcccaaccagctaacacactactactgtgacataccaccccttctccacctggcttgtgccaacacagccacagcaagagtggtcctctatgtcttttctgctctggtcacccttctgcctgctgcagtcattctcacctcctactgcttggtcttggtggccattgggaggatgcgctcagtagcagggagggagaaggacctctccacttgtgcctcccactttctggccattgccattttctatggcaccgtggttttcacctatgttcagccccatggatctactaacaataccaatggccaagtagtgtccgtcttctacaccatcataattcccatgctcaatcccttcatctatagcctccgcaacaaggaggtgaagggcgctctgcagaggaagcttcaggtcaacatctttcccggctgagccctgcaaggtgacttgttggaatgaggaaggtataacatcttccaaagcacactatgaattaacgtaaccaatcaagagcagccctggttttggaggagatagaaaaagtaaatgagaaacagcaaatatatcttgtacagaccattacagtttataaagcatcttcttacccattatcatatcaaattctcaccacc

SEQ ID NO: 186 - protein, 319 aa, Homo sapiens
MTPGELALASGNHTPVTKFILQGFSNYPDLQELLFGAILLIYAITVVGNLGMMALIFTDSHLQSPMYFFLNVLSFLDICYSSVVTPKLLVNFLVSDKSISFEGCVVQLAFFVVHVTAESFLLASMAYDRFLAICQPLHYGSIMTRGTCLQLVAVSYAFGGANSAIQTGNVFALPFCGPNQLTHYYCDIPPLLHLACANTATARVVLYVFSALVTLLPAAVILTSYCLVLVAIGRMRSVAGREKDLSTCASHFLAIAIFYGTVVFTYVQPHGSTNNTNGQVVSVFYTIIIPMLNPFIYSLRNKEVKGALQRKLQVNIFPG

SEQ ID NO: 187 - DNA, 1078 bp, Homo sapiens
  source (1)..(1078)
  CDS (201)..(878)
gagccatttcattgcaagaagtcacaaggatttcccttcttttctgggtccttctcttggtcatttctagagttttggtagccatggcatgaggaaacagcactgaagtgactgaattctgtcttctgggatttggtgcctagcaagagttttggtgtatcctcttcattatattccttctcatctatgtgacctccataatgggtaatagtggaataatcttactcatcaacacagattccagatttcaaacacccatgtacttttttctacaacatttggcttttgttgatatctgttacacttctgctatcactcccaagatgctccaaagcttcacggaagaaaagaatttgatatcattttggggctgcatgatacaattattggtttatgcaacatttgcaaccagtgactgttatctcctggctatgatagcagtggaccattatgttgcaatctgtaagccccttcactataccgtaatcacgtcccaaacagtctgcatccatttggtagctggttcatacatcatgggctcaataaatgcctctgtacatacaggttttgcattttcactgtctttctgcaagtccaataacatcaaccactttttctgtgatggtcccccaattcttgccctttcatgctccaatattgacatcaacatcatgctacttgttgtctttgtgggatttaacttgatgttcactgggttggtagtcatcttttcctacatctacatcatggccaccatcctgaaaatgtcttctagtgcaggaaggaaaaaatccttctcaacatgtgcctcccacctgaccacagttgccattttctatgggacactctcttacatgcacttaccagtctcattctaataattcccaggagaatatgaaagtggcctctatattttatggcactgttattcccatgttgaatcctttaatctatagcttgagaaataaggaagtaaaagaagctttaaaattgatagggaaaaagttcttttaaatcagccccagttgttaacattcagctcaacaaatcatccaacatagctgttctgccaaaattt

SEQ ID NO: 188 - protein, 225 aa, Homo sapiens [sequence omitted]

SEQ ID NO: 189 - DNA, 1474 bp, Homo sapiens
  source (1)..(1474)
  CDS (201)..(1274)
tttagcattactttaaaaatatggatagctgtttaatacagaggaaaattgtcaatctatgtttctaagaactatacacattaggagttaggatacttctaagacaatctccttcgattttgaagatgaatccatttcatcttacatcaagtaaatcactctttacttgatgattataaatacatttcttaaatttgaaaatgaataacactattgtatttgtcataaaaatacaaatagaaaaaagtgacttgaaatatagagccatttcattgcaagaaatctcaaagatttcccttcttttctgggtccttctcttggtcatttctagacttttactagccatgacactaggaaacagcactgaagtcactgaattctatcttctgggatttggtgcccagcatgagttttggtgtatcctcttcattgtattccttctcatctatgtgacctccataatgggtaatagtggaataatcttactcatcaacacagattccagatttcaaacactcacgtacttttttctacaacatttggcttttgttgatatctgttacacttctgctatcactcccaagatgctccaaagcttcacagaagaaaagaatttgatattatttcagggctgtgtgatacaattcttagtttatgcaacatttgcaaccagtgactgttatctcctggctatgatggcagtggatccttatgttgccatctgtaagccccttcactatactgtaatcatgtcccgaacagtctgcatccgtttggtagctggttcatacatcatgggctcaataaatgcctctgtacaaacaggttttacatgttcactgtccttctgcaagtccaatagcatcaatcactttttctgtgatgttccccctattcttgctctttcatgctccaatgttgacatcaacatcatgctacttgttgtctttgtgggatctaacttgatattcactgggttggtcgtcatcttttcctacatctacatcatggccaccatcctgaaaatgtcttctagtgcaggaaggaaaaaatccttctcaacatgtgcttcccacctgaccgcagtcaccattttctatgggacactctcttacatgtatttgcagtctcattctaataattcccaggaaaatatgaaagtggcctttatattttatggcacagttattcccatgttaaatcctttaatctatagcttgagaaataaggaagtaaaagaagctttaaaagtgatagggaaaaagttattttaaatcagccccagttgttaacattcaactcaacaaatcatccaacatagctgttctgctaaaatttaatttttccacaataaggaatatgtagaaagatgtcaaattaataatctaacatcacctctagaggaatttaaaatacaaaagccaacaaatcccaaacctagcagaagaaaaaaataactaaaatcagaacagaa

SEQ ID NO: 190 - protein, 357 aa, Homo sapiens [sequence omitted]

SEQ ID NO: 191 - DNA, 1417 bp, Homo sapiens
  source (1)..(1417)
  CDS (201)..(1217)
acaaatacctgtttaatatagtgaaaaaatgcttctctatgtttctaagaaccacgcacattagaagtcagtcttcttctaagaaaatcttcttcattttgaagataaatctgtttcatctttcatctagtaactctctctttacttgatgattataaattttttttaatttggaaataacactattgtgagtatttgtcatgaaaagtcaaattgaaaaaagtgacttaaaatatagagccattttattgcaaaaagtcacaaggatgttcctgcttttctgggtccttctcttggtcctttctagacttttggtagtcatgggtcgaggaaacagcactgaagtgactgaattccatcttctgggatttggtgtccaacacgaatttcagcatgtccttttcattgtacttcttcttatctatgtgacctccctgataggaaatattggaatgatcttactcatcaagaccgattccagacttcaaacacccatgtacttttttccacaacatttggcttttgttgatatctgttatacttctgctatcactcccaagatgctccaaagcttcacagaagaaaataatttgataacatttcggggctgtgtgatacaattcttagtttatgcaacatttgcaaccagtgactgttacctcctagctattatggcaatggattgttatgttgccatctgtaagccccttcgctatcccatgatcatgtcccaaacagtctacatccaactcgtagctggctcatatattataggctcaataaatgcctctgtacatacaggttttacattttcactgtccttctgcaagtctaataaaatcaatcactttttctgtgatggtctcccaattcttgccctttcatgctccaacattgacatcaacatcattctagatgttgtctttgtgggatttgacttgatgttcactgagttggtcatcatcttttcctacatctacattatggtcaccatcctgaagatgtcttctactgctgggaggaaaaaatccttctccacatgtgcctcccacctgacagcagtaaccattttctatgggacactctcttacatgtacttacagcctcagtctaataattctcaggagaatatgaaagtagcctctatattttatggcactgttattcccatgttgaatcctttaatctatagcttgagaaataaggaaggaaaataagctttaaaagtgataggaaaaaagttttgttaagttagacacagttgttaaaattcaacacaacaaagcatccagcacagctaatctgccaaaatttaaagtttctaaaatagggagcatgtaggaaaatctcaaattaaccatctaacatcacacctagagcaattagaaaaaagaaataactaaaatcagaacaaaac

SEQ ID NO: 192 - protein, 338 aa, Homo sapiens
MKSQIEKSDLKYRAILLQKVTRMFLLFWVLLLVLSRLLVVMGRGNSTEVTEFHLLGFGVQHEFQHVLFIVLLLIYVTSLIGNIGMILLIKTDSRLQTPMYFFPQHLAFVDICYTSAITPKMLQSFTEENNLITFRGCVIQFLVYATFATSDCYLLAIMAMDCYVAICKPLRYPMIMSQTVYIQLVAGSYIIGSINASVHTGFTFSLSFCKSNKINHFFCDGLPILALSCSNIDINIILDVVFVGFDLMFTELVIIFSYIYIMVTILKMSSTAGRKKSFSTCASHLTAVTIFYGTLSYMYLQPQSNNSQENMKVASIFYGTVIPMLNPLIYSLRNKEGK

SEQ ID NO: 193 - DNA, 994 bp, Homo sapiens
  source (1)..(994)
  CDS (201)..(794)
attgatcccagactccacactcctatgtacttttttcttaggcacttgtcctttgtagatatttgttcctcttcttctgttgtgcctaagatgctgtgtaatatctttgcagagaaaaaagacatcacttttctgggttgtgctgcacagatgtggttctttggtctctttgaggcagctgagtgttttctctggctgccatggcatatgaccggtatgtggccatctgcaagcccttgttgtatacgctcattatgtctcagcaggtctgtatgcagctggtggtagggccttatgccatggctcttataagcaccatgactcatacaattttcactttttgcttacccttttgtggttcaaatattatcaatcactttttctgtgatatttttccactgctttccctagcatgtgcagacacctgggtgaataaatttgtgctgtttgtcttggctggagctataggagtactcagtggtctgatcatcatggtctcctatatttgcatcctgatgaccatcttgaagatccagactgctgatgggaagcaaaaagctttcttcacctgtttttctcaccttgcggctgtctccatcctgtatgggactcttttcttgatttatgttcggccaagttcaagttcctccctgggtatctataaagtgatttctctattttatactgtggtaatccccatggttaacccccttatttacagcttgaggaataaggaggtgaaagatgcattcagaagaaaaattgagaggaaaaaatttattataggtaggtaaaagagaattctatttgtgttgtagcatagatgttggtgcaaaatatgtaataaaaacaaaactggactgagaaccagaagctgcacgtgagtactgattctgacaggtcatagattatttaaaaatggataagctttaaaatatttttctgcctcagtcttattttctgtgacataatgagaatctcaaaataaatataa

SEQ ID NO: 194 - protein, 197 aa, Homo sapiens [sequence omitted]

SEQ ID NO: 195 - DNA, 1210 bp, Homo sapiens
  source (1)..(1210)
  CDS (201)..(1010)
agtcacatttatcaagtctgttgtgaattctttgctcttcttctagtagaaagcagaaccagtcaatggctaatgaaaactacacaaaggtcacctaattcattttcacaggcttgaattacaatcctcagttgcaggtcttccttttcctactctttctgacaactttctatgtcatcaatgtaactggaaacttgggaatgattgtcctcatccgaattgattcccgccttcacacacccatgtactttttcctcagccacctgtcctttgtggacacctgcttctcctcagttgtgagccccaagatgctcactgacttctttgtgaagaggaaagccatttctttccttggctgtgctttgcagcagtggttctttgggttctttgtggcagcagactgtttcctcttggagtccatggcctatgactgctatgtggccatctgtaacccattgttatactcagttgctatgtcccagaggctctgcatccagctagtggtgggtccctatgtcattggactcatgaataccatgactcacacaacaaatgcattttgtctccctttttgtggccctaatgtcatcaatcctttcttctgtgatatgtcccccttactttcccttgtatgtgctgataccaggctcaataagttggcagttttcatcgtggctggagctgtgggagtcttcagtggtctgactatcctgatttcctacatttacatcctcatggccatcctgaggatccgctctgctgatgggaggtgcaaaaccttttctacttgctcttctcacctgacagctgttttcatctcgtatggtacccttttctttatttatgtacatcccagtgcaaccttctccctggatctcaataaagtagtgtctgtgttttacacagcagtgattcctatgttgaacccacttatctacagcttgagaaacaaggaagtcaaagatgccatccacaggactgtcactcagaggaagttttgcaaggcctaaattcttatccagaaggaattagggaggaaaatttaaaagaacagagtaattgtgtggcttcctaagattccaaaacacttgcaagtgtttgggggctgtttagcatccctttatccattcaaccatccaattattcacttatttagtcaatccatgtggatttatttggccctatatgtaatcttttccctataacatac

SEQ ID NO: 196 - protein, 269 aa, Homo sapiens
MIVLIRIDSRLHTPMYFFLSHLSFVDTCFSSVVSPKMLTDFFVKRKAISFLGCALQQWFFGFFVAADCFLLESMAYDCYVAICNPLLYSVAMSQRLCIQLVVGPYVIGLMNTMTHTTNAFCLPFCGPNVINPFFCDMSPLLSLVCADTRLNKLAVFIVAGAVGVFSGLTILISYIYILMAILRIRSADGRCKTFSTCSSHLTAVFISYGTLFFIYVHPSATFSLDLNKVVSVFYTAVIPMLNPLIYSLRNKEVKDAIHRTVTQRKFCKA

SEQ ID NO: 197 - DNA, 1384 bp, Homo sapiens
  source (1)..(1384)
  CDS (201)..(1184)
ttgtcctgcattaaatagttaataaataaaattcctaattttcaaattatttttgactccaattccagtaatttttccaaatcatggactgaagtcctataattctagatagtaagggagaaaaatctacaagcttcttagtaattgttgatttaattgatacccttgtcaacttgtgtgaatagaaaaaacactaagtgatgattttcccttctcatgatagtcaggctttcacctccgtggacatggaagtgggaaattgcaccatcctgactgaattcatcttgttgggtttctcagcagattcccagtggcagccgattctatttggagtgtttctgatgctctatttgataaccttgtcaggaaacatgaccttggttatcttaatccgaactgattcccacttgcatacacctatgtactttttcattggcaatctgtcttttttggatttctggtatacctctgtgtatacccccaaaatcctggccagttgtgtctcagaagataagcgcatttccttggctggatgtggggctcagctgtttttttcctgtgttgtagcctacactgaatgctatctcctggcagccatggcatatgaccgccatgcagcaatttgtaacccattgctttattcaggtaccatgtccaccgccctctgtactgggcttgttgctggctcctacataggaggatttttgaatgccatagcccatactgccaatacattccgcctgcatttttgtggtaaaaatatcattgaccactttttctgtgatgcaccaccattggtaaaaatgtcctgtacagacaccagggtctacgaaaaagtcctgcttggtgtggtgggcttcacagcactctccagcattcttgctatcctgatttcctatgtcaacatcctcctggctatcctgagaatccactcagcttcaggaagacacaaggcattctccacctgtgcttcccacctcatctcagtcatgctcttctatggatcattgttgtttatgtattcaaggcctagttccacctactccctagagagggacaaagtagctgctctgttctacaccgtgatcaacccactgctcaaccctctcatctatagcctgagaaacaaagatatcaaagaggccttcaggaaagcaacacagactatacaaccacaaacatgaaggttattctctttgcaaatgctgttattgaattttccagattattggcttataaatgtgttcatttgcatttctgtagttcaattaagttcaataagtcatatttaaaacattaaaatattgaccacatgactccttgttattcgtttgttatgatgtaaacaaaacaaagtaatatttaaaacttataatattgggtt

SEQ ID NO: 198 - protein, 327 aa, Homo sapiens [sequence omitted]

SEQ ID NO: 199 - DNA, 1318 bp, Homo sapiens
  source (1)..(1318)
  CDS (201)..(1118)
agaaatttagaattgaatacataattgcaaagcctgattgttgcaaaatgaagactttctaaaacaaacaattagattgttggttctagacttcacgaaacactgcaaatgtgatcttatgtaacataattctacatattcatgacagtaatgcaaactgagctcattttctttccccataggtgagattccttacagccatgcagaggagcaatcatacagtgactgagtttatactgctgggcttcaccacagacccaggaatgcagctgggcctcttcgtggtgttcctgggcgtgtactctctcactgtggtaggaaatagcaccctcatcgtgttgatctgtaatgactcctgcctccacacacccatgtattttttcactggaaatctgtcgtttctggatctctggtattcttctgtctacaccccaaagatcctagtgacctgcatctctgaagacaaaagcatctcctttgctggctgcctgtgtcagttcttcttctctgcagggctggcctatagtgagtgctacctgctggctgccgtggcttatgaccgctacgtggccatctccaagcccctgctttatgcccaggccatgtccataaagctgtgtgcattgctggtagcagtctcatattgtggtggctttattaactcttcaatcatcaccaagaaaacgttttcctttaacttctgccgtgaaaacatcattgatgactttttctgtgatttgcttcccttggtggagctggcctgtggcgagaagggcggctataaaattatgatgtacttcctgctggcctccaatgtcatctgccccgcagtgctcatcctggcctcctacctctttatcatcaccagtgtcttgaggatctcctcctccaagggctacctcaaagccttctccacatgctcctcccacctgacctctgtcactttatactatggctccattctctacatctacgctctccccagatctagctattcttttgatatggacaaaatagtttctacattttacactgtggtattccccatgttgaatctcatgatctacagcctaaggaataaggatgtgaaagaggctctgaaaaaacttctcccataaatcaagattatctccaccagaggagaaacaaagacgaccttagatggagtgttgtgtatttcaaacagagttaccattgtgctttatcgtgatcagtccccttcttgacacgtgagagttacagacatgtacaataagaaaattaggaaaatttcggacaaaaacatctgaatatataagaatttgaattgaatttccta

SEQ ID NO: 200 - protein, 305 aa, Homo sapiens
MQRSNHTVTEFILLGFTTDPGMQLGLFVVFLGVYSLTVVGNSTLIVLICNDSCLHTPMYFFTGNLSFLDLWYSSVYTPKILVTCISEDKSISFAGCLCQFFFSAGLAYSECYLLAAVAYDRYVAISKPLLYAQAMSIKLCALLVAVSYCGGFINSSIITKKTFSFNFCRENIIDDFFCDLLPLVELACGEKGGYKIMMYFLLASNVICPAVLILASYLFIITSVLRISSSKGYLKAFSTCSSHLTSVTLYYGSILYIYALPRSSYSFDMDKIVSTFYTVVFPMLNLMIYSLRNKDVKEALKKLLP

SEQ ID NO: 201 - DNA, 1318 bp, Homo sapiens
  source (1)..(1318)
  CDS (201)..(1118)
cttaagaaatttagaattgaatacataattgcaaagtcggttgcaaaatgaaaactttctaaaacaaacaattagattgttggttctagacttcaaagattactgcaaatgtgatcttatgtagcataattctacatattcatgactgtgattcagactgagctcatttcctttccccataggtgagattccttacagccatgcagaggagcaatcacacagtgactgagtttatactgctgggcttcaccacagacccagggatgcagctgggcctcttcgtggtgttcctgggcgtgtactctctcactgtggtaggaaatagcaccctcatcgtgttgatctgtaatgactcccacctccacacacccatgtattttgtcgttggaaatctgtcgtttctggatctctggtattcttctgtctacaccccaaagatcctagtgatctgcatctctgaagacaaaagcatctcctttgctggctgcctgtgtcagttcttcttctctgcagggctggcctatagtgagtgctgcttactggctgccatggcttatgaccgctacgtggccatctccaagcccctgctttatgcccaggccatgtccataaagctgtgtgcattgctggtagcagtctcatattgtggtggctttattaactcttcaatcatcaccaagaaaacgttttcctttaacttctgccgtgaaaacatcattgatgactttttctgtgatttgcttcccttggtggagctggcctgtggcgagaagggcggctataaaattatgatgtacttcctgctggcctccaatgtcatctgccccgcagtgctcatcctggcctcctacctctttatcatcaccagtgtcttgaggatctcctcctccaagggctacctcaaagccttctccacatgctcctcccacctgacctctgtcactttatactatggctccattctctacatctacgctctccccagatctagctattcttttgatatggacaaaatagtttctacattttacactgtggtattccccatgttgaatctcatgatctacagcctaaggaataaggatgtgaaagaggctctgaaaaaacttctcccataaatcaagattatctccaccagaggagaaacaaagacgaccttagatggagtgttgtgtatttcaaacagagttaccattgtgctttatcgtgatcagtccccttcttgacacgtgagagttacagacatgtacaataagaaaattaggaaaatttcggacaaaaacatctgaatatataagaatttgaattgaatttccta

SEQ ID NO: 202 - protein, 305 aa, Homo sapiens
MQRSNHTVTEFILLGFTTDPGMQLGLFVVFLGVYSLTVVGNSTLIVLICNDSHLHTPMYFVVGNLSFLDLWYSSVYTPKILVICISEDKSISFAGCLCQFFFSAGLAYSECCLLAAMAYDRYVAISKPLLYAQAMSIKLCALLVAVSYCGGFINSSIITKKTFSFNFCRENIIDDFFCDLLPLVELACGEKGGYKIMMYFLLASNVICPAVLILASYLFIITSVLRISSSKGYLKAFSTCSSHLTSVTLYYGSILYIYALPRSSYSFDMDKIVSTFYTVVFPMLNLMIYSLRNKDVKEALKKLLP

SEQ ID NO: 203 - DNA, 1333 bp, Homo sapiens
  source (1)..(1333)
  CDS (201)..(1133)
gaatcatcctaaacaaagccttcatttactgtagaactatatgtatacacatatacacaatagataaatatatatatatatatgtatattgcaatatctctggcatatgattgctcgtctttagtttgaatattttcagtgacagggaatttactacatccatcaaaaaactaaatccaggcacacatacacttgaagcaatggataaagaaaacagctcaatggtgactgagtttatcttcatgggcatcacccaggaccctcagatggagatcatcttcttcgtggtcttcctcatagtttacctggttaatgtagtggggaatattggtatgattatcctgattacaacagacactcagcttcacacacccatgtattttttcctctgcaacctctcctttgttgacctgggctactcctcagccattgcccccaggatgctggctgacttcctaacaaatcacaaagttatctccttctccagctgtgccacccagtttgctttttttgtaggttttgtggatgctgagtgctatgtcctggcagccatggcctatggtcgttttgtggccatttgtcgacccctccactatagcaccttcatgtccaagcaggtctgcttggctctcatgctgggctcttacctggctggtctagtgagtttagtagcccacactaccctcaccttcagcctgagttactgtggttccaatatcatcaatcatttcttctgcgaaatcccaccactcttggccctctcttgctcagacacctacatcagtgagatcttgctcttcagtctgtgtggcttcattgaattcagcaccatcctcatcatcttcatctcctatacctttatccttgttgcaatcatcagaatgcgttcagctgaaggccgccttaaggctttctccacctgcgggtctcaccttactggcatcaccctcttctatggcacagtcatgtttatgtacctgaggccaacatccagctactccctggaccaagacaagtgggcctctgtgttctacacggttatcatccccatgttaaatcccttgatctacagtttgcggaacaaggatgtgaaagctgctttcaaaaagctaattggaaaaaaatctcaataataacacaaaatgaaaatctgtttctgtcataggtaaatgacagtagtagaagggcatagaaaatgcaaataacttttcgataaacactacccaagttaccatctccttgctaagtgaatattaaattctgaagggtgggctctaatccttaactctgcaatctgaaagaaatataaactaaattagtatatttgaaagac

SEQ ID NO: 204 - protein, 310 aa, Homo sapiens
MDKENSSMVTEFIFMGITQDPQMEIIFFVVFLIVYLVNVVGNIGMIILITTDTQLHTPMYFFLCNLSFVDLGYSSAIAPRMLADFLTNHKVISFSSCATQFAFFVGFVDAECYVLAAMAYGRFVAICRPLHYSTFMSKQVCLALMLGSYLAGLVSLVAHTTLTFSLSYCGSNIINHFFCEIPPLLALSCSDTYISEILLFSLCGFIEFSTILIIFISYTFILVAIIRMRSAEGRLKAFSTCGSHLTGITLFYGTVMFMYLRPTSSYSLDQDKWASVFYTVIIPMLNPLIYSLRNKDVKAAFKKLIGKKSQ

SEQ ID NO: 205 - DNA, 964 bp, Homo sapiens
  source (1)..(964)
  CDS (201)..(764)
ttcctctcttaagtaaattttattgtgtatatttgaggattagcacgttatgctgtggggctcatatagatgtatacttacacatagatacatatagctaatacagttgttactatagtgaggcagattggcatattaacatatctatcatggtttgtttctcatcccagcaaatgagtcttctattctgagactaagatatgagaaactttacaccactgtctggatttattatcctgggattcacggatcacccagaattacagtgtcttctttttgtgttgtttcttctcatctatatgttcaccgttgttggaaatcttggcatgattctattaatcaagattgactcacatctccatactccaatgtactttttcctcagtaacttgtgccttgttgacttctgttattcttctgtcattgcccctaatatgctgataaatttctgggtggagaacccagtcatttcatttaatgaatgtgccactcaattcttcttttttggctcctttgctggcattgagggttttctgttggctgtcatggcctatgactgttatgtggccatctgcaagcctctgctttatacagtcctgatgtcaccccacctcagtgccctcctggtgttagccacatatcttttgggctttgtaaatgctgccattcacactggcttcaccttccagctgtcattctgccactccaatatcattaactattttttttgtgatattccacccctcctgaaactcttgttctgatacacacatcaatgaggttgtcatttttgcctttgccagttttaatgaattgagctgtctcctactgattcttgtttcctgtctctacatccttgctgccatcttgaagatccactctgcagaagggaggcacaaggccttctccacctgtgcttcccacttggcggtggtcactatcttctttgggacaatcctgttca

SEQ ID NO: 206 - protein, 187 aa, Homo sapiens [sequence omitted]

SEQ ID NO: 207 - DNA, 1348 bp, Homo sapiens
  source (1)..(1348)
  CDS (201)..(1148)
gaaagatacagattaaaacagacatatagggagacaatgttatgtaaaatttccgatgtgattattgaaacacgagaagtaattgtcacctacataaatagatgaatgagcgaatgataaatggatgaaacaaatgccaaatctgaatcagagagaaatcctcacattctttgtcactttcagtttcaagagataagaagatgttctccccaaaccacaccatagtgacagaattcattctcttgggactgacagacgacccagtgctagagaagatcctgtttggggtattccttgcgatctacctaatcacactggcaggcaacctgtgcatgatcctgctgatcaggaccaattcccacctgcaaacacccatgtatttcttccttggccacctctcctttgtagacatttgctattcttccaatgttactccaaatatgctgcacaatttcctctcagaacagaagaccatctcctacgctggatgcttcacacagtgtcttctcttcatcgccctggtgatcactgagttttacatccttgcttcaatggcattggatcgctatgtagccatttgcagccctttgcattacagttccaggatgtccaagaacatctgtgtctgtctggtcactatcccttacatgtatgggtttcttagtgggttctctcagtcactgctaacctttcacttatccttctgtggctcccttgaaatcaatcatttctactgcgctgatcctcctcttatcatgctggcctgctctgacacccgtgtcaaaaagatggcaatgtttgtagttgcaggctttaatctctcaagctctctcttcatcattcttctgtcctatcttttcatttttgcagcgatcttcaggatccgttctgctgaaggcaggcacaaagccttttctacgtgtgcttcccacctgacaatagtcactttgttttatggaaccctcttctgcatgtacgtaaggcctccatcagagaagtctgtagaggagtccaaaataactgcagtcttttatacttttttgagcccaatgctgaacccattgatctatagcctacggaacacagatgtaatccttgccatgcaacaaatgattaggggaaaatcctttcataaaattgcagtttaggcttgtgtttatttgcagtcacgaattgcttgtggagtaacaaactggcttttgaaatggaaaaacctagtgtagtcgtgatttatttaacatcatggactgtcagtaaccactttactttcttatccaaatgaaaaccttgaagattgatttcttagaaataaaagccttaatgttgagaaatttaaaatgttttattt

SEQ ID NO: 208 - protein, 315 aa, Homo sapiens
MFSPNHTIVTEFILLGLTDDPVLEKILFGVFLAIYLITLAGNLCMILLIRTNSHLQTPMYFFLGHLSFVDICYSSNVTPNMLHNFLSEQKTISYAGCFTQCLLFIALVITEFYILASMALDRYVAICSPLHYSSRMSKNICVCLVTIPYMYGFLSGFSQSLLTFHLSFCGSLEINHFYCADPPLIMLACSDTRVKKMAMFVVAGFNLSSSLFIILLSYLFIFAAIFRIRSAEGRHKAFSTCASHLTIVTLFYGTLFCMYVRPPSEKSVEESKITAVFYTFLSPMLNPLIYSLRNTDVILAMQQMIRGKSFHKIAV

SEQ ID NO: 209 - DNA, 1348 bp, Homo sapiens
  source (1)..(1348)
  CDS (201)..(1148)
gatacaaaaagagacagaaaacacacacatataaagagaaaacgttgtgcagaaattctgatgtgtttattgaaaaaagtaattggtgcctagatgaatagatgaatgagtgaatgataaatggatgaaacaaatgccaaatctggatcagagagaatcctcacattctttgtcactttcagttttcaagaaataagaagatgttgtccccaaaccacaccatagtgacagaattcattctcttaggactgacagacgacccagtgctagagaagatcctgtttggggtgttcctggcgatctacctaatcacactggcaggcaacctgtgcatgatcctgctgatcaggaccaattcccaactgcaaacacccatgtatttcttccttggtcacctctcctttgtagacatttgctattcttccaatgttactccaaatatgctgcacaatttcctctcagaacagaagaccatctcctacgctggatgcttcacacagtgtcttctcttcatcgccctagtgatcactgagttttacttccttgcttcaatggcattggatcgctatgtagccatttgcagccctttacattacagttccaggatgtccaagaacatttgcatctctctggtcactgtgccttacatgtatggcttccttaatgggctctctcagacactgctgacctttcacttatccttctgtggctcccttgaaatcaatcatttctactgcgctgatcctcctcttatcatgctggcctgctctgacacccgtgtcaaaaagatggcaatgtttgtagttgcaggctttactctctcaagctctctcttcatcattcttctgtcctatcttttcatttttgcagcgatcttcaggatccgttctgctgaaggcaggcacaaagccttttctacgtgtgcttcccacctgacaatagtcactttgttttatggaaccctcttctgcatgtacgtaaggcctccatcagagaagtctgtagaggagtccaaaataattgcagtcttttatacttttttgagcccaatgctgaacccattgatctatagcctacggaacagagatgtaatccttgccatacaacaaatgattaggggaaaatccttttgtaaaattgcagtttaggcctgtgtttatttgtaatccctaagtgcctgtggggtaacaaactgaaatggaaaaacctagtgtagttattatttaacagtatgggctcttagtaaccactttagtttcttctcaaaattaacactttgaagatttagtttttaaaaataaaaagcttaatgttgaaattaataatgttttatttgtcagagattcta

SEQ ID NO: 210 - protein, 315 aa, Homo sapiens
MLSPNHTIVTEFILLGLTDDPVLEKILFGVFLAIYLITLAGNLCMILLIRTNSQLQTPMYFFLGHLSFVDICYSSNVTPNMLHNFLSEQKTISYAGCFTQCLLFIALVITEFYFLASMALDRYVAICSPLHYSSRMSKNICISLVTVPYMYGFLNGLSQTLLTFHLSFCGSLEINHFYCADPPLIMLACSDTRVKKMAMFVVAGFTLSSSLFIILLSYLFIFAAIFRIRSAEGRHKAFSTCASHLTIVTLFYGTLFCMYVRPPSEKSVEESKIIAVFYTFLSPMLNPLIYSLRNRDVILAIQQMIRGKSFCKIAV

SEQ ID NO: 211 - DNA, 1168 bp, Homo sapiens
  source (1)..(1168)
  CDS (201)..(968)
acattctcatttcccactgaaggaaattatgagaagaaaccgtacattggtgactgagttcattctcctgggactggccaatcactgggaattacagattttcctcttcacgctgtttctcaccatttacatggtcacggtggcaggaaatcttggcatgattgccctcatccaggccaacgccccggctccacacgcccatgtactttttcctgagcaacttatcctttgtggatctgtgcttctcttccaatgtgactccaaggatgctggagattttcctttcagagaagaaaagcatttcctatcctgcccgtcttgtgcagtgttacctttttatcaccttggtccacgttgagctctacatcctggctgtgatggcctttgaccggtacatggccatctgcaaccctctgctttatggcagcagaatgtccaagagcgtgtgctctttcctcatcacagtgctttatgtgtatggagcactcactggcctgatggagactatgtggacctacaacctagccttctgtggccccagtgaaattaatcacttctactgtgtggacccaccactgattaagctggcttgttctgacacctacaacaaggaggtgtcaatgtttgttgtggctggtttcaacttcacttatcctctccttatcatcctcatttcctatctctacatatttcctgccaccctaaggatctgctctacagaaggcaggcacaaagctttttctacctgtggctcccatctgacagccgttactattttctattcagctcttttcttcatgtatctcagacgtccatcagaagagtccatggagcaggggaaaatggtagctgtattttataccactgtaatccccatgttgaatcccatgatctacagtctgaggaacaaagatgtgaaagaggcattatgcaaagaactgttcaaaagaaaattgttttctaaataaacattactactgatttttgttgtgttgtcattttatttaccctatgatttttcatagagcatagtctgatacaaatatatccaaaattatatattttcctagaagtgttggggaatttttatgaagtgtgaatacaagaaaaatgagtatttacatcaattaacaggaattttgaattcaatatagttttgcctgcccat

SEQ ID NO: 212 - protein, 255 aa, Homo sapiens [sequence omitted]

SEQ ID NO: 213 - DNA, 1336 bp, Homo sapiens
  source (1)..(1336)
  CDS (201)..(1136)
cataaaaggtagagagctgctttgaatatccctaatttagtttacctgaaacaaagttcagtagaaatagaatgaggaaaactgccaaaaagaggggacgtttttggtaaaagatcattactgtaatagtaataatcatgttgctattgtattgtaatccaatatatatgtaaagttcctttcttccaccgaaggaaattatgagaagaaactgcacgttggtgactgagttcattctcctgggactgaccagtcgccgggaattacaaattctcctcttcacgctgtttctggccatttacatggtcacggtggcagggaaccttggcatgattgtcctcatccaggccaacgcctggctccacatgcccatgtactttttcctgagccacttatccttcgtggatctgtgcttctcttccaatgtgactccaaagatgctggagattttcctttcagagaagaaaagcatttcctatcctgcctgtcttgtgcagtgttacctttttatcgccttggtccatgttgagatctacatcctggctgtgatggcctttgaccggtacatggccatctgcaaccctctgctttatggcagcagaatgtccaagagtgtgtgctccttcctcatcacggtgccttatgtgtatggagcgctcactggcctgatggagaccatgtggacctacaacctagccttctgtggccccaatgaaattaatcacttctactgtgcggacccaccactgattaagctggcttgttctgacacctacaacaaggagttgtcaatgtttattgtggctggctggaacctttctttttctctcttcatcatatgtatttcctacctttacattttccctgctattttaaagattcgctctacagagggcaggcaaaaagctttttctacctgtggctcccatctgacagctgtcactatattctatgcaacccttttcttcatgtatctcagacccccctcaaaggaatctgttgaacagggtaaaatggtagctgtattttataccacagtaatccctatgctgaaccttataatttatagccttagaaataaaaatgtaaaagaagcattaatcaaagagctgtcaatgaagatatacttttcttaaaaatcagtattcttttggtttctaaagcccttcctagacttttttctttagctgagaaatatagtgcatcaatggagaacattgcagttttcaaaactttatttatttttattttattattatattttgagatggagtttctctctgtcttaggctggagtgcagtggtgtgatctcggctcactgcaacctttgcctcc

SEQ ID NO: 214 - protein, 311 aa, Homo sapiens
MRRNCTLVTEFILLGLTSRRELQILLFTLFLAIYMVTVAGNLGMIVLIQANAWLHMPMYFFLSHLSFVDLCFSSNVTPKMLEIFLSEKKSISYPACLVQCYLFIALVHVEIYILAVMAFDRYMAICNPLLYGSRMSKSVCSFLITVPYVYGALTGLMETMWTYNLAFCGPNEINHFYCADPPLIKLACSDTYNKELSMFIVAGWNLSFSLFIICISYLYIFPAILKIRSTEGRQKAFSTCGSHLTAVTIFYATLFFMYLRPPSKESVEQGKMVAVFYTTVIPMLNLIIYSLRNKNVKEALIKELSMKIYFS

SEQ ID NO: 215 - DNA, 1099 bp, Homo sapiens
  source (1)..(1099)
  CDS (201)..(899)
tcttgggtctaacaagccgtccagagctgcgagttgctttcttggcactgttcctttttgtctacatagccactgtggtaggaaacttggggatgattattttaatcaaagttgattctcgacttcacactcccatgtaattttttctctccagtttgtccattctagatctgtgtttctccacaaatttcactcccaaaatgctagaaaatttcttatcagagaagaagaccatttcctatgcaggttgtttgatgcagtgctatgttgtcattgctgtggtccttgcagagcactgcatgttggcagtcatggcatatgaccgctatatggccatctgtaatccattgctctacagtagcaaaatgtcccaaggtgtttgtgtccacctggtcattgtcccttatgtctatggctttcttctcagtgtgatggaaaccttaaggacctacaacctctccttctgtggaacaaatgaaatcaaccatttctactgtgctgatcctcctcttatcaaactggcatgctctgacacgtacagcaaggagctgtccatgtacatagtagccggctacagcaacgtccagtctcttctaatcattctcacatcctacatgttcatccttgtcgctatcctcagaagccattctgcagagggaaggaaaaaagctttttccacatgtggttcccacctgacagttgtcacaatcttctatggaaccctcttctgcatgcatttgagacgtcccacagacgagtccgtggagcaggggaaaatggtggctgtgttttacaccacagtgatactcatgctgaactccatgatctatggcctcaggaacaaggatgtgaaagaggcgttgaaaaaagcaataggaaaacaaacattgggaaaataaaaatgctaagctatcattaaaaatttgtgaagtaatgagatataatatcattgggttagatgtcacattttaggctacatttgcacaattcatttctaattttctgttaggtagctgactgagttaagcttcctgaaactagcgggttgaaacgggaagagtagaagattccatttaggcttgcacggtggctcacgcct

SEQ ID NO: 216 - protein, 232 aa, Homo sapiens
MLENFLSEKKTISYAGCLMQCYVVIAVVLAEHCMLAVMAYDRYMAICNPLLYSSKMSQGVCVHLVIVPYVYGFLLSVMETLRTYNLSFCGTNEINHFYCADPPLIKLACSDTYSKELSMYIVAGYSNVQSLLIILTSYMFILVAILRSHSAEGRKKAFSTCGSHLTVVTIFYGTLFCMHLRRPTDESVEQGKMVAVFYTTVILMLNSMIYGLRNKDVKEALKKAIGKQTLGK

SEQ ID NO: 217 - DNA, 1324 bp, Homo sapiens
  source (1)..(1324)
  CDS (201)..(1124)
ctacatttattcatcacagagcctgttacataacaggcactgagaaaagatctgtgaaaagaatgcaaagtgtgctaatagatattgtataaagggagcatctgaaggtataaattaataaataaacattctaatatttcctttattttattttagttatcaaaaagttttgtaactgatattgacttagaattcagaaaatgctcaatttcaccgatgtgacagagttcattcttttggggctaacgagccgtcgagaatggcaagttctcttcttcatcatctttcttgtggtctacatcatcaccatggtgggcaatatcggcatgatggtgttaatcaaggtcagtcctcagcttaacaaccccatgtactttttcctcagtcacttgtcatttgttgatgtgtggttttcttccaatgtcacccctaaaatgttggaaaacctgttttcagataaaaaaacaattacttatgctggttgtttagtacagtgtttcttcttcattgctcttgtccatgtggaaatttttattcttgctgcgatggcctttgatagatacatggcaattgggaatcctctgctttatggcagtaaaatgtcaagggttgtctgtattcgactgattactttcccttacatttatggttttctgacgagtctggcagcaacattatggacttacggcttgtacttctgtggaaaaattgagatcaaccatttctactgtgcagatccacctctcatcaaaatggcctgtgccgggacctttgtaaaagaatatacaatgatcatacttgccggcattaacttcacatattccctgactgtaattatcatctcttacttattcatcctcattgccattctgcgaatgcgctcagcagaaggaaggcagaaggccttttccacatgtgggtcccatctgacagctgtcattatattctatggtactctgatcttcatgtatctcagacgtcccacagaggagtctgtggagcaggggaagatggtggctgtgttctataccacagtgatccccatgttgaatcccatgatctacagtctgaggaacaaggatgtgaaaaaggccatgatgaaagtgatcagcagatcatgttaaacaaaataaaatcaaatttgatttaattttatcttctattatttgtttggaaaaagtttattacccagtacctaggaacattaagataaagatattctgtgggttgaaaagaaaaataaaagtggtacaaattgagaaaatataaggaggaatgattcatttctgttgatgtgagtatggagattaattacatacaaata

SEQ ID NO: 218 - protein, 307 aa, Homo sapiens
MLNFTDVTEFILLGLTSRREWQVLFFIIFLVVYIITMVGNIGMMVLIKVSPQLNNPMYFFLSHLSFVDVWFSSNVTPKMLENLFSDKKTITYAGCLVQCFFFIALVHVEIFILAAMAFDRYMAIGNPLLYGSKMSRVVCIRLITFPYIYGFLTSLAATLWTYGLYFCGKIEINHFYCADPPLIKMACAGTFVKEYTMIILAGINFTYSLTVIIISYLFILIAILRMRSAEGRQKAFSTCGSHLTAVIIFYGTLIFMYLRRPTEESVEQGKMVAVFYTTVIPMLNPMIYSLRNKDVKKAMMKVISRSC

SEQ ID NO: 219 - DNA, 1333 bp, Homo sapiens
  source (1)..(1333)
  CDS (201)..(1133)
tgttatatattcagttcattttatgtatagtatatttaaaccctgtattgtacatttttgcaaagtgtacattgtttttaaattatttgaattaaaataaggacaaacacaactcagtttcaagaataaaacaaattcatttactttccttttgaaacaatttctccataggcaacacagacttggcctatactaaggcaatgcctaatttcacggatgtgacagaatttactctcctggggctgacctgtcgtcaggagctacaggttctcttttttgtggtgttcctagcggtttacatgatcactctgttgggaaatattggtatgatcattttgattagcatcagtcctcagcttcagagtcccatgtactttttcctgagtcatctgtcttttgcggacgtgtgcttctcctccaacgttacccccaaaatgctggaaaacttattatcagagacaaaaaccatttcctatgtgggatgcttggtgcagtgctactttttcattgccgttgtccacgtggaggtctatatcctggctgtgatggcctttgacaggtacatggccggctgcaaccctctgctttatggcagtaaaatgtctaggactgtgtgtgttcggctcatctctgtgccttatgtctatggattctctgtcagcctaatatgcacactatggacttatggcttatacttctgtggaaactttgaaatcaatcacttctattgtgcagatccccctctcatccagattgcctgtgggagagtgcacatcaaagaaatcacaatgattgttattgctggaattaacttcacatattccctctcggtggtcctcatctcctacactctcattgtagtagctgtgctacgcatgcgctctgccgatggcaggaggaaggcgttctccacctgtgggtcccacttgacggctgtttctatgttttatgggacccccatcttcatgtatctcaggagacccactgaggaatccgtagagcagggcaaaatggtggctgtgttttacaccacagtaattcctatgttgaatcccatgatctacagtctgagaaataaggatgtaaaagaagcagtcaacaaagcaatcaccaagacatatgtgaggcagtaaaactgtagtggatattgttgtccctattataaatagggtcctgttataaatggtcacatgtaaaagtcctagctcagaaaacagtatcaaaaggtaactctttcacacactaagaggtctgatgtaacagggtgatgttttaccccttgtatggactctaattactaagcatattttctcctatatgtgcgccaatatta

SEQ ID NO: 220 - protein, 310 aa, Homo sapiens
MPNFTDVTEFTLLGLTCRQELQVLFFVVFLAVYMITLLGNIGMIILISISPQLQSPMYFFLSHLSFADVCFSSNVTPKMLENLLSETKTISYVGCLVQCYFFIAVVHVEVYILAVMAFDRYMAGCNPLLYGSKMSRTVCVRLISVPYVYGFSVSLICTLWTYGLYFCGNFEINHFYCADPPLIQIACGRVHIKEITMIVIAGINFTYSLSVVLISYTLIVVAVLRMRSADGRRKAFSTCGSHLTAVSMFYGTPIFMYLRRPTEESVEQGKMVAVFYTTVIPMLNPMIYSLRNKDVKEAVNKAITKTYVRQ

SEQ ID NO: 221 - DNA, 1351 bp, Homo sapiens
  source (1)..(1351)
  CDS (201)..(1151)
  modified_base (1)..(22): a, t, c, g, unknown or other
nnnnnnnnnnnnnnnnnnnnnnaccaagtttacttattagacctagaagcttgagtttaataactgagttagagtaataaacaattcaaagaaatgttatcagggaattgtcctagccatataagggcagtcctgcaaataattctttaaagtttttaacctctcttttcccccaaacagatgaatttccaaactctgacatggctcctgaaaatttcaccagagtcactgagtttattcttacaggtgtctctagctgtccagagctccagattcccctcttcctggtctttctggtgctctatgggctgaccatggcagggaacctgggcatcatcaccctcaccagtgttgactctcgacttcaaacccccatgtactttttcctgcaacatctggctctcattaatcttggtaactctactgtcattgcccctaaaatgctgattaactttttagtaaagaagaaaactacctcattctatgaatgtgccacccaactgggagggttcttgttctttattgtatcggaggtaatcatgctggctttgatggcctatgaccgctatgtggctatttgtaaccctctgctgtacatggtggtggtgtctcggcggctctgcctcctgctggtctccctcacatacctctatggcttttctacagctattgtggtttcatcttatgtattctctgtgtcttattgctcttctaatataatcaatcatttttactgtgataatgttcctctgttagcattatcttgctctgatacttacttaccagaaacagttgtctttatatctgcagcaacaaatgtggttggttccttgattatagttctagtatcttatttcaatattgttttgtctattttaaaaatatgttcatcagaaggaaggaaaaaagccttttctacctgtgcttcacatatgatggcagtcacaattttttatgggacattgctattcatgtatgtgcagccccgaagtaaccattcactggatactgatgataagatggcttctgtgttttacacgttggtaattcctatgctgaatcccttgatctacagcctgaggaataaggatgtgaagactgctctacagagattcatgacaaatctgtgctattcctttaaaacaatgtaattttaaacagtacaggtaaatgaggagagagttaatataagctgccattatgtaaaagaaaatgtaggaaaaagaaaaggtaggtagccgagttacaggttcgtaagcaatcataagaattacaacaagatacaatttagggagctttgaattaaaaaataaactgaaaccctttgagttgtgaggttaagttagaaaaa

SEQ ID NO: 222 - protein, 316 aa, Homo sapiens
MAPENFTRVTEFILTGVSSCPELQIPLFLVFLVLYGLTMAGNLGIITLTSVDSRLQTPMYFFLQHLALINLGNSTVIAPKMLINFLVKKKTTSFYECATQLGGFLFFIVSEVIMLALMAYDRYVAICNPLLYMVVVSRRLCLLLVSLTYLYGFSTAIVVSSYVFSVSYCSSNIINHFYCDNVPLLALSCSDTYLPETVVFISAATNVVGSLIIVLVSYFNIVLSILKICSSEGRKKAFSTCASHMMAVTIFYGTLLFMYVQPRSNHSLDTDDKMASVFYTLVIPMLNPLIYSLRNKDVKTALQRFMTNLCYSFKTM

SEQ ID NO: 223 - DNA, 1051 bp, Homo sapiens; identical to SEQ ID NO: 143
  source (1)..(1051)
  CDS (201)..(851)

SEQ ID NO: 224 - protein, 216 aa, Homo sapiens [sequence omitted]

SEQ ID NO: 225 - DNA, 1330 bp, Homo sapiens
  source (1)..(1330)
  CDS (201)..(1130)
tcaccagggaggcaatttgagtaaacctccaaaactcaaaactttttcctatctcagaaaagatcctcaaatcacaacccagtagaatccaagaatttattatattacatattacagtggagaagtttaacaaatttaaagatgtattaataaaaattgttttcttttcaggtaatgtaattaaccatcatttgaaatacatggcgaatagaaacaatgtgacagagtttattctattggggcttacagagaatccaaaaatgcagaaaatcatatttgttgtgttttctgtcatctacatcaacgccatgataggaaatgtgctcattgtggtcaccatcactgccagcccatcactgagatcccccatgtactttttcctggcctatctctcctttattgatgcctgctattcctctgtcaatacccctaagctgatcacagattcactctatgaaaacaagactatcttattcaatggatgtatgactcaagtctttggagaacattttttcagaggtgttgaggtcatcctacttactgtaatggcctatgaccactatgtggccatctgcaagcccttgcactataccaccatcatgaagcagcatgtttgtagcctgctagtgggagtgtcatgggtaggaggctttcttcatgcaaccatacagatcctcttcatctgtcaattacctttctgtggtcctaatgtcatagatcactttatgtgtgatctctacactttgatcaatcttgcctgcactaatacccacactctaggactcttcattgctgccaacagtgggttcatatgcctgttaaactgtctcttgctcctggtctcctgcgtggtcatactgtactccttaaagacccacagcttagaggcaaggcatgaagccctctctacctgtgtctcccacatcacagttgtcatcttatcctttataccctgcatatttgtgtacatgagacctccagctactttacccattgataaagcagttgctgtattctacactatgataacttctatgttaaaccccttaatctacaccttgaggaatgctcaaatgaaaaatgccattaggaaattgtgtagtaggaaagctatttcaagtgtcaaataaatgtgactggagcccaacaagattcaactgaggcaagggtcaaaaggacattttgggtaatgccagcaaggaatacttatttgataaataaaataattaaccactgtgatccatagatgatgccttgaggggagtcaaaatgggttcaggaaaaaggagaaaacctaaccatgtatcattctcacaaactgggaaaattc

SEQ ID NO: 226 - protein, 309 aa, Homo sapiens
MANRNNVTEFILLGLTENPKMQKIIFVVFSVIYINAMIGNVLIVVTITASPSLRSPMYFFLAYLSFIDACYSSVNTPKLITDSLYENKTILFNGCMTQVFGEHFFRGVEVILLTVMAYDHYVAICKPLHYTTIMKQHVCSLLVGVSWVGGFLHATIQILFICQLPFCGPNVIDHFMCDLYTLINLACTNTHTLGLFIAANSGFICLLNCLLLLVSCVVILYSLKTHSLEARHEALSTCVSHITVVILSFIPCIFVYMRPPATLPIDKAVAVFYTMITSMLNPLIYTLRNAQMKNAIRKLCSRKAISSVK

SEQ ID NO: 227 - DNA, 1330 bp, Homo sapiens
  source (1)..(1330)
  CDS (201)..(1130)
actaagaagtcagctagagaagtttacgggtacctattcctagagagttttgggaagagaaggaatcatctgtgagatggcagagcagtgaaaaggcaaagttttggactatttgattcttttatgcttcttttttttcctttcttttttctaaaggtaaaatattccttcctggaggttttatcacccacactacatagatggagaagaaaaagaatgtgactgaattcattttaataggtcttacacagaaccccataatggagaaagtcacgtttgtagtatttttggttctttacatgataacactttcaggcaacctgctcattgtggttaccattaccaccagccaggctctgagctcccccatgtacttcttcctgacccacctttctttgatagacacagtttattcttcttcttcagctcctaagttgattgtggattcctttcaagagaagaaaatcatctcctttaatgggtgtatggctcaagcctatgcagaacacatttttggtgctactgagatcatcctgctgacagtgatggcctgtgactgctatgtggccatctgcaaacctctgaactacacaaccattatgagccacagcctgtgcattctcctggtggcagtggcctgggtgggaggatttcttcatgcaactattcagattctctttacagtatggctgcccttctgtggccccaatgtcataggccacttcatgtgtgacttgtacccattgttaaaacttgtttgcatagacactcatacccttggtctctttgttgctgtgaacagtgggtttatctgcttattaaacttccttatcttggtggtatcctatgtgatcatcttgagatctttaaagaacaatagcttggaggggaggtgtaaagccctctccacctgtatttctcacatcatagtagttgtcttattctttgtgccctgtatatttgtgtatctgcgctcagtgaccactctgcccattgataaagctgttgctgtattttatactatggtggtcccaatgttaaatcccgtggtctacacactcagaaatgctgaggtaaaaagtgcaataaggaagctttggagaaaaaaagtgacttcagataatgattaaataagaccattgagcactcaacatagaggtaataggtatttaagcttcttgatttgtagatgaatatgtcaactctaacaaggggctggctaatgcttgcagatagtcagtaaagcataaagctaaagcttggactgtaaagcttactgtctcttatcccacactcttgtcatcaccactattgctttttaattaataca

SEQ ID NO: 228 - protein, 309 aa, Homo sapiens
MEKKKNVTEFILIGLTQNPIMEKVTFVVFLVLYMITLSGNLLIVVTITTSQALSSPMYFFLTHLSLIDTVYSSSSAPKLIVDSFQEKKIISFNGCMAQAYAEHIFGATEIILLTVMACDCYVAICKPLNYTTIMSHSLCILLVAVAWVGGFLHATIQILFTVWLPFCGPNVIGHFMCDLYPLLKLVCIDTHTLGLFVAVNSGFICLLNFLILVVSYVIILRSLKNNSLEGRCKALSTCISHIIVVVLFFVPCIFVYLRSVTTLPIDKAVAVFYTMVVPMLNPVVYTLRNAEVKSAIRKLWRKKVTSDND

SEQ ID NO: 229 - DNA, 1348 bp, Homo sapiens
  source (1)..(1348)
  CDS (201)..(1148)
cagggcaagatgggctctttgggtgaggaactcaatagagacttactaaatatttattatgtgtaaatcactattcaggatacagcaatgaagatgtgccctgtgacacaatggatgtaatcatattcctgatcactatttcgttacaggccctgtttccctgagctctcacctctgatacaagccttaaagaagagtaaatgagacagaataacaatattacagaatttgtcctcctgggcttttctcaggatcctggtgtgcaaaaagcattatttgtcatgtttttactcacatacttggtgacagtggtggggaacctgctcattgtggtggatattattgccagcccttccttgggttccccaatgtatttcttccttgcctgcctgtcatttatagatgctgcatattccactaccatttctcccaagttaattgtaggcttattctgtgataaaaagactatttccttccaaggttgcatgggccagctatttatagaccatttctttggtggggctgaggtcttccttctggtggtgatggcctgtgatcgctatgtggccatctgtaagccactgcactatttgaccatcatgaatcgacaggtttgcttccttctgttggtggtggccatgattggaggttttgtacattctgcgtttcaaattgttgtgtacagtctccctttctgtggtcccaatgtcattgttcatttcagttgtgacatgcacccattactggaactggcatgcactgacacctactttataggcctcactgttgttgtcaatagtggagcaatctgtatggtcattttcaaccttctgttaatctcctatggagtcatcctaagctcccttaaaacttacagtcaggaaaagaggggtaaagccttgtctacctgcagctccggcagtaccgttgttgtcctcttttttgtaccctgtattttcatatatgttagacctgtttcaaactttcctactgataagttcatgactgtgttttataccattatcacacacatgctgagtcctttaatatatacgttgagaaattcagagatgagaaatgctatagaaaaactcttgggtaaaaagttaactatatttattataggaggagtgtccgtcctcatgtaggtaaggaggtatgtagtcaaggtcttcccagtgaagttttcaggtttctaagggcaagtcaaggatcccaaagaaagaagacaggatttggatgctcctagctcaattacaaagtcatcccatcatgacatctgattgaagttcaagatctcaacttctacatcgagactgagtgtggatggggctccttgggggcgggt

SEQ ID NO: 230 - protein, 315 aa, Homo sapiens
MRQNNNITEFVLLGFSQDPGVQKALFVMFLLTYLVTVVGNLLIVVDIIASPSLGSPMYFFLACLSFIDAAYSTTISPKLIVGLFCDKKTISFQGCMGQLFIDHFFGGAEVFLLVVMACDRYVAICKPLHYLTIMNRQVCFLLLVVAMIGGFVHSAFQIVVYSLPFCGPNVIVHFSCDMHPLLELACTDTYFIGLTVVVNSGAICMVIFNLLLISYGVILSSLKTYSQEKRGKALSTCSSGSTVVVLFFVPCIFIYVRPVSNFPTDKFMTVFYTIITHMLSPLIYTLRNSEMRNAIEKLLGKKLTIFIIGGVSVLM

SEQ ID NO: 231 - DNA, 1300 bp, Homo sapiens
  source (1)..(1300)
  CDS (201)..(1100)
aacacctgagagtaccaaattgggtctttttcaacttgcaatttccaaagtctatgacagattggacatagatactgcatacacatttttaattgaatgagtaaatacaatattaaaatcataatgtatttaaagttttccccccttgttttataggtaaactgcttatatgatctgaagtaagcagctgtaaagaatagatggagccaaggaaaaatgtgactgactttgtcctcttgggcttcacacagaatccaaaggagcagaaagtactttttgttatgttcttgctcttctacattttgaccatggtgggcaacctgctcattgtagtgaccgtaactgtcagtgagaccctgggctcaccaatgtccttctttcttgctggcttaacatttatagatatcatttattcttcatccatttcccccagattgatttcagacttgttctttgggaataattccatatccttccaatctttcatggcccagctctttatcgagcacctttttggtgggtcagaggtctttctcctgttggtgatggcctatgaccgctatgtggccatctgtaagcccttgcattatttggttatcatgagacaatgggtgtgtgttttgctgctggtagtgtcctgggttggaggatttctgcaatcagtatttcaacttagcattatttatgggctcccattctgtggccccaatgtcattgatcattttttctgtgacatgtatcccttattgaaactggcctgcactgacacccatgttattggcctcttagtggtggccaatggaggactgtcttgcactattgcgtttctgctcttactcatctcttatggtgtcatcctgcactctctaaagaaacttagtcagaaagggaggcaaaaagcccactcaacctgcagttcccacatcactgtggttgtcttcttctttgttccttgtatttttatgtgtgctagacctgctaggaccttctccattgacaaatcagtgagtgtgttttatacagtcataaccccaatgctgaaccccttaatctacactctgagaaattctgagatgacaagtgctatgaagaagctttagagcagagacctcatatcaagtagtacataagtgagttacccaccaggaagagagccatttgactttacagccctctccttgggacccaggagttttttaaaatctgatgccatattccctttcttcaaagcatttacaattattattaaagaatgaacaatatgattgtgttaatagtaacagtctacctctctgctaga

SEQ ID NO: 232 - protein, 299 aa, Homo sapiens
MEPRKNVTDFVLLGFTQNPKEQKVLFVMFLLFYILTMVGNLLIVVTVTVSETLGSPMSFFLAGLTFIDIIYSSSISPRLISDLFFGNNSISFQSFMAQLFIEHLFGGSEVFLLLVMAYDRYVAICKPLHYLVIMRQWVCVLLLVVSWVGGFLQSVFQLSIIYGLPFCGPNVIDHFFCDMYPLLKLACTDTHVIGLLVVANGGLSCTIAFLLLLISYGVILHSLKKLSQKGRQKAHSTCSSHITVVVFFFVPCIFMCARPARTFSIDKSVSVFYTVITPMLNPLIYTLRNSEMTSAMKKL

SEQ ID NO: 233 - DNA, 1297 bp, Homo sapiens
  source (1)..(1297)
  CDS (201)..(1097)
aaaagaaaccactgcagaatccagtacagagcaaagcaggcagatcaagatgattctaccaggaagcattcctctgtaactatctagatctctttcttcttttccatttcattcatctaaacacaggtaatttacatgcatattaaatttaaccacttatttcttttcacggacacccaagagttgattcctccccaggaatgagaaatcacacaatggtgactgaattcatccttctgggaatccctgagacagagggcctagagacagcccttttattcctgttctcctcattttatttatgcaccctcttgggaaacgtgcttatccttacagctatcatctcctccactcgacttcacactcctatgtattttttcttgggaaacctctccatctttgacctgggtttctcttcaacgactgttcccaagatgttgttctacctttcggggaacagccatgctatctcgtatgcaggctgcgtgtcccagcttttcttctaccatttcctaggctgtactgagtgtttcctctacacagtgatggcctgtgaccgctttgttgccatatgttttcctttgagatacacggtcatcatgaaccacagggtgtgctttatgttggccacggggacctggatgattggctgtgtccatgccatgatcctaactcccctcaccttccagttaccttactgtggccctaacaaggtgggctattacttctgtgatattcctgcagtgttacctctagcctgtaaggacacatccttagcccagagggtaggttttacaaatgttggtcttttgtctctcatttgcttttttctcatccttgtttcctatacttgcattgggatttccatatcaaaaatccgctcagcagagggcaggcagcgggccttctccacctgcagcgctcacctcactgcaatcctttgtgcttatgggccagtcatcgttatctatctacaacccaatcccagtgccttgcttggttccataattcagatattgaataatctggtaaccccaatgttgaatccactaatctatagccttaggaataaggatgtaaaatcagatcagccctgaggaatgtatttcccaagaaaagctttgctctgggaaataaatgagaacatttaaagctttgctggatttaagattttgattacattttgaagtttgactctccactccctgagaaaatttcccatctgctgctgccaaggcaagttgaaacgaaatgtactccaaatcaatctactacttaacctcgctcttttaaaata

SEQ ID NO: 234 - protein, 298 aa, Homo sapiens
MRNHTMVTEFILLGIPETEGLETALLFLFSSFYLCTLLGNVLILTAIISSTRLHTPMYFFLGNLSIFDLGFSSTTVPKMLFYLSGNSHAISYAGCVSQLFFYHFLGCTECFLYTVMACDRFVAICFPLRYTVIMNHRVCFMLATGTWMIGCVHAMILTPLTFQLPYCGPNKVGYYFCDIPAVLPLACKDTSLAQRVGFTNVGLLSLICFFLILVSYTCIGISISKIRSAEGRQRAFSTCSAHLTAILCAYGPVIVIYLQPNPSALLGSIIQILNNLVTPMLNPLIYSLRNKDVKSDQP

SEQ ID NO: 235 - DNA, 1336 bp, Homo sapiens
  source (1)..(1336)
  CDS (201)..(1136)
ctggtactggaataagaaagtgctattcctcttcaaagacctatactgaagcaaaaggaagttataaaatataaaaaataatttaaccctattgttcttaatcagaaaaatatagttgccatatttcatataaaacatgctcacagtaaatgctatctcccttcctttctgtaagaacagagccccatatatgagaagaaatgtccaacgccaccctactgacagcgttcatcctcacgggccttccccatgccccagggctggacgcccccctctttggaatcttcctggtggtttacgtgctcactgtgctggggaacctcctcatcctgctggtgatcagggtggattctcacctccacacccccatgtactacttcctcaccaacctgtccttcattgacatgtggttctccactgtcacggtgcccaaaatgctgatgaccttggtgtccccaagcggcaggactatctccttccacagctgcgtggctcagctctattttttccacttcctggggagcaccgagtgtttcctctacacagtcatgtcctatgatcgctacctggccatcagttacccgctcaggtacaccaacatgatgactgggcgctcgtgtgccctcctggccaccggcacttggctcagtggctctctgcactctgctgtccagaccatattgactttccatttgccctactgtggacccaaccagatccagcactacttctgtgacgcaccgcccatcctgaaactggcctgtgcagacacctcagccaacgagatggtcatctttgtgaatattgggctagtggcctcgggctgctttgtcctgatagtgctgtcctatgtgtccatcgtctgttccatcctgcggatccgcacctcagaggggaggcacagagcctttcagacctgtgcctcccactgtatcgtggtcctttgcttctttggccctggtcttttcatttacctgaggccaggctccagggacgccttgcatggggttgtggccgttttctacaccacgctgactcctcttttcaaccctgttgtgtacaccctgagaaacaaggaggtaaagaaagctctgttgaagctgaaaaatgggtcagtatttgctcagggtgaatagttaagaaaggccatatatggctaacttttctttttttatttgtaattaaattaaaccttcaacataagcattatacttgaatggagcatttcaattattcagtcttaatttttaattggacagttaattaatttttcatttttttctgcagagtgtttgttagaatcctagttaaagcagccatttcacggtgataatct

SEQ ID NO: 236 - protein, 311 aa, Homo sapiens
MSNATLLTAFILTGLPHAPGLDAPLFGIFLVVYVLTVLGNLLILLVIRVDSHLHTPMYYFLTNLSFIDMWFSTVTVPKMLMTLVSPSGRTISFHSCVAQLYFFHFLGSTECFLYTVMSYDRYLAISYPLRYTNMMTGRSCALLATGTWLSGSLHSAVQTILTFHLPYCGPNQIQHYFCDAPPILKLACADTSANEMVIFVNIGLVASGCFVLIVLSYVSIVCSILRIRTSEGRHRAFQTCASHCIVVLCFFGPGLFIYLRPGSRDALHGVVAVFYTTLTPLFNPVVYTLRNKEVKKALLKLKNGSVFAQGE

SEQ ID NO: 237 - DNA, 1336 bp, Homo sapiens
  source (1)..(1336)
  CDS (201)..(1136)
agacagagaaagactaggaaatcacttcattagtttatgaaggaagctttgttaacaagcaaagtccacaataactccagaattatctacctgcttgatgcagtttccacacagagaatggattctcatttctcaattaagtgctaaatgctgggtgctctttatattcccagagggagagagaccaagggtgagaagaaatgtccaacgccagcctactgacagcgttcatcctcatgggccttccccatgccccagcgctggacgcccccctctttggagtcttcctggtggtttacgtgctcactgtgctggggaacctcctcatcctgctggtgatcagggtggattctcacctccacaccaccatgtactacttcctcaccaacctgtcgttcattgacatgtggttctccactgtcacggtgcccaaattgctgatgactttggtgttcccaagtggcagggctatctccttccacagctgcatggctcagctctatttctttcacttcctagggggcaccgagtgtttcctctacagggtcatgtcctgtgatcgctacctggccatcagttacccgctcaggtacaccagcatgatgactgggcgctcgtgtactcttctggccaccagcacttggctcagtggctctctgcactctgctgtccaggccatattgactttccatttgccctactgtggacccaactggatccagcactatttgtgtgatgcaccgcccatcctgaaactggcctgtgcagacacctcagccatagagactgtcatttttgtgactgttggaatagtggcctcgggctgctttgtcctgatagtgctgtcctatgtgtccatcgtctgttccatcctgcggatccgcacctcagaggggaagcacagagcctttcagacctgtgcctcccactgtatcgtggtcctttgcttctttggccctggtcttttcatttacctgaggccaggctccaggaaagctgtggatggagttgtggccgttttctacactgtgctgacgccccttctcaaccctgttgtgtacaccctgaggaacaaggaggtgaagaaagctctgttgaagctgaaagacaaagtagcacattctcagagcaaatagacactagggaagattacatatcttagctcttgtgaatagtgctgtgaaaaacatacaggggcaggtatcttttggatgtaatgaattcttttcctttgggtagatacccagtagtggaactgctagattaaatgttaattctatttttagttctttgagaaatctccacactgttttccatagaggttgtactagtttac

SEQ ID NO: 238 - protein, 311 aa, Homo sapiens
MSNASLLTAFILMGLPHAPALDAPLFGVFLVVYVLTVLGNLLILLVIRVDSHLHTTMYYFLTNLSFIDMWFSTVTVPKLLMTLVFPSGRAISFHSCMAQLYFFHFLGGTECFLYRVMSCDRYLAISYPLRYTSMMTGRSCTLLATSTWLSGSLHSAVQAILTFHLPYCGPNWIQHYLCDAPPILKLACADTSAIETVIFVTVGIVASGCFVLIVLSYVSIVCSILRIRTSEGKHRAFQTCASHCIVVLCFFGPGLFIYLRPGSRKAVDGVVAVFYTVLTPLLNPVVYTLRNKEVKKALLKLKDKVAHSQSK

SEQ ID NO: 239 - DNA, 1336 bp, Homo sapiens
  source (1)..(1336)
  CDS (201)..(1136)
gagagagagagagagagagagactaggaaatcacttcattagctttatgaaggaagctttgtaacaagcaaagtccatgaaaactccagaattatctacctggttttcacatagagaatgacttctcagttatcaattaattggtaaatgctgggtgctccttatatccccagagggagagagaccaagggtgagaagaaatgtccaagaccagcctcgtgacagcgttcatcctcacgggccttccccatgccccagggctggacgccccactctttggaatcttcctggtggtttacgtgctcactgtgctggggaacctcctcatcctgctggtgatcagggtggattctcacctccacacccccatgtactacttcctcaccaacctgtccttcattgacatgtggttctccactgtcacggtgcccaaaatgctgatgaccttggtgtccccaagcggcagggctatctccttccacagctgcgtggctcagctctattttttccacttcctggggagcaccgagtgtttcctctacacagtcatgtcctatgatcgctacttggccatcagttacccgctcaggtacaccagcatgatgagtgggagcagatgtgccctcctggccaccagcacttggctcagtggctctctgcactctgctgtccagaccatattgactttccatttgccctactgtggacccaaccagatccagcactatttgtgtgatgcaccgcccatcctgaaactggcctgtgcagacacctcagccaacgagatggtcatctttgtggacattgggctagtggcctcgggctgctttctcctgatagtgctgtcttatgtgtccatcgtctgttccatcctgcggatccacacctcagaggggaggcacagagcctttcagacctgtgcctcccactgcatcgtggtcctttgcttttttgttccctgtgttttcatttacctgagaccaggctccagggacgtcgtggatggagttgtggccattttctacactgtgctgacaccccttctcaaccctgttgtgtacaccctgagaaacaaggaggtgaagaaagctgtgttgaaactgagagacaaagtagcacattctcagggagaataaatactaggaagtagatacactagtttgtttaaaaatagtaatataatttagttattcatgtgaaattgattatatgtatagttctcagtgttaaacattattccaaaacacctgcacagttataattcttccacagattgtctaagacagttttaacctcacagctagacttatgtgtatgaggaacatgcttatattct

SEQ ID NO: 240 - protein, 311 aa, Homo sapiens
MSKTSLVTAFILTGLPHAPGLDAPLFGIFLVVYVLTVLGNLLILLVIRVDSHLHTPMYYFLTNLSFIDMWFSTVTVPKMLMTLVSPSGRAISFHSCVAQLYFFHFLGSTECFLYTVMSYDRYLAISYPLRYTSMMSGSRCALLATSTWLSGSLHSAVQTILTFHLPYCGPNQIQHYLCDAPPILKLACADTSANEMVIFVDIGLVASGCFLLIVLSYVSIVCSILRIHTSEGRHRAFQTCASHCIVVLCFFVPCVFIYLRPGSRDVVDGVVAIFYTVLTPLLNPVVYTLRNKEVKKAVLKLRDKVAHSQGE

SEQ ID NO: 241 - DNA, 1336 bp, Homo sapiens
  source (1)..(1336)
  CDS (201)..(1136)
gtgtgagagaggctgaaataatttcatcatcatctctgtgagggaagctttgtaacaagcgaagtgcaggataactccagaattatctacctggttgatgcagtttccacatagagaatggattctcatttctcaattaagtgctaaatgctgggtgctctttatatccccagagggagagagaccaagggtgagaagaaatgtccaacgccagcctcgtgacagcattcatcctcacaggccttccccatgccccagggctggacgccctcctctttggaatcttcctggtggtttacgtgctcactgtgctggggaacctcctcatcctgctggtgatcagggtggattctcacctccacacccccatgtactacttcctcaccaacctgtccttcattgacatgtggttctccactgtcacggtgcccaaaatgctgatgaccttggtgtccccaagcggcagggctatctccttccacagctgcgtggctcagctctattttttccacttcctggggagcaccgagtgtttcctctacacagtcatgtcctatgatcgctacttggccatcagttacccgctcaggtacaccagcatgatgagtgggagcaggtgtgccctcctggccaccggcacttggctcagtggctctctgcactctgctgtccagaccatattgactttccatttgccctactgtggacccaaccagatccagcactacttctgtgacgcaccgcccatcctgaaactggcctgtgcagacacctcagccaacgtgatggtcatctttgtggacattgggatagtggcctcaggctgctttgtcctgatagtgctgtcctatgtgtccatcgtctgttccatcctgcggatccgcacctcagatgggaggcgcagagcctttcagacctgtgcctcccactgtattgtggtcctttgcttctttgttccctgtgttgtcatttatctgaggccaggctccatggatgccatggatggagttgtggccattttctacactgtgctgacgccccttctcaaccctgttgtgtacaccctgagaaacaaggaggtgaagaaagctgtgttgaaacttagagacaaagtagcacatcctcagaggaaataaatactaggaagtaaatacactagtttgtttaaaaatagtaatctaatttagttattcatgtgaaattgattatatgtatagttctcagtgttaaacattattccaaaacacctgcacagttataattcttccacagattgtctaagacagttttaacctcacagctagacttatatttatgatgaacatgattatattct

SEQ ID NO: 242 - protein, 311 aa, Homo sapiens
MSNASLVTAFILTGLPHAPGLDALLFGIFLVVYVLTVLGNLLILLVIRVDSHLHTPMYYFLTNLSFIDMWFSTVTVPKMLMTLVSPSGRAISFHSCVAQLYFFHFLGSTECFLYTVMSYDRYLAISYPLRYTSMMSGSRCALLATGTWLSGSLHSAVQTILTFHLPYCGPNQIQHYFCDAPPILKLACADTSANVMVIFVDIGIVASGCFVLIVLSYVSIVCSILRIRTSDGRRRAFQTCASHCIVVLCFFVPCVVIYLRPGSMDAMDGVVAIFYTVLTPLLNPVVYTLRNKEVKKAVLKLRDKVAHPQRK

SEQ ID NO: 243 - DNA, 1399 bp, Homo sapiens
  source (1)..(1399)
  CDS (201)..(1199)
gagggggagtaaggtgagagaatgataaagaccagtagcaagaatgagagagagaagagagagagaacggatagttagatagatagatagatagatagatagatagatagatagatagatagatagatagaatagatagataagtatccttttctgtccttatttgggagtgacacagaattgatgtgctgagcctagaaatgttagagggtgttgagcatctccttctgctacttcttttgacagatgtgaacagcaaggaactgcaaagtggaaaccagacttctgtgtctcacttcattttggtgggcctgcaccacccaccacagctgggagcgccactcttcttagctttccttgtcatctatctcctcactgtttctggaaatgggctcatcatcctcactgtcttagtggacatccggctccatcgtcccatgtgcttgttcctgtgtcacctctccttcttggacatgaccatttcttgtgctattgtccccaagatgctggctggctttctcttgggtagtaggattatctcctttgggggctgtgtaatccaactattttctttccatttcctgggctgtactgagtgcttcctttacacactcatggcttatgaccgtttccttgccatttgtaagcccttacactatgctaccatcatgacccacagagtctgtaactccctggctttaggcacctggctgggagggactatccattcacttttccaaacaagttttgtattccggctgcccttctgtggccccaatcgggtcgactacatcttctgtgacattcctgccatgctgcgtctagcctgcgccgatacggccatcaacgagctggtcacctttgcagacattggcttcctggccctcacctgcttcatgctcatcctcacttcctatggctatattgtagctgccatcctgcgaattccgtcagcagatgggcgccgcaatgccttctccacttgtgctgcccacctcactgttgtcattgtttactatgtgccctgcaccttcatttacctgcggccttgttcacaggagcccctggatggggtggtagctgtcttttacactgtcatcactcccttgcttaactccatcatctacacactgtgcaacaaagaaatgaaggcagcattacagaggctagggggccacaaggaagtgcagcctcactgacttcatccatcacagacatgcaggaaaccctataatgcagggccctggataggacaccaaataagtggaaattttaaagcagaaatagaaagaaagattcatgcatagaatagaggactcctggctgggaacccggaaagttccacattgtaacctgttctcaaacgtgattttccatatgtctttcttcagtgccaatg

SEQ ID NO: 244 - protein, 332 aa, Homo sapiens
MLEGVEHLLLLLLLTDVNSKELQSGNQTSVSHFILVGLHHPPQLGAPLFLAFLVIYLLTVSGNGLIILTVLVDIRLHRPMCLFLCHLSFLDMTISCAIVPKMLAGFLLGSRIISFGGCVIQLFSFHFLGCTECFLYTLMAYDRFLAICKPLHYATIMTHRVCNSLALGTWLGGTIHSLFQTSFVFRLPFCGPNRVDYIFCDIPAMLRLACADTAINELVTFADIGFLALTCFMLILTSYGYIVAAILRIPSADGRRNAFSTCAAHLTVVIVYYVPCTFIYLRPCSQEPLDGVVAVFYTVITPLLNSIIYTLCNKEMKAALQRLGGHKEVQPH

SEQ ID NO: 245 - DNA, 1339 bp, Homo sapiens
  source (1)..(1339)
  CDS (201)..(1139)
atgtagttggctatggcggttacattccaaggataatgccttgtaacttgaatcacaagcagcctttccataacttagatgcaaatcacagtcacttaattgacaagttttatttctccagtatgttcacttgattgacagcaagccaaggcattcttccatgtcctcagcctcctctttccttcctaggactggcttccatggaggtgaagaactgctgcatggtgacagagttcatccttttgggaatcccacacacagaggggctggagatgacactttttgtcttattcttgcccttctatgcctgcactctactgggaaatgtgtctatccttgttgctgttatgtcttctgctcgccttcacacacctatgtatttcttcctgggaaacttgtctgtgtttgacatgggtttctcctcagtgacttgtcccaaaatgctgctctaccttatggggctgagccgactcatctcctacaaagactgtgtctgccagcttttcttcttccatttcctcgggagcattgagtgcttcttgtttacggtgatggcctatgaccgcttcactgccatctgttatcctctgcgatacacagtcatcatgaacccaaggatctgtgtggccctggctgtgggcacatggctgttagggtgcattcattccagtatcttgacctccctcaccttcaccttgccatactgtggtcccaatgaagtggatcacttcttctgtgacattccagcactgttgcccttggcctgtgctgacacatccttagcccagagggtgagcttcaccaacgttggcctcatatctcttgtctgctttctgctaattcttttatcctacactagaatcacaatatctatcttaagcattcgtacaactgagggccgtcgccgtgccttctccacctgcagtgctcacctcattgccatcctctgtgcctatgggcccatcatcactgtctacctgcagcccacacccaaccccatgctgggaaccgtggtacaaattctcatgaatctggtaggaccaatgctgaaccctttgatctataccttgaggaataaggaagtaaaaacagccctgaaaacaatattgcacaggacaggccatgttcctgagagttagtaagagcagataaatgggtgcatggctctggaattccttttgctttgacctaagaaatttcattctggaatcttcatatgtgacaatgacttggaattttcagcactgtgctgaatgatatggaccattatgctatatataatacattatctttttgcaatattttattttattgtctaggttctgcctcttcacctatc

SEQ ID NO: 246 - protein, 312 aa, Homo sapiens
MEVKNCCMVTEFILLGIPHTEGLEMTLFVLFLPFYACTLLGNVSILVAVMSSARLHTPMYFFLGNLSVFDMGFSSVTCPKMLLYLMGLSRLISYKDCVCQLFFFHFLGSIECFLFTVMAYDRFTAICYPLRYTVIMNPRICVALAVGTWLLGCIHSSILTSLTFTLPYCGPNEVDHFFCDIPALLPLACADTSLAQRVSFTNVGLISLVCFLLILLSYTRITISILSIRTTEGRRRAFSTCSAHLIAILCAYGPIITVYLQPTPNPMLGTVVQILMNLVGPMLNPLIYTLRNKEVKTALKTILHRTGHVPES

SEQ ID NO: 247 - DNA, 1345 bp, Homo sapiens
  source (1)..(1345)
  CDS (201)..(1145)
agtgtgtttctggttcctaaaatctataggtaggtagatgcttaccgactccatttcatctgagtgttcactttttggttttcgtaacacaaagtcagtgttttcatagagagaaaacactgatatttgttttctatagaaacaaacactgatagaatttgactttttctctctcatctccacagatttctcagagaagaatgggtgtaaaaaaccattccacagtgactgagtttcttctttcaggattaactgaacaagcagagcttcagctgcccctcttctgcctcttcttaggaatttacacagttactgtggtgggaaacctcagcatgatctcaattattaggctgaatcgtcaacttcatacccccatgtactatttcctgagtagtttgtcttttttagatttctgctattcttctgtcattacccctaaaatgctatcagggtttttatgcagagatagatccatctcctattctggatgcatgattcagctgttttttttctgtgtttgtgttatttctgaatgctacatgctggcagccatggcctgcgatcgctacgtggccatctgcagcccactgctctacagggtcatcatgtcccctagggtctgttctctgctggtggctgctgtcttctcagtaggtttcactgatgctgtgatccatggaggttgtatactcaggttgtctttctgtggatcaaacatcattaaacattatttctgtgacattgtccctcttattaaactctcctgctccagcacttatattgatgagcttttgatttttgtcattggtggatttaacatggtggccacaagcctaacaatcattatttcatatgcttttatcctcaccagcatcctgcgcatccactctaaaaagggcaggtgcaaagcgtttagcacctgtagctcccacctgacagctgttcttatgttttatgggtctctgatgtccatgtatctcaaacctgcttctagcagttcactcacccaggagaaagtatcctcagtattttataccactgtgattctcatgttgaatcccttgatatatagtctgaggaacaatgaagtaagaaatgctctgatgaaacttttaagaagaaaaatatctttatctccaggataaatatgctctttattaagatctatttctgtattcataatcatgattatatgtatatatttataccttgactatttaaaagtaatttgaggtccaggtacggtgacttacgcctgtaatcccagcactttgggaggccgagttgggtggatcacgaggtccggtgttcaagaccagcctggccaagatgatgaaaccccatc

SEQ ID NO: 248 - protein, 314 aa, Homo sapiens
MGVKNHSTVTEFLLSGLTEQAELQLPLFCLFLGIYTVTVVGNLSMISIIRLNRQLHTPMYYFLSSLSFLDFCYSSVITPKMLSGFLCRDRSISYSGCMIQLFFFCVCVISECYMLAAMACDRYVAICSPLLYRVIMSPRVCSLLVAAVFSVGFTDAVIHGGCILRLSFCGSNIIKHYFCDIVPLIKLSCSSTYIDELLIFVIGGFNMVATSLTIIISYAFILTSILRIHSKKGRCKAFSTCSSHLTAVLMFYGSLMSMYLKPASSSSLTQEKVSSVFYTTVILMLNPLIYSLRNNEVRNALMKLLRRKISLSPG

SEQ ID NO: 249 - DNA, 1342 bp, Homo sapiens
  source (1)..(1342)
  CDS (201)..(1142)
atgtacctaaatagtatcttgactttcccagtgtggcacaataattaacttgcagatagaggactacataccaggtctacatctcccaatataagccactctccgcaatacattctcagcagatatttacaaaattacctaagctgattttccttttcttgtttcttcagggaaaccctgcccaccatatagtagttgtcatgggaaactggagcactgtgactgaaatcaccctaattgccttcccagctctcctggagattcgaatatctctcttcgtggttcttgtggtaacttacacattaacagcaacaggaaacatcaccatcatctccctgatatggattgatcatcgcctgcaaactccaatgtacttcttcctcagtaatttgtcctttctggatatcttatacaccactgtcattaccccaaagttgttggcctgcctcctaggagaagagaaaaccatatcttttgctggttgcatgatccaaacatatttctacttctttctggggacggtggagtttatcctcttggcggtgatgtcctttgaccgctacatggctatctgcgacccactgcactacacggtcatcatgaacagcagggcctgccttctgctggttctgggatgctgggtgggagccttcctgtctgtgttgtttccaaccattgtagtgacaaggctaccttactgtaggaaagaaattaatcatttcttctgtgacattgcccctcttcttcaggtggcctgtataaatactcacctcattgagaagataaactttctcctctctgcccttgtcatcctgagctccctggcattcactactgggtcctacgtgtacataatttctaccatcctgcgtatcccctccacccagggccgtcagaaagctttttctacctgtgcttctcacatcactgttgtctccattgcccacgggagcaacatctttgtgtatgtgagacccaatcagaactcctcactggattatgacaaggtggccgctgtcctcatcacagtggtgacccctctcctgaacccttttatctacagcttgaggaatgagaaggtacaggaagtgttgagagagacagtgaacagaatcatgaccttgatacaaaggaaaacttgacactggtatacactacattaaatacatttctttttttattattttttttaagttccagggtacatgtgcaggatgtgcaggtttgttacatagttaaacgtgtgccatggtggtttgctgcacctatcaatccatcacccatgtactaagcccagcatgcattagttctttttcctaatgctctccccaacccccagccc

SEQ ID NO: 250 - protein, 313 aa, Homo sapiens
MGNWSTVTEITLIAFPALLEIRISLFVVLVVTYTLTATGNITIISLIWIDHRLQTPMYFFLSNLSFLDILYTTVITPKLLACLLGEEKTISFAGCMIQTYFYFFLGTVEFILLAVMSFDRYMAICDPLHYTVIMNSRACLLLVLGCWVGAFLSVLFPTIVVTRLPYCRKEINHFFCDIAPLLQVACINTHLIEKINFLLSALVILSSLAFTTGSYVYIISTILRIPSTQGRQKAFSTCASHITVVSIAHGSNIFVYVRPNQNSSLDYDKVAAVLITVVTPLLNPFIYSLRNEKVQEVLRETVNRIMTLIQRKT

SEQ ID NO: 251 - DNA, 1261 bp, Homo sapiens
  source (1)..(1261)
  CDS (201)..(1061)
acagtgatctcagacttgtgaccaagagcccctctgcaccattgatagacagtggccgtgcccaccaggaggatgggcaatcacactgcagtgagcctattccttctgtggggattttccagtttttcagacctgcagagtctactttttgtggtgattctcttctacatgtgaccatcctagctgcaaacgtgtccataatgggggccatcaagctcagccacaaccttcacactcctatgtactttttcctctgtggcctgtccttttcagaaacttgtaccactgtggtagtaatccctcgcatgttggtggactttctatcagagagcaagaccatttctcttcctgagtgtgccacacagatgtttttctttctgggctttgcatccaacaactgtttcatcatggccgctatgtcctacgaccgctacacggccatccacaacccactgcagtaccacacccttatgacaagaaagatctgcttgcagatgatgatggcttcttggatggttgggttcctgttttctctgtgcatcatcgtcactgtattcaacttgtctctttgcgacttgaacactatccagcactatttctgtgatatctcaccagtggtctcccttgcttgtaattacactttctatcatgaaatggctatttttgtgctctctgcctttgtgttggtgggcagctgtattttaattatgatttcctatgtcttcattgtgttcatagtcataaagatgccctctgcaaaggggaggtctaaggccttctcaacttgctcctcccacctcactgttgtgtccatacactatggatttgcttgctttgtctatttgaggcccaagaacagcaactccttcgatgaagacatgctgacggccatgatatatacaatactgatgcctctgcttaaccccatcgtgtacagtctgagaaacaaagaaatgcagatagccctaagaaaaacactaggcagtgtatttggggttttccctcagaagacaaaaaaagagcctgaacatttaaaaaaattacacagcattgataaataaaggtgagaaaagtggagtacttctaattaatatcactttgtgcacaaagtggttaaagtattgtctaatttcctgatatgtcctggcctcaccattttcctactacagagaggatgcagttttaaaatgtttttaaatgttatgtgtgtgtgtttatgtgtgtgtgcatgtgtgtatgtacacatatccattcagggtac

SEQ ID NO: 252 - protein, 286 aa, Homo sapiens [sequence omitted]

SEQ ID NO: 253 - DNA, 1159 bp, Homo sapiens
  source (1)..(1159)
  CDS (201)..(959)
ttcacatttctttcaacaggaacaattcacaaagatggagattggaaaccataccacagtgacagagtttattattttggggttaactgaggatcctacactttgtgacatcttctttgtgatatttctaggaatctacattgtcaccttaataggcaatatcagcataataaagaagctgttcccaacttcacactcccatgtacctgttcctcagccacttggcttttgtggacatagggcttgccacagtagtcacacctataatgcttatgggattcctaagacgtggaacagccctccctgtcactagctgtgaagcccagctctgttctgtagtcatgtttgggacgtctgaatgcttcctactggcgaccatggcctatgatcgctatgtggccatctgctcacccctggtgaactccacccacttgtcccccataatctgcatactcttagtgggggtttgctacctgggtggatgtgtgaatgcctcaacatttactagttgtttattgagtctgtctttctgtggaccaaatcagatagatcattttttctgtgatttctctcctttgttgaaactttcctgctcaaatatctccattcctgaaattatcccttccatctcttctggatctatcattgtggtcacagtatttgccatagccatctcctacatctacatcctcatcaccatcctgaagatgcgctccgccgaggggcgccacaaggccttctccacctgtacctcccacctcgctgcggttactctctactatggaacgattaccttcatttatgtgatgcccaaatccagttactcaactagccagaacagattgatatcgctgtcctacacagtggtaatccccatactgaacccctttatctatagtctgaggaacagagatgtaaaggaggcactaagaaaggcaactgtcagaatatattcttaggatcaatttgtagcatttcagacgacctataaagttttcattatcggtatcacgtttaggacctaccaaatactacttaactgattgcttaaaataaaattatatttatttgttctaactttcatttttaaatacttgtagaccaattgggagacctagatgtcagtaataatgatagtaataattattactattattaa

SEQ ID NO: 254 - protein, 252 aa, Homo sapiens
MYLFLSHLAFVDIGLATVVTPIMLMGFLRRGTALPVTSCEAQLCSVVMFGTSECFLLATMAYDRYVAICSPLVNSTHLSPIICILLVGVCYLGGCVNASTFTSCLLSLSFCGPNQIDHFFCDFSPLLKLSCSNISIPEIIPSISSGSIIVVTVFAIAISYIYILITILKMRSAEGRHKAFSTCTSHLAAVTLYYGTITFIYVMPKSSYSTSQNRLISLSYTVVIPILNPFIYSLRNRDVKEALRKATVRIYS

SEQ ID NO: 255 - DNA, 1369 bp, Homo sapiens
  source (1)..(1369)
  CDS (201)..(1169)
tatagaaagactgattacacataaatacataaacaatgaaaccctaaggtaaaaaaaaaaaagtctgaactttccttgaatgatacatctgttcatattaaccttcatgtatatattaatgaagatgaagccatcaaatttataacattttaatgtgctgttctcattagggttcatttagtcagcagctacttcgtctcatgaattccctgaaggacgggaatcacaccgctctgacggggttcatcctattgggcttaacagatgatccaatccttcgagtcatcctcttcatgatcatcctatctggtaatctcagcataattattcttatcagaatttcttctcagctccatcatcctatgtatttctttctgagccacttggcttttgctgacatggcctattcatcttctgtcacacccaacatgcttgtaaacttcctggtggagagaaatacagtctcctaccttggatgtgccatccagcttggttcagcggctttctttgcaacagtcgaatgcgtccttctggctgccatggcctatgaccgctttgtggcaatttgcagtccactgctttattcaaccaaaatgtccacacaagtcagtgtccagctactcttagtagtttacatagctggttttctcattgctgtctcctatactacttccttctattttttactcttctgtggaccaaatcaagtcaatcattttttctgtgatttcgctcccttacttgaactctcctgttctgatatcagtgtctccacagttgttctctcattttcttctggatccatcattgtggtcactgtgtgtgtcatagccgtctgctacatctatatcctcatcaccatcctgaagatgcgctccactgaggggcaccacaaggccttctccacctgcacttcccacctcactgtggttaccctgttctatgggaccattaccttcatttatgtgatgcccaattttagctactcaactgaccagaacaaggtggtgtctgtgttgtacacagtggtgattcccatgttgaaccccctgatctacagcctcaggaacaaggagattaagggggctctgaagagagagcttgttagaaaaatactttctcatgatgcttgttattttagtagaacttcaaataatgatattacatagaaccctatctcttctcttgagaatactcaatgcacgtgtagatacagatttagtgtttgctttcttgacagtgttgaaagtttcatgtagaatctaccacatcttttcttctccccatgtacctaattttcaaacagtttctagaacttaataagcatacttgcatatttaaaatggagagataaagaaaaaattaatga

SEQ ID NO: 256 - protein, 322 aa, Homo sapiens
MNSLKDGNHTALTGFILLGLTDDPILRVILFMIILSGNLSIIILIRISSQLHHPMYFFLSHLAFADMAYSSSVTPNMLVNFLVERNTVSYLGCAIQLGSAAFFATVECVLLAAMAYDRFVAICSPLLYSTKMSTQVSVQLLLVVYIAGFLIAVSYTTSFYFLLFCGPNQVNHFFCDFAPLLELSCSDISVSTVVLSFSSGSIIVVTVCVIAVCYIYILITILKMRSTEGHHKAFSTCTSHLTVVTLFYGTITFIYVMPNFSYSTDQNKVVSVLYTVVIPMLNPLIYSLRNKEIKGALKRELVRKILSHDACYFSRTSNNDIT

SEQ ID NO: 257 - DNA, 1345 bp, Homo sapiens
  source (1)..(1345)
  CDS (201)..(1145)
cttctttatttgtattttaaagattcactattacaagtcattggccattcttcaaaagtgccaacctgaagttctgtcaaaatgagcttgtcattacatctgctgtcaagaattccagacttgaactcacagctatgggattacgacttcatactcgatataccaggtccataaaaacaatataagtttcaactactgaaatgaaaagacaaaatcaaagctgtgtggttgaattcatcctcctgggcttttctaactttcctgagctccaggtgcagctctttggggttttcctagttatttatgtggtgaccctgatgggaaatgccatcattacagtcatcatctccttaaaccagagcctccacgttcccatgtacctgttcctcctgaacctatctgtggtggaggtgagtttcagtgcagtcattacgcctgaaatgctggtggtgctctctactgagaaaactatgatttcttttgtgggctgttttgcacagatgtatttcatccttctttttggtgggactgaatgttttctcctgggagcgatggcttatgaccgatttgctgcaatttgccatcctctgaactacccagtgattatgaacagaggggtttttatgaaattagtaatattctcatggatctcagggatcatggtggctactgtgcagaccacttgggtatttagttttccattttgtggccccaatgaaattaatcatctcttctgtgagactcccccggtactagagcttgtgtgtgcagacaccttcttatttgaaatctatgccttcacaggcaccattttgattgttatggttcctttcttgttgatcctcttgtcttacattcgagttctgtttgccatcctgaagatgccatcaactactgggagacaaaaggccttttccacctgtgcctctcacctcacatctgtgaccctgttctatggcacagccaatatgacttatttacaacccaaatctggctactcacccgaaaccaagaaactgatctcattggcttacacgttgcttacccctctgctcaatccgctcatctatagcttacgaaacagtgagatgaagaggactttgataaaactatggcgaagaaaagtgattttacacacattctgattgtgttgagaagctgagtaagatttggccactgcctgagtgaactctatttaaatttaataaagggtgaaaacagactgcattttttgtatgactatgtaagtttgttgagtttttttattggaaaacgtatctcaataaagaactgctgtcacttgtttttagtagatacatatgttctcataacatgacacaacagt

SEQ ID NO: 258 - protein, 314 aa, Homo sapiens
MKRQNQSCVVEFILLGFSNFPELQVQLFGVFLVIYVVTLMGNAIITVIISLNQSLHVPMYLFLLNLSVVEVSFSAVITPEMLVVLSTEKTMISFVGCFAQMYFILLFGGTECFLLGAMAYDRFAAICHPLNYPVIMNRGVFMKLVIFSWISGIMVATVQTTWVFSFPFCGPNEINHLFCETPPVLELVCADTFLFEIYAFTGTILIVMVPFLLILLSYIRVLFAILKMPSTTGRQKAFSTCASHLTSVTLFYGTANMTYLQPKSGYSPETKKLISLAYTLLTPLLNPLIYSLRNSEMKRTLIKLWRRKVILHTF

SEQ ID NO: 259 - DNA, 1345 bp, Homo sapiens
  source (1)..(1345)
  CDS (201)..(1145)
ctattttttatatttggaatataatccaagtatttggtcattgtctaaaattgccaaagaaaatttctgtcaggataggctcctcatcttctgccagaatttctggggtgaatgcagactggaactcttagctaatggactgtggctttattctgtatatactatgtccataaaatcaatgcacgacttcattactgaaaatggaaagacaaaatcaaagctgtgtggttgaattcatcctcttgggcttttctaactatcctgagctccaggggcagctctttgtggctttcctggttatttatctggtgaccctgataggaaatgccattattatagtcatcgtctccctagaccagagcctccacgttcccatgtacctgtttctcctgaacttatctgtggtggacctgagtttcagtgcagttattatgcctgaaatgctggtggtcctctctactgaaaaaactacaatttcttttgggggctgttttgcacagatgtatttcatccttctttttggtggggctgaatgttttcttctgggagcaatggcttatgaccgatttgctgcaatttgccatcctctcaactaccaaatgattatgaataaaggagtttttatgaaattaattatattttcatgggccttaggttttatgttaggtactgttcaaacatcatgggtatctagttttcccttttgtggccttaatgaaattaaccatatatcttgtgaaaccccagcagtgttagaacttgcatgtgcagacacgtttttgtttgaaatctatgcattcacaggcacctttttgattattttggttcctttcttgttgatactcttgtcttacattcgagttctgtttgccatcctgaagatgccatcaaccactgggagacaaaaggccttttccacctgtgccgctcacctcacatctgtgaccctattctatggcacagccagtatgacttatttacaacccaaatctggctactcaccggaaaccaagaaagtgatgtcattgtcttactcacttctgacaccactgctgaatctgcttatctacagtttgcgaaatagtgagatgaagagggctttgatgaaattatggcgaaggcgagtggttttacacacaatctgactgtgttgagaagccatgtaagatttagtcactgcatgactgtattcaatctaaatttaataaatttagattcattaagtttgcattttttggcatgagtatgactaatttattgtgttctccaagtttgattgtatatcaggagcatctttatatgttaatgtttttagttttttcaccagtgcataatattccttaat

SEQ ID NO: 260 - protein, 314 aa, Homo sapiens
MERQNQSCVVEFILLGFSNYPELQGQLFVAFLVIYLVTLIGNAIIIVIVSLDQSLHVPMYLFLLNLSVVDLSFSAVIMPEMLVVLSTEKTTISFGGCFAQMYFILLFGGAECFLLGAMAYDRFAAICHPLNYQMIMNKGVFMKLIIFSWALGFMLGTVQTSWVSSFPFCGLNEINHISCETPAVLELACADTFLFEIYAFTGTFLIILVPFLLILLSYIRVLFAILKMPSTTGRQKAFSTCAAHLTSVTLFYGTASMTYLQPKSGYSPETKKVMSLSYSLLTPLLNLLIYSLRNSEMKRALMKLWRRRVVLHTI

SEQ ID NO: 261 - DNA, 985 bp, Homo sapiens
  source (1)..(985)
  CDS (201)..(785)
cagactcgcggctccacacccccatgtactacttcctcagtcacctggcattcattgatctgtgttactcatcttctattgggcccaagatgctgcaaaatgtattggtgaagaaaaaaaccatctccttttcaggctgttttgctcagctgtacttctccggtgcttttgccactacagaatgattcctcttggccacaatgccctacgaccgctacgtggccatctgcaaccccctgatttacacagctattatgacgcagcgggtctgcagggagttagtgataggggtctatacctatggcttccgaaactctgtgatacagacagctctgacgtttcagctgtctttctgcaactccgacgtcatccaccacttctactgtgctgacccccctctcctggccctctcctgctctgacacccacaacaaagaaaagcagctcatgatcttctctgcagtaaatctcactgggtccctccttaccatcttcatctcctacatttgcatcctcttttccattataaaaatccagtcttccgagggcaagtgcagagcattttccacccgtgcctcccacctcactgtcgtcaccatcttttatggcacactatttttcatgtacctgcagcaaccaaaagcggggaattcatggaagccaaacaaagtagtctctgtgttttatagtcttgtaattcccatgcttaaccctcttatctatcgcctgagaaacacagaagtaaaggatgccctgaaaaaaatgctagagggcaaagagttatagtgagtgagttaatggaacgcagcatactgaaagtttgatatattgacaaggtaatgtctctaattaagtttacatttagcaggccaactgctgtccaatcaggaagcaaacagtaatccaatttgggaattttaatgaccaaagtactgggtcacttatttaacatagtaatgtttaatccaattatcgtgaactatcaa

SEQ ID NO: 262 - protein, 194 aa, Homo sapiens
MPYDRYVAICNPLIYTAIMTQRVCRELVIGVYTYGFRNSVIQTALTFQLSFCNSDVIHHFYCADPPLLALSCSDTHNKEKQLMIFSAVNLTGSLLTIFISYICILFSIIKIQSSEGKCRAFSTRASHLTVVTIFYGTLFFMYLQQPKAGNSWKPNKVVSVFYSLVIPMLNPLIYRLRNTEVKDALKKMLEGKEL

SEQ ID NO: 263 - DNA, 1513 bp, Homo sapiens
  source (1)..(1513)
  CDS (201)..(1313)
tcagaatacttctcaataattcactccaggaagccactagtaaatgatcaaagctggcacttgatatgaaaactctttctcttctctaccacatatccttcccccatattgaacctcttgtttctttcaagtattctttaaattatctctatcacaattctgtctgatatttcagtactaccttcaataatttctaatttatgttctcaatgacaacagaagcactcaataattttgcacttggatgtaccaacttgttaatgactatgataccacaaattgatctgaagcaaattttcctttgtcctaattgcagactatacatgatccctgttggagctttcatcttttccttgggaaacatgcaaaaccaaagctttgtaactgagtttgtcctcctgggactttcacagaatccaaatgttcaggaaatagtatttgttgtatttttgtttgtctacattgcaactgttgggggcaacatgctaattgtagtaaccattctcagcagccctgctcttctggtgtctcctatgtacttcttcttgggcttcctgtccttcctggatgcgtgcttctcatctgtcatcaccccaaagatgattgtagactccctctatgtgacaaaaaccatctcttttgaaggctgcatgatgcagctctttgctgaacacttctttgctggggtggaggtgattgtcctcacagccatggcctatgatcgttatgtggccatttgcaagcccttgcattactcttctatcatgaacaggaggctctgtggcattctgatgggggtagcctggacagggggcctcttgcattccatgatacaaattctttttactttccagcttcccttttgtggccccaatgtcatcaatcactttatgtgtgacttgtacccgttactggagcttgcctgcactgatactcacatctttggcctcatggtggtcatcaacagtgggtttatctgcatcataaacttctccttgttgcttgtctcctatgctgtcatcttgctctctctgagaacacacagttctgaagggcgctggaaagctctctccacctgtggatctcacattgctgttgtgattttgttctttgtcccatgcatatttgtatatacacgacctccatctgctttttcccttgacaaaatggcggcaatattttatatcatcttaaatcccttgctcaatcctttgatttacactttcaggaataaggaagtaaaacaggccatgaggagaatatggaacagactgatggtggtttctgatgagaaagaaaatattaaactttaaaaaatccaaagttaagagtaaaaaaggtcaaaatggccttaaataaaaacttaatgagatacatctttcatggcaagagataaagtaatgctagaaaaaaatcattaatgtgggatcagaaaacttatgtgtccaccctcagaaagcacaaatatgcacctcctcagtcacctatataggcctagtcttaccccgtgact

SEQ ID NO: 264 - protein, 370 aa, Homo sapiens
MFSMTTEALNNFALGCTNLLMTMIPQIDLKQIFLCPNCRLYMIPVGAFIFSLGNMQNQSFVTEFVLLGLSQNPNVQEIVFVVFLFVYIATVGGNMLIVVTILSSPALLVSPMYFFLGFLSFLDACFSSVITPKMIVDSLYVTKTISFEGCMMQLFAEHFFAGVEVIVLTAMAYDRYVAICKPLHYSSIMNRRLCGILMGVAWTGGLLHSMIQILFTFQLPFCGPNVINHFMCDLYPLLELACTDTHIFGLMVVINSGFICIINFSLLLVSYAVILLSLRTHSSEGRWKALSTCGSHIAVVILFFVPCIFVYTRPPSAFSLDKMAAIFYIILNPLLNPLIYTFRNKEVKQAMRRIWNRLMVVSDEKENIKL

SEQ ID NO: 265 - DNA, 1234 bp, Homo sapiens
  source (1)..(1234)
  CDS (201)..(1034)
atggagcttctgacaaataatctcaaatttatcattgacccttttgtttacaggttctgacaccttagtccaataccttcagaagaacacatggaaaataggaaaaattgacttaattcatcctcttggggctcacacagaaccctgagggccaaaaagttttatttgtcacattcttactcatctacattgtgacgataatgggcaacctccttatcatggtgaccatcatggccagccagtccctgggttcccccatgtacttttttctggcttctttatcatttatacataccgtctattatactgccattgctcccaaaatgattgttgacctgctctctgagaaaaagaccatttcttttcagggttgtatggctcaactttttatggatcatttatttgctggtgctgaagtcattcttctggtggtaatggcctatgatcaatatgtggccatctgtaagcctcttcattatttgatcatcatgaatcgtcgagtctgtgttctcatgctgttggtggcctggattggaggctttcttcactcattggttcaatttctctttatttatcagctccctttctgtggacccaatgtcattgacaacttcctgtgtgatttgtatcccttattgaaacttgcttgcaccaatacctatgtcactgggctttctatgatagctaatggtggagcgatttgtactgtcaccttcttccctctcctgctttcctatggggtcatattaccctctcttaagactcagagtttggaagggaaatgcaaagctttctacacctgtgcatcccacatcactgtgatcactttattctttgtcccctgcatcttcctgtttgcaaggcccaactccacctttcccattgataaatccatgactgtggttttaacttgtataactcccatgctgaaaccactaatctatgccctgaggaatgcagaaatgaaaagtgccatgaggaaactttggagtaaaaaagtaagcttagctggaaaagggctgtatccctcatgagaatatgactttcattctttcacagaagcaaggaataatttcactatcctatcagattacatttctgttatcattcgcctttagttatttagcttacttattctgaagcaattatatacattaatatttatgtaagtacaatatgttaagcccattacagaccaagataattgcataggtttaacagtgtatagtgtttt

SEQ ID NO: 266 - protein, 277 aa, Homo sapiens
MGNLLIMVTIMASQSLGSPMYFFLASLSFIHTVYYTAIAPKMIVDLLSEKKTISFQGCMAQLFMDHLFAGAEVILLVVMAYDQYVAICKPLHYLIIMNRRVCVLMLLVAWIGGFLHSLVQFLFIYQLPFCGPNVIDNFLCDLYPLLKLACTNTYVTGLSMIANGGAICTVTFFPLLLSYGVILPSLKTQSLEGKCKAFYTCASHITVITLFFVPCIFLFARPNSTFPIDKSMTVVLTCITPMLKPLIYALRNAEMKSAMRKLWSKKVSLAGKGLYPS

SEQ ID NO: 267 - DNA, 1333 bp, Homo sapiens
  source (1)..(1333)
  CDS (201)..(1133)
ttggtaaatatattgaatagttactatgaattccatttcactcagaaaaaaatacaaagaattgtcaataataagccattggaaagttgcaatttcattgcaagaatatgtatttgacctctaaatttagaatctatttctttttttcttttgcagattaactagttctaatctgtggtttcttcacatcaactgaaacaatgcagcaaaataacagtgtgcctgaattcatactgttaggattaacacaggatcccttgaggcagaaaatagtgtttgtaatcttcttaattttctatatgggaactgtggtggggaatatgctcattattgtgaccatcaagtccagccggacactaggaagccccatgtacttctttctattttatttgtcctttgcagattcttgcttttcaacttccacagcccctagattaattgtggatgctctctctgaaaagaaaattataacctacaatgagtgcatgacacaagtctttgcactacatttatttggctgcatggagatctttgtcctcattctcatggctgttgatcgctatgtggccatctgtaagcccttgcgttacccaaccatcatgagccagcaggtctgcatcatcctgattgttcttgcctggatagggtctttaatacactctacagctcagattatcctggccttaagattgcctttctgtggaccctatttgattgatcattattgctgtgatttgcagcccttgttgaaacttgcctgcatggacacttacatgatcaacctgctgttggtgtctaacagtggggcaatttgctcaagtagtttcatgattttgataatttcatatattgtcatcttgcattcactgagaaaccacagtgccaaagggaagaaaaaggctctctccgcttgcacgtctcacataattgtagtcatcttattctttggcccatgtatattcatatatacacgccccccgaccactttccccatggacaagatggtggcagtattttatactattggaacaccctttctcaatccactcatctacacactgaggaatgcagaagtgaaaaatgccatgagaaagttatggcatggcaaaattatttcagaaaacaaaggataaattgagggcctgacctgattactttttcagtcaaatcatgatttaacagagtaagtatagacagcaaataggaaagtacctgaatgctgtgggaataatatatcatcgtatctaagtttgtgggttcctatgttttctagttaacaggagttgtgactaccaagacattgtcttttgtgccagaactaggtagaatatag

SEQ ID NO: 268 - protein, 310 aa, Homo sapiens
MQQNNSVPEFILLGLTQDPLRQKIVFVIFLIFYMGTVVGNMLIIVTIKSSRTLGSPMYFFLFYLSFADSCFSTSTAPRLIVDALSEKKIITYNECMTQVFALHLFGCMEIFVLILMAVDRYVAICKPLRYPTIMSQQVCIILIVLAWIGSLIHSTAQIILALRLPFCGPYLIDHYCCDLQPLLKLACMDTYMINLLLVSNSGAICSSSFMILIISYIVILHSLRNHSAKGKKKALSACTSHIIVVILFFGPCIFIYTRPPTTFPMDKMVAVFYTIGTPFLNPLIYTLRNAEVKNAMRKLWHGKIISENKG

SEQ ID NO: 269 - DNA, 1381 bp, Homo sapiens
  source (1)..(1381)
  CDS (201)..(1181)
attgatcacagtgtgctagagagctaatggaaatcatctagtatatatatacatggagagtcttattagaaagccattttaattgaataccagatatttactctctgaaccacttgaatgaggtaaattaaatctagctagttcctcaaataaaatatgatcattgtacttcttaacaaagacttgtaagcttataaattatgtcatttcaggtgacttatatgttctatctacactggaccatggaaaaaagcaataatagcactttgtttattctcttggggttttcccaaaataagaacattgaagtcctctgctttgtattatttttgttttgctacattgctatttggatgggaaacttactcataatgatttctatcacgtgcacccagctcattcaccaacccatgtatttcttcctcaattacctctcactctccgacctttgctacacatccacagtgacccccaaattaatggttgacttactggcagaaagaaagaccatttcctataataactgtatgatacaactctttaccacccatttttttggaggcatagagatcttcattctcacagggatggcctatgaccgctatgtggccatttgcaagcccctgcactacaccattattatgagcaggcaaaagtgtaacacaatcatcatagtttgttgtactgggggatttatacattctgccagtcagtttcttctcaccatctctgtaccattttgtggcccaaatgatatagatcactactctcgcgatgtgtatcctttgctgaaattggcctgttctaatatacacatgataggtctcttagtcattgctaattcaggcttaattgctttggtgacatttgttgtcttgttgttgtcttatgtttttatattgtataccatcagagcatactctgcagagagacgcagcaaagctcttgccacttgtagttctcatgtaattgttgtggtcctgttttttgctcctgcattgttcatttacattagaccggtcacaacattctcagaagataaagtgtttgcccttttttataccatcattgctcccatgttcaaccctctcatatacacgctgagaaacacagagatgaagaacgccatgaggaaagtgtggtgttgtcaaatactcctgaaaagaaatcaacttttctgaattgtttctgcttttcatgccgtggttccctgatgaatgagaaaaattcactctcatcttgctcttgtccttaatgtttggagagaaaagtgggcaaacaggaagcatatcccttctgtggttttatacttctacattgacatctctttaacaaattgaacattattcttatccatactctcctccgcctttcttaatca

SEQ ID NO: 270 - protein, 326 aa, Homo sapiens
MSFQVTYMFYLHWTMEKSNNSTLFILLGFSQNKNIEVLCFVLFLFCYIAIWMGNLLIMISITCTQLIHQPMYFFLNYLSLSDLCYTSTVTPKLMVDLLAERKTISYNNCMIQLFTTHFFGGIEIFILTGMAYDRYVAICKPLHYTIIMSRQKCNTIIIVCCTGGFIHSASQFLLTISVPFCGPNDIDHYSRDVYPLLKLACSNIHMIGLLVIANSGLIALVTFVVLLLSYVFILYTIRAYSAERRSKALATCSSHVIVVVLFFAPALFIYIRPVTTFSEDKVFALFYTIIAPMFNPLIYTLRNTEMKNAMRKVWCCQILLKRNQLF

SEQ ID NO: 271 - DNA, 1687 bp, Homo sapiens
  source (1)..(1687)
  CDS (201)..(1487)
catttgtattttttaaaattctttttttaaaattatactttaagttctggagtatatgtgcagaatgtgcagctttgttacataggtacacatgtgccatgctgatttgctgcaccaatcaacccatcacctgcatagcgtatttctcctaatgctatcactcccctagctccccactccccaacaggccccggtgtgtgatgttcccctccctgtgtccatgtgttctccttgttcaactcccacttatgaatgagaacatgcagtgttttgttttctgttcttgtgatagtttgctgagaatgatggtttcccgcttcatccatgtcccatttgtaaaaatgaaaaggataattgtgggaggatattctaaacacttcttttctaatgagctgctctgtgtgaggccctggtcagggaaaacgtggtcgataaggcatcacatttttgacatggagcttctgacaaataatctcaaatttatcactgacccttttgtttgtaggctccgacacctgagtccaacaccttcagaagaacacatgaaaaataagaacaatgtgactgaatttatcctcttagggctcacacagaaccctgaggggcaaaaggttttatttgtcacattcttactaatctacatggtgacgataatgggcaacctgcttatcatagtgaccatcatggccagccagtccctgggttcccccatgtacttttttctggcttctttatcattcatagataccgtctattctactgcatttgctcccaaaatgattgttgacttgctctctgagaaaaagaccatttcctttcagggttgtatggctcaactttttatggatcatttatttgctggtgctgaagtcattcttctggtggtaatggcctatgatcgatacatggccatctgtaagcctcttcatgaattgatcaccatgaatcgtcgagtctgtgttcttatgctgttggcggcctggattggaggctttcttcactcattggttcaatttctctttatttatcagctccctttctgtggacccaatgtcattgacaacttcctgtgtgatttgtatcccttattgaaacttgcttgcaccaatacctatgtcactgggctttctatgatagctaatggaggagcgatttgtgctgtcaccttcttcactatcctgctttcctatggggtcatattacactctcttaagactcagagtttggaagggaaacgaaaagctttctacacctgtgcatcccacgtcactgtggtcattttattctttgtcccctgtatcttcttgtatgcaaggcccaattctacttttcccattgataaatccatgactgtagttctaacttttataactcccatgctgaacccactaatctataccctgaagaatgcagaaatgaaaagtgccatgaggaaactttggagtaaaaaagtaagcttagctgggaaatggctgtatcactcatgagaatgtgacattcattctttcacagaagcaaggaacaatttcactatcctatctgattacatttctgttatcatttccttttagttttttagcttacttattctgaagcagtcatataaattaatatttgtctaggtgtaatatgttacacccattacagaccaagaaaattgcataggtttaacagtgtgtactgtttt

SEQ ID NO: 272 - protein, 428 aa, Homo sapiens
MFPSLCPCVLLVQLPLMNENMQCFVFCSCDSLLRMMVSRFIHVPFVKMKRIIVGGYSKHFFSNELLCVRPWSGKTWSIRHHIFDMELLTNNLKFITDPFVCRLRHLSPTPSEEHMKNKNNVTEFILLGLTQNPEGQKVLFVTFLLIYMVTIMGNLLIIVTIMASQSLGSPMYFFLASLSFIDTVYSTAFAPKMIVDLLSEKKTISFQGCMAQLFMDHLFAGAEVILLVVMAYDRYMAICKPLHELITMNRRVCVLMLLAAWIGGFLHSLVQFLFIYQLPFCGPNVIDNFLCDLYPLLKLACTNTYVTGLSMIANGGAICAVTFFTILLSYGVILHSLKTQSLEGKRKAFYTCASHVTVVILFFVPCIFLYARPNSTFPIDKSMTVVLTFITPMLNPLIYTLKNAEMKSAMRKLWSKKVSLAGKWLYHS

SEQ ID NO: 273 - DNA, 1171 bp, Homo sapiens
  source (1)..(1171)
  CDS (201)..(971)
ctctcttttagtgaagggccttggtaccagaagagagaaaccagagctctgtgaccacattcatcctgttgggtttctcagaatatccacacctccaggcgcccctcttcctggtgttctcgaccacctacactgtcgctctggtgggaaacctgggcataattgtggttgtaagaatcaatcctaagctccataccaccatgtactttttcctcagtcatctatcctttttggatacttgttattccaatgtatttacacccaaactgttagagattttggttgtggaagacagaactatctccttcaaaggatgcatggtacaatttttctttggttgtgcatttgtaatcacagaaatgttcatgttagcggtgatggcttatgacttgtttatggctgtttgtaaccccctgctctacacagtggctatgtctcctaagctctgtgctctcctggtaactggaacttacacatggggtggactctgttccctgacactcacttattctcttttggtgttatcctactgtggatctaacatcataaatcactttggctgtgagtactctgccattctttctctatcctgctctgatccctacttcaaccagatggcgtgtttagtcatttctatattcagtgaagcttgtagcctcctggccatccttgccttctatgtcttcatagttgccactgtcatcaagatgctttctacgggtggaccccaaaaggccatctccacctgtgcctcccacctgaccaccgtctccattttccatggggtcatcctgctcctttactgtgtgcccaactccaaaagctcatggctcctggtcaaagtggctactgtactttttacagtcataatccctatgctgaatcccctgatctacagccttaggaacaaagatgtaaaagagaccgtcaggaagttgataaactcccaatcaccttttcactcaaaataattcaaataaatgtttgtttatgtgtcctatgtccatttttttcatatacatgattgatgagagtttatatttaaatatatgactgtgtttgaagtccattacatattggatacttcacatttttcgatgttcaagatgccttaccattatctctagtttataacaatgtaatgcattctgttttaccccttttcaggaga

SEQ ID NO: 274 - protein, 256 aa, Homo sapiens
MYFFLSHLSFLDTCYSNVFTPKLLEILVVEDRTISFKGCMVQFFFGCAFVITEMFMLAVMAYDLFMAVCNPLLYTVAMSPKLCALLVTGTYTWGGLCSLTLTYSLLVLSYCGSNIINHFGCEYSAILSLSCSDPYFNQMACLVISIFSEACSLLAILAFYVFIVATVIKMLSTGGPQKAISTCASHLTTVSIFHGVILLLYCVPNSKSSWLLVKVATVLFTVIIPMLNPLIYSLRNKDVKETVRKLINSQSPFHSK

SEQ ID NO: 275 - DNA, 1345 bp, Homo sapiens
  source (1)..(1345)
  CDS (201)..(1145)
aggttgatggagctggagaattggcaatagtaggaagttcccaggaggtgatgctactgctggtttgatgaccacattttgagaatcactgttctatatcacttgtcctagaaacacatgaagcctctttcctatctcttttttcctatccagttctgcttttcaagaataacttttttccttttaatccaacaagtatcatgatggcatctgaaagaaatcaaagcagcacacccacttttattctcttgggtttttcagaatacccagaaatccaggttccactctttctggttttcttgttcgtctacacagtcactgtagtggggaacttgggcatgataataatcatcagactcaattcaaaactccatacaatcatgtgctttttccttagtcacttgtccttgacagacttctgtttttccactgtagttacacctaaactgttggagaacttggttgtggaatacagaaccatctctttctctggttgcatcatgcaattttgttttgcttgcatttttggagtgacagaaactttcatgttagcagcgatggcttatgaccgttttgtggcagtttgtaaacccttgctgtataccactattatgtctcagaagctctgtgctcttctggtggctgggtcctatacatgggggatagtgtgctccctgatactcacatattttcttcttgacttatcgttttgtgaatctaccttcataaataattttatctgtgaccactctgtaattgtttctgcctcctactcagacccctatatcagccagaggctatgctttattattgccatattcaatgaggtgagcagcctaattatcattctgacatcatatatgcttattttcactaccattatgaagatgcgatctgcaagtgggcgccagaaaactttctccacctgtgcctcccacctgacagccatcactatcttccatggaactatccttttcctttactgtgttcctaatcctaaaacttctagcctcatagttacagtggcttctgtgttttacacagtggcgattccaatgctgaacccattgatctacagccttaggaacaaagatatcaataacatgtttgaaaaattagttgtcaccaaattgatttaccactgaatatgatgttcttagatacgttatttctgaaaaaagtgatttactatcttacagattacccatctcttacagtgcaattgattattcaaattatttaatcaatagactatcagttgacacattcacaccagcacaaccttttgaaatagatctaaatgacatgtaactaaaaattctaaaacctaaagcttttatatcat

SEQ ID NO: 276 - protein, 314 aa, Homo sapiens
MMASERNQSSTPTFILLGFSEYPEIQVPLFLVFLFVYTVTVVGNLGMIIIIRLNSKLHTIMCFFLSHLSLTDFCFSTVVTPKLLENLVVEYRTISFSGCIMQFCFACIFGVTETFMLAAMAYDRFVAVCKPLLYTTIMSQKLCALLVAGSYTWGIVCSLILTYFLLDLSFCESTFINNFICDHSVIVSASYSDPYISQRLCFIIAIFNEVSSLIIILTSYMLIFTTIMKMRSASGRQKTFSTCASHLTAITIFHGTILFLYCVPNPKTSSLIVTVASVFYTVAIPMLNPLIYSLRNKDINNMFEKLVVTKLIYH

SEQ ID NO: 277 - DNA, 1345 bp, Homo sapiens
  source (1)..(1345)
  CDS (201)..(1145)
ctccaaagacttggcttggtttgttttagacataacagctgcctgcatgaggtatgttcttcttggacaaaactaggaccagtaactattccttctccttttttccttttaatcaaagaaagtcatgacataattatcactcaccccatattttgctttggcaggaacaattctcttcaacccttccattaaaaggaattatgatgatggttttaaggaatctgagcatggagcccacctttgcccttttaggtttcacagattacccaaagcttcagattcctctcttccttgtgtttctgctcatgtatgttatcacagtggtaggaaaccttgggatgatcataataatcaagattaaccccaaatttcacactcctatgtactttttccttagtcacctctcttttgttgatttttgttactcttccattgtcactcccaagctgcttgagaacttggtaatggcagataaaagcatcttctactttagctgcatgatgcagtacttcctgtcctgcactgctgtggtgacagagtctttcttgctggcagtgatggcctatgaccgctttgtggccatctgcaatcctctgctttatacagtggccatgtcacagaggctctgtgccctgctggtggctgggtcatatctctggggcatgtttggccccttggtactcctttgttatgctctccggttaaacttctctggacctaatgtaatcaaccacttcttttgtgagtatactgctctcatctctgtgtctggctctgatatactcatcccccacctgctgcttttcagcttcgccaccttcaatgagatgtgtacactactgatcatcctcacttcctatgttttcatttttgtgactgtactaaaaatccgttctgttagtgggcgccacaaagccttctccacctgggcctcccacctgacttctatcaccatcttccatgggaccatccttttcctttactgtgtacccaactccaaaaactctcggcaaacagtcaaagtggcctctgtattttacacagttgtcaaccccatgctgaaccctctgatctacagcctaaggaataaagacgtgaaggatgctttctggaagttaatacatacacaagttccatttcactgaaccagtctcaaaagttgttttcaatccaaatgaacaacccaaacagaggctacaatgtttctaaagcctagagcatatatttatatgaggtttttatggaattgtcaaatgtgaattgatatagcattcccagtattatcaggttcagaaatctctacaagtttagtccagtttatacaaaatgaatgaaaataaacatt

SEQ ID NO: 278 - protein, 314 aa, Homo sapiens
MMMVLRNLSMEPTFALLGFTDYPKLQIPLFLVFLLMYVITVVGNLGMIIIIKINPKFHTPMYFFLSHLSFVDFCYSSIVTPKLLENLVMADKSIFYFSCMMQYFLSCTAVVTESFLLAVMAYDRFVAICNPLLYTVAMSQRLCALLVAGSYLWGMFGPLVLLCYALRLNFSGPNVINHFFCEYTALISVSGSDILIPHLLLFSFATFNEMCTLLIILTSYVFIFVTVLKIRSVSGRHKAFSTWASHLTSITIFHGTILFLYCVPNSKNSRQTVKVASVFYTVVNPMLNPLIYSLRNKDVKDAFWKLIHTQVPFH

SEQ ID NO: 279 - DNA, 1336 bp, Homo sapiens
  source (1)..(1336)
  CDS (201)..(1136)
aaactaagtttatgcatttgtgttatacaaagttgaactttttaaaatttcacaaaaagttttattctttgctgataagataaactatcctactttttctggtgtctttttacaggatacagccaaaactaaaatttagactatataatggagaataatttttaagtttcttttcctccaatctcatataaattggagacatgggcaaggaaaactgcaccactgtggctgagttcattctccttggactatcagatgtccctgagttgagagtctgcctcttcctgctgttccttctcatctatggagtcacgttgttagccaacctgggcatgattgcactgattcaggtcagctctcggctccacacccccatgtactttttcctcagccacttgtcctctgtagatttctgctactcctcaataattgtgccaaaaatgttggctaatatctttaacaaggacaaagccatctccttcctagggtgcatggtgcaattctacttgttttgcacttgtgtggtcactgaggtcttcctgctggccgtgatggcctatgaccgctttgtggccatctgtaaccctttgctatacacagtcaccatgtcttggaaggtgcgtgtggagctggcttcttgctgctacttctgtgggacggtgtgttctctgattcatttgtgcttagctcttaggatccccttctatagatctaatgtgattaaccactttttctgtgatctacctcctgtcttaagtcttgcttgctctgatatcactgtgaatgagacactgctgttcctggtggccactttgaatgagagtgttaccatcatgatcatcctcacctcctacctgctaattctcaccaccatcctgaagatgggctctgcagagggcaggcacaaagccttctccacctgtgcttcccacctcacagctatcactgtcttccatggaacagtcctttccatttattgcaggcccagttcaggcaatagtggagatgctgacaaagtggccaccgtgttctacacagtcgtgattcctatgctgaactctgtgatctacagcctgagaaataaagatgtgaaagaagctctcagaaaagtgatgggctccaaaattcactcctagggaagattttattagcacaattcaggattcccaagtagtggcaggcgggggttcacgggagaggcacagtgttggagtacagagaagaaggagctcagtagttataagcgagtcttttttgattcacttatctttgtgcttcttaaactttaaggagtaggattgaacatatttcaaaatttgctgccaacttttaaaaa

SEQ ID NO: 280 - protein, 311 aa, Homo sapiens
MGKENCTTVAEFILLGLSDVPELRVCLFLLFLLIYGVTLLANLGMIALIQVSSRLHTPMYFFLSHLSSVDFCYSSIIVPKMLANIFNKDKAISFLGCMVQFYLFCTCVVTEVFLLAVMAYDRFVAICNPLLYTVTMSWKVRVELASCCYFCGTVCSLIHLCLALRIPFYRSNVINHFFCDLPPVLSLACSDITVNETLLFLVATLNESVTIMIILTSYLLILTTILKMGSAEGRHKAFSTCASHLTAITVFHGTVLSIYCRPSSGNSGDADKVATVFYTVVIPMLNSVIYSLRNKDVKEALRKVMGSKIHS

SEQ ID NO: 281 - DNA, 1342 bp, Homo sapiens
  source (1)..(1342)
  CDS (201)..(1142)
taagaaattaaaaaacattacagtgtttttacatgttagatatttaagaaatcttaaacaacaaactcatagattccggaagagatatttgcttcatccttcaggagccgtaaaggtattcaatcacccttcttattttctcattctccttaacatttttgttttcagaactaactttcagattcgaagaaacagaagcgatgctgctgacagatagaaatacaagtgggaccacgttcaccctcttgggcttctcagattacccagaactgcaagtcccactcttcctggtttttctggccatctacaatgtcactgtgctagggaatattgggttgattgtgatcatcaaaatcaaccccaaactgcatacccccatgtactttttcctcagccaactctcctttgtggatttctgctattcctccatcattgctcccaagatgttggtgaaccttgttgtcaaagacagaaccatttcatttttaggatgcgtagtacaattctttttcttctgtacctttgtggtcactgaatcctttttattagctgtgatggcctatgaccgcttcgtggccatttgcaaccctctgctctacacagttgacatgtcccagaaactctgcgtgctgctggttgtgggatcctatgcctggggagtctcatgttccttggaactgacgtgctctgctttaaagttatgttttcatggtttcaacacaatcaatcacttcttctgtgagttctcctcactactctccctttcttgctctgatacttacatcaaccagtggctgctattctttcttgccacctttaatgaaatcagcacactactcatcgttctcacatcttatgcgttcattgttgtaaccatcctcaagatgcgttcagtcagtgggcgccgcaaagccttctccacctgtgcctcccacctgactgccatcaccatcttccatggcaccatcctcttcctttactgtgtgcccaactccaaaaactccaggcacacagtcaaagtggcctctgtgttttacaccgtggtgatccccatgttgaatcccctgatctacagtctgagaaataaagatgtcaaggatacagtcaccgagatactggacaccaaagtcttctcttactgagcctgttactttcatggagtttgtcacacatataaataaattctgtccataaatattgatcttaaagatatctttacaaataaacaaagttagggttgtacaactcaacgaaatggattttcttttcaacagactaaacttagctctgtctcttactttctgggaagcatcagtaatccctctaatctttaatatttcat

SEQ ID NO: 282 - protein, 313 aa, Homo sapiens
MLLTDRNTSGTTFTLLGFSDYPELQVPLFLVFLAIYNVTVLGNIGLIVIIKINPKLHTPMYFFLSQLSFVDFCYSSIIAPKMLVNLVVKDRTISFLGCVVQFFFFCTFVVTESFLLAVMAYDRFVAICNPLLYTVDMSQKLCVLLVVGSYAWGVSCSLELTCSALKLCFHGFNTINHFFCEFSSLLSLSCSDTYINQWLLFFLATFNEISTLLIVLTSYAFIVVTILKMRSVSGRRKAFSTCASHLTAITIFHGTILFLYCVPNSKNSRHTVKVASVFYTVVIPMLNPLIYSLRNKDVKDTVTEILDTKVFSY

SEQ ID NO: 283 - DNA, 1336 bp, Homo sapiens
  source (1)..(1336)
  CDS (201)..(1136)
tgtatgttttatgcatttgtattatacaatgttgaactttttcagatttcccaaaatttctgttctttgctgataaaaattagctatcctacttcttctgatatctttttacaggatacacccaaaactaaaatttagactatataatggagaataagttttaggtttttttctcctctaatcctgcataaattggagacatgggcaaggaaaactgcaccactgtggctgagttcattctccttggactatcagatgtccctgagttgagagtctgcctcttcctgctgttccttctcatctatggagtcacgttgttagccaatctgggcatgactgcactgattcaggtcagctctcggctccacacccccgtgtactttttcctcagccacttgtcctttgtagatttctgctactcctcaataattgtgccaaagatgttggctaatatctttaacaaggacaaagccatctccttcctagggtgcatggtgcaattctacttgttttgcacatgtggagtcactgaggtcttcctgctggccgtgatggcctatgaccgctttgtggccatctgtaaccccctgctgtacatggtgaccatgtctcaaaagctgcgtgtggagctgacctcttgctgctacttctgtgggacggtgtgttctctgattcactcgtccttagctcttaggatcctcttctatagatctaatgtgattaaccacttcttctgtgatctaccccctctcctaagtcttgcttgctctgatgtcactgtgaatgagacactgctgttcctggtggccactttgaatgagagtgttaccatcatgatcatcctcacctcctacctgctaattctcaccactatcctgaagatacactctgcagagagcaggcacaaagctttctccacctgtgcctcccacctcacagccatcactgtctcccatggaacaatcctttacatttattgcaggccgagttcaggcaacagtggagatgttgacaaagtggccaccgtgttctacacagttgtgattcccatgctgaaccccctgatctacagcctgagaaataaggatgtgaacaaagctctcagaaaagtgatgggctccaaaattcactcctagggaagattttattcacagaattcaggatccccaagttgtggcaagtgaaggttcgtaggaggggtgcagtgttggagtagagagaagaaggagctcagtagttatgagggatccttttttgattcacttatctttgtttctcttaaatttaaactaataggattgaacatatttcaaaatttgcagccaacttttataaa

SEQ ID NO: 284 - protein, 311 aa, Homo sapiens
MGKENCTTVAEFILLGLSDVPELRVCLFLLFLLIYGVTLLANLGMTALIQVSSRLHTPVYFFLSHLSFVDFCYSSIIVPKMLANIFNKDKAISFLGCMVQFYLFCTCGVTEVFLLAVMAYDRFVAICNPLLYMVTMSQKLRVELTSCCYFCGTVCSLIHSSLALRILFYRSNVINHFFCDLPPLLSLACSDVTVNETLLFLVATLNESVTIMIILTSYLLILTTILKIHSAESRHKAFSTCASHLTAITVSHGTILYIYCRPSSGNSGDVDKVATVFYTVVIPMLNPLIYSLRNKDVNKALRKVMGSKIHS

SEQ ID NO: 285 - DNA, 1387 bp, Homo sapiens
  source (1)..(1387)
  CDS (201)..(1187)
tttggagaaagcaacatttaatggtaattctattttgaaactgtagttattcctgtcttgacacagcacctatcaggatattaacagagatctattttgtctcaccttatattctacagaggggatggttaagctgctttgtcaatcactttcaatatttaatttctaagactgattttcggatcacacgaaaggaaaacatgtttctgacagagagaaatacgacatctgaggccacattcactctcttgggcttctcagattacctggaactgcaaattcccctcttctttgtatttctggcagtctacggcttcagtgtggtagggaatcttgggatgatagtgatcatcaaaattaacccaaaattgcatacccccatgtattttttcctcaaccacctctcctttgtggatttctgctattcctccatcattgctcccatgatgctggtgaacctggttgtagaagatagaaccatttcattctcaggatgtttggtgcaattctttttcttttgcacctttgtagtgactgaattaattctatttgcggtgatggcctatgaccactttgtggccatttgcaatcctctgctctacacagttgccatctcccagaaactctgtgccatgctggtggttgtattgtatgcatggggagtcgcatgttccctgacactcgcgtgctctgctttaaagttatcttttcatggtttcaacacaatcaatcatttcttctgtgagttatcctccctgatatcactctcttaccctgactcttatctcagccagttgcttcttttcactgttgccacttttaatgagataagcacactactcatcattctgacatcttatgcattcatcattgtcaccaccttgaagatgccttcagccagtgggcaccgcaaagtcttctccacctgtgcctcccacctgactgccatcaccatcttccatggcaccatcctcttcctctactgtgtacccaactccaaaaactccaggcacacagtcaaagtggcctctgtgttttacaccgtggtgatccccttgttgaatcccctgatctacagtctgagaaataaagatgttaaggatgcaatccgaaaaataatcaatacaaaatattttcatattaaacataggcattggtatccatttaattttgttattgaacaataaatttttcctgttttttcaaatggactgtgcatcaagagttcactaaaaaaaatcactttagatttaaaaaaaccttttttgcaatagaatggctatgagttttagatcagggaagctattcttggctcagcttatataagccagacaaaactaattgacgttgactacaaaataataattgtctataaaatattttgtct

SEQ ID NO: 286 - protein, 328 aa, Homo sapiens
MFLTERNTTSEATFTLLGFSDYLELQIPLFFVFLAVYGFSVVGNLGMIVIIKINPKLHTPMYFFLNHLSFVDFCYSSIIAPMMLVNLVVEDRTISFSGCLVQFFFFCTFVVTELILFAVMAYDHFVAICNPLLYTVAISQKLCAMLVVVLYAWGVACSLTLACSALKLSFHGFNTINHFFCELSSLISLSYPDSYLSQLLLFTVATFNEISTLLIILTSYAFIIVTTLKMPSASGHRKVFSTCASHLTAITIFHGTILFLYCVPNSKNSRHTVKVASVFYTVVIPLLNPLIYSLRNKDVKDAIRKIINTKYFHIKHRHWYPFNFVIEQ

SEQ ID NO: 287 - DNA, 1102 bp, Homo sapiens
  source (1)..(1102)
  CDS (201)..(902)
  modified_base (771)..(870): a, t, c, g, unknown or other
ttttttttaatacagtaataatgcctctttgaaagtgacactcacctgggatactttttgagggtaaagaagataatttacataaacaaatcttgttctactttacagataattttttttttgatatcttggaaagtcaagttctagactgtcattctcgtaatgatttctgtagcagtttgaaacaagaacaaggaagaatggactgggaaaattgctcctcattaactgatttttttctcttgggaattaccaataacccagagatgaaagtgaccctatttgctgtattcttggctgtttatatcattaatttctcagcaaatcttggaatgatagttttaatcagaatggattaccaacttcacacaccaatgtatttcttcctcagtcatctgtctttctgtgatctctgctattctactgcaactgggcccaagatgctggtagatctacttgccaagaacaagtcaatacccttctatggctgtgctctgcaattcttggtcttctgtatctttgcagattctgagtgtctactgctgtcagtgatggcctttgatcggtacaaggccatcatcaaccccctgctctatacagtcaacatgtctagcagagtgtgctatctactcttgactggggtttatctggtgggaatagcagatgctttgatacatatgacactggccttccgcctatgcttctgtgggtctaatgagattaatcatttcttctgtgatatcccctcctctcttattactctctcgctcnnnnnnnnnnnnnnnnnnnnnnnnnnnnnnnnnnnnnnnnnnnnnnnnnnnnnnnnnnnnnnnnnnnnnnnnnnnnnnnnnnnnnnnnnnnnnnnnnnnnctctcgctcagatacacaggtcaatgagttagtgttattcaccgtctttggttttattgaactgagtaccatttcaggagttttcatttcttattgttatatcatcctatcagtcttggagatacactctgctgaggggaggttcaaagctctctctacatgcacttcccacttatctgcggttgcaattttccagggaactctgctctttatgtatttccggccaagttct

SEQ ID NO: 288 - protein, 233 aa, Homo sapiens
  MOD_RES (191)..(224): Variable amino acid
MDWENCSSLTDFFLLGITNNPEMKVTLFAVFLAVYIINFSANLGMIVLIRMDYQLHTPMYFFLSHLSFCDLCYSTATGPKMLVDLLAKNKSIPFYGCALQFLVFCIFADSECLLLSVMAFDRYKAIINPLLYTVNMSSRVCYLLLTGVYLVGIADALIHMTLAFRLCFCGSNEINHFFCDIPSSLITLSLXXXXXXXXXXXXXXXXXXXXXXXXXXXXXXXXXXLAQIHRSMS

SEQ ID NO: 289 - DNA, 928 bp, Homo sapiens
  source (1)..(928)
  CDS (201)..(728)
  modified_base (1)..(46): a, t, c, g, unknown or other
nnnnnnnnnnnnnnnnnnnnnnnnnnnnnnnnnnnnnnnnnnnnnntgacttcaaactatactacaagactacagtaaccaaaacagcatgacactggtaacaaaacagagatacagaccgatggaacaaaagagagccggctgccatggcttaagaccggtacatagcaatctgtaacccgctgctctatacagtgattatgtccaagaaggtttgttgccagcttgcaattggagcatttttggggggcactatgagctcaattattcataccacgaacactttccatctgtcattctgctccagagatattaaccatttcttttgtgatatctccccactcttctctctgtcctgcactgacacatacatgcatgacatcattctggtggtctttgccagttttgtggaagcaatctgtcttctatcagttctcctttcttatgtcttcattatggcagctattcttagaacaggttctgtggagggaagaagaagagggttctccacttgtgcttcccacctgactgtggtcactatgtatcatggtaccttgatcttcatttatttgcgtcccagcactggccattcactggatattgacaaagtgacctctgtgttctatactttgattatacctatgttgaaccctctaatttacagtctaaggaacaaagatgtcaaaaatgcttttagaaaagtgattggccgaaaattacttccttaaggtgaaactgggcctgacatcatttcaacaatacctgctctttgacttggttctaactgttggaaaagtcagtttaatatgaatgttctccatatctatgggtaacgaatcttcacccacagaatagggtgaaagcctgaccttagagtatggctctctcatatcatttatattacgtctattattttaaagttgaaatt

SEQ ID NO: 290 - protein, 175 aa, Homo sapiens
MSKKVCCQLAIGAFLGGTMSSIIHTTNTFHLSFCSRDINHFFCDISPLFSLSCTDTYMHDIILVVFASFVEAICLLSVLLSYVFIMAAILRTGSVEGRRRGFSTCASHLTVVTMYHGTLIFIYLRPSTGHSLDIDKVTSVFYTLIIPMLNPLIYSLRNKDVKNAFRKVIGRKLLP

SEQ ID NO: 291 - DNA, 1051 bp, Homo sapiens
  source (1)..(1051)
  CDS (201)..(851)
cttgtgaattgcttgcatccaaaatatacacacagtattaagggctggtttttatcttttatttttccaatcctcttttcttcccaaggtgtccaagtcacacagagccacagaatctcacaggtgtctgagaattcctcctcctgggactctcagaggatccagaactgcagcccatcctggctggtctgtccctgtccatgtatctggtcacggtgctgaggaacctgctcatcatcctggctgtcagctctgacccccacctccacacccccatgtgcttcttcctctccaacctgtgctgggctgacatcggtttcaccttggccacggttcctaagatgattgtggacatgcagtctcataccagagtcatctcttatgagggctgcctgacacggatatctttcttggtcctttttgcatgtatagaagacatgctcctgactgtgatggcctatgactgctttgtagccatctgtcgccctctgcactacccagtcatcgtgaatcctcacctctgtgtcttcttccttttggtatactttttccttagcttgttggattcccagctgcacagttggattgtgttacaattcaccatcatcaagaatgtggaaatctctaattttgtctgtgacccctctcaacttctcaaacttgcctgttctgacagcgtcatcaatagcatattcatgtatttccatagtactatgtttggttttcttcccatttcagggatccttttgtcttactataaaatcgtcccctccattctaaggatttcatcatcagatgggaagtataaagccttctccacctgtggctctcacttggcagttgtttgctgattttatggaacaggcattggcgtgtacctgacttcagctgtgtcaccaccccccaggaatggtgtggtagcgtcagtgatgtacgctgtggtcacccccatgctgaaccttttcatctacagcctgagaaacagggacatacaaagtgccctgcggaggctgctcagcagaacagtcgaatctcatgatctgttccatcc

SEQ ID NO: 292 - protein, 216 aa, Homo sapiens
MYLVTVLRNLLIILAVSSDPHLHTPMCFFLSNLCWADIGFTLATVPKMIVDMQSHTRVISYEGCLTRISFLVLFACIEDMLLTVMAYDCFVAICRPLHYPVIVNPHLCVFFLLVYFFLSLLDSQLHSWIVLQFTIIKNVEISNFVCDPSQLLKLACSDSVINSIFMYFHSTMFGFLPISGILLSYYKIVPSILRISSSDGKYKAFSTCGSHLAVVC

SEQ ID NO: 293 - DNA, 1378 bp, Homo sapiens
  source (1)..(1378)
  CDS (201)..(1178)
gagatgtttgttacttacctaaagtgctctgtatacagtatgtttcaaagtgatagaatttcctgcaaaaaatcatgtgcacaaatgtatgtttcttatattaaatttttgtctccgaactgcagaagcctgtgtggttacatgcagattgggtgagcatacatttctgtagactgtggacttatgcattcacaagcaggatgttccttcccaatgacacccagtttcacccctcctccttcctgttgctggggatcccaggactagaaacacttcacatctggatcggctttcccttctgtgctgtgtacatgatcgcactcatagggaacttcactattctacttgtgatcaagactgacagcagcctacaccagcccatgttctacttcctggccatgttggccaccactgatgtgggtctctcaacagctaccatccctaagatgcttggaatcttctggatcaacctcagagggatcatctttgaagcctgcctcacccagatgttttttatccacaacttcacacttatggagtcagcagtccttgtggcaatggcttatgacagctatgtggccatctgcaatccactccaatatagcgccatcctcaccaacaaggttgtttctgtgattggtcttggtgtgtttgtgagggctttaattttcgtcattccctctatacttcttatattgcggttgcccttctgtgggaatcatgtaattccccacacctactgtgagcacatgggtcttgctcatctatcttgtgccagcatcaaaatcaatattatttatggtttatgtgccatttgtaatctggtgtttgacatcacagtcattgccctctcttatgtgcatattctttgtgctgttttccgtcttcctactcatgagccccgactcaagtccctcagcacatgtggttcacatgtgtgtgtaatccttgccttctatacaccagccctcttttcctttatgactcattgctttggccgaaatgtgccccgctatatccatatactcctagccaatctctatgttgtggtgccaccaatgctcaatcctgtcatatatggagtcagaaccaagcagatctataaatgtgtaaagaaaatattattgcaggaacaaggaatggaaaaggaagagtacctaatacatacgaggttctgaatgcaattttatgaaatttcagtgagagaaatgtcttgtcataaaaattatattctaatatgtggctttattggctctcttctgtatttaaatacattgaatttctccatctgcttttcataccacattttgagatctgttgctgcattttttttttttttttttgagacagagtcttgctctgttgcccaggctggaga

SEQ ID NO: 294 - protein, 325 aa, Homo sapiens
MFLPNDTQFHPSSFLLLGIPGLETLHIWIGFPFCAVYMIALIGNFTILLVIKTDSSLHQPMFYFLAMLATTDVGLSTATIPKMLGIFWINLRGIIFEACLTQMFFIHNFTLMESAVLVAMAYDSYVAICNPLQYSAILTNKVVSVIGLGVFVRALIFVIPSILLILRLPFCGNHVIPHTYCEHMGLAHLSCASIKINIIYGLCAICNLVFDITVIALSYVHILCAVFRLPTHEPRLKSLSTCGSHVCVILAFYTPALFSFMTHCFGRNVPRYIHILLANLYVVVPPMLNPVIYGVRTKQIYKCVKKILLQEQGMEKEEYLIHTRF

SEQ ID NO: 295 - DNA, 1345 bp, Homo sapiens
  source (1)..(1345)
  CDS (201)..(1145)
acaataagaaagaagaaccatatgaaagaagaatttccagaccacaaagagaagactggcccagtttttctgtgtagtcatgatgacctggatgcttgagagcagtatgtgatcaatgattttgccacctcatgtcaccataatccaagttctaacatatcttcatcaaaggtaggacctggaagagagtcatccccatcatggaccagatcaaccacactaatgtgaaggagtttttcttcctggaacttacacgttcccgagagctggagtttttcttgtttgtggtcttctttgctgtgtatgtagcaacagtcctgggaaatgcactcattgtggtcactattacctgtgagtcccgcctacacactcctatgtactttctcctgcggaacaaatcagtcctggacatcgttttttcatctatcaccgtccccaagttcctggtggatcttttatcagacaggaaaaccatctcctacaatgactgcatggcacagatctttttcttccactttgctggtggggcagatatttttttcctctctgtgatggcctatgacagataccttgcaatcgccaagcccctgcactatgtgaccatgatgaggaaagaggtgtgggtggccttggtggtggcttcttgggtgagtggtggtttgcattcaatcatccaggtaattctgatgcttccattccccttctgtggccccaacacactggatgccttctactgttatgtgctccaggtggtaaaactggcctgcactgacacctttgctttggagcttttcatgatctctaacaacggactggtgaccctgctctggttcctcctgctcctgggctcctacactgtcattctggtgatgctgagatcccactctggggaggggcggaacaaggccctctccacgtgcacgtcccacatgctggtggtgactcttcacttcgtgccttgtgtttacatctactgccggcccttcatgacgctgcccatggacacaaccatatccattaataacacggtcattacccccatgctgaaccccatcatctattccctgagaaatcaagagatgaagtcagccatgcagaggctgcagaggagacttgggccttccgagagcagaaaatgggggtgagcagtcagatggagagtggaagtctgtctgacttagttttctcaaaatgctagcctaagagtaacaggtcgctagctcttcttccactacttcattgtatatcttcatagccgctcgattctattagcgggagtatacaaacaaaaagaagaaatgagattaaacaatgtgagctatcgagcttgtggactcaggagaag

SEQ ID NO: 296 - protein, 314 aa, Homo sapiens
MDQINHTNVKEFFFLELTRSRELEFFLFVVFFAVYVATVLGNALIVVTITCESRLHTPMYFLLRNKSVLDIVFSSITVPKFLVDLLSDRKTISYNDCMAQIFFFHFAGGADIFFLSVMAYDRYLAIAKPLHYVTMMRKEVWVALVVASWVSGGLHSIIQVILMLPFPFCGPNTLDAFYCYVLQVVKLACTDTFALELFMISNNGLVTLLWFLLLLGSYTVILVMLRSHSGEGRNKALSTCTSHMLVVTLHFVPCVYIYCRPFMTLPMDTTISINNTVITPMLNPIIYSLRNQEMKSAMQRLQRRLGPSESRKWG

SEQ ID NO: 297 - DNA, 1348 bp, Homo sapiens
  source (1)..(1348)
  CDS (201)..(1148)
tgactgcaactcccttctttgagagagagagactgagactgagactgagaaagagaaagagagtctttgcataaagctgtaacctgtaatcctctgccctccctctcaggcattttgtagttatttgctaataccacctataatgtggactgtcattactatcccaggtctgcatcttgtccttgtggtccacgggaagcatgtccataaccaaagcctggaacagctcatcagtgaccatgttcatcctcctgggattcacagaccatccagaactccaggccctcctctttgtgaccttcctgggcatctatcttaccaccctggcctggaacctggccctcatttttctgatcagaggtgacacccatctgcacacacccatgtacttcttcctaagcaacttatctttcattgacatctgctactcttctgctgtggctcccaatatgctcactgacttcttctgggagcagaagaccatatcatttgtgggctgtgctgctcagttttttttctttgtcggcatgggtctgtctgagtgcctcctcctgactgctatggcatacgaccgatatgcagccatctccagcccccttctctaccccactatcatgacccagggcctctgtacacgcatggtggttggggcatatgttggtggcttcctgagctccctgatccaggccagctccatatttaggcttcacttttgcggacccaacatcatcaaccacttcttctgcgacctcccaccagtcctggctctgtcttgctctgacaccttcctcagtcaagtggtgaatttcctcgtggtggtcactgtcggaggaacatcgttcctccaactccttatctcctatggttacatagtgtctgcggtcctgaagatcccttcagcagagggccgatggaaagcctgcaacacgtgtgcctcgcatctgatggtggtgactctgctgtttgggacagcccttttcgtgtacttgcgacccagctccagctacttgctaggcagggacaaggtggtgtctgttttctattcattggtgatccccatgctgaaccctctcatttacagtttgaggaacaaagagatcaaggatgccctgtggaaggtgttggaaaggaagaaagtgttttcttaggtcatgcgtagaaacttatttatccaaactgctggagaattaaacaatccaagccttcacctccacctctgcctcaggcaagggagatatttggtgctctcatttgtggagactcttccctccagattcctctcacccttcctcatggtcacttgtctactgactgtgccatagatagccaaaaagggaaggaatttctt

SEQ ID NO: 298 - protein, 315 aa, Homo sapiens
MSITKAWNSSSVTMFILLGFTDHPELQALLFVTFLGIYLTTLAWNLALIFLIRGDTHLHTPMYFFLSNLSFIDICYSSAVAPNMLTDFFWEQKTISFVGCAAQFFFFVGMGLSECLLLTAMAYDRYAAISSPLLYPTIMTQGLCTRMVVGAYVGGFLSSLIQASSIFRLHFCGPNIINHFFCDLPPVLALSCSDTFLSQVVNFLVVVTVGGTSFLQLLISYGYIVSAVLKIPSAEGRWKACNTCASHLMVVTLLFGTALFVYLRPSSSYLLGRDKVVSVFYSLVIPMLNPLIYSLRNKEIKDALWKVLERKKVFS

SEQ ID NO: 299 - DNA, 1231 bp, Homo sapiens
  source (1)..(1231)
  CDS (201)..(1031)
tttgtccccaaagacagcacgatagttatctaaaaaattttcagtaaagtttcatgattgtatatatgaaagacacaaattaactcaacattgatgattcaaggttttatatttagccagcttcatgactgaaaataatagtgtttctttttcttttctgggaataaacccatttccttctcattcctttttctcagcagatggcaccaagcagatccatggaagtgagtgggaaccacacctctgtggccatgtttgttctcctaggactctcagatgaaaaagagctgcagctcatcctctttccagtcttcctggtgatctaccttgtgaccctgatttggaacatgggtcttatcatcctcatcagaatagactctcatctgaacacacccatgtacttttttctcagtttcctctcatttacagacatctgctattcttctaccatcagcccaaggatgctttcagacttcttaaaagataagaagacaatttccttccttgcctgtgccactcagtattttcttggggcctggatgagtctggctgagtgctgcctcttggtcatcatggcctgtgacagatatgtggccattggcagccccctgcagtactcagcaatcatggtccctagtatctgttggaagatggtagctggagtctgtgggggtggattccttagtagcttagttcatacagtcccttgctttaatctctactactgtgggccaaatatcattcaacatttcttctgtaacacacttcagattatttccttgtcttgctccaacccctttatcagccaaatgattctttttctggaagctatttttgttgggttgggctctttgcttgttatccttttgtcttatggtttcattgtagcttccatactgaaaatatcatcaaccaaatgttgtgccaaggccttcaatacctgtgcctcccacctggcagctgtggctctcttctatggcacagccctttctgtgtacatgcatcctagctctagccactccatgaagtaggacaaggtgctctcagtgttctatgttatacttatccccatgttaaacactctgatctatagtttgaggaacaaggaaatcaaagaggccctcaagagggtgacaaatggagcaacatatttacattagtaagaacaacatttgggtagatattgttatttctataacgaagatagaaacaagaatatgtaagtgactct

SEQ ID NO: 300 - protein, 276 aa, Homo sapiens
MAPSRSMEVSGNHTSVAMFVLLGLSDEKELQLILFPVFLVIYLVTLIWNMGLIILIRIDSHLNTPMYFFLSFLSFTDICYSSTISPRMLSDFLKDKKTISFLACATQYFLGAWMSLAECCLLVIMACDRYVAIGSPLQYSAIMVPSICWKMVAGVCGGGFLSSLVHTVPCFNLYYCGPNIIQHFFCNTLQIISLSCSNPFISQMILFLEAIFVGLGSLLVILLSYGFIVASILKISSTKCCAKAFNTCASHLAAVALFYGTALSVYMHPSSSHSMK

SEQ ID NO: 301 - DNA, 1336 bp, Homo sapiens
  source (1)..(1336)
  CDS (201)..(1136)
gaacctgaagcattgtgcaggtacatgctgacaattcaagaaaggctggggtctttccatcagaagagtgaaacatttgtccatttccagtgcttgttggaagaaaagatgtacacatatgaagacggtaatgttatcacttcaactgagttagcaatccattctcttgtctcctttctgatattaggagcactgagccaatgactgggggaggaaatattacagaaatcacctatttcatcctgctgggattctcagattttcccaggatcataaaagtgctcttcactatattcctggtgatctacattacatctctggcctggaacctctccctcattgttttaataaggatggattcccacctccatacacccatgtatttcttcctcagtaacctgtccttcatagatgtctgctatatcagctccacagtccccaagatgctctccaacctcttacaggaacagcaaactatcacttttgttggttgtattattcagtactttatcttttcaacgatgggactgagtgagtcttgtctcatgacagccatggcttatgatcgttatgctgccatttgtaaccccctgctctattcatccatcatgtcacccaccctctgtgtttggatggtactgggagcctacatgactggcctcactgcttctttattccaaattggtgctttgcttcaactccacttctgtgggtctaatgtcatcagacatttcttctgtgacatgccccaactgttaatcttgtcctgtactgacactttctttgtacaggtcatgactgctatattaaccatgttctttgggatagcaagtgccctagttatcatgatatcctatggctatattggcatctccatcatgaagatcacttcagctaaaggcaggtccaaggcattcaacacctgtgcttctcatctaacagctgtttccctcttctatacatcaggaatctttgtctatttgagttccagctctggaggttcttcaagctttgacagatttgcatctgttttctacactgtggtcattcccatgttaaatcccttgatttacagtttgaggaacaaagaaattaaagatgccttaaagaggttgcaaaagagaaagtgctgctgagtttacagattctgagatttctgccagatatggcccatcagaatctccctaacccacaaaatatgataatgaatggactataacaaaattcatgctgcctactgcctttggacaaagaaggcttgatttgatgcacaaaatatgccaatatggaccaacagatgactcaatgccacagacatcaggatctttaggtcctg

SEQ ID NO: 302 - protein, 311 aa, Homo sapiens
MTGGGNITEITYFILLGFSDFPRIIKVLFTIFLVIYITSLAWNLSLIVLIRMDSHLHTPMYFFLSNLSFIDVCYISSTVPKMLSNLLQEQQTITFVGCIIQYFIFSTMGLSESCLMTAMAYDRYAAICNPLLYSSIMSPTLCVWMVLGAYMTGLTASLFQIGALLQLHFCGSNVIRHFFCDMPQLLILSCTDTFFVQVMTAILTMFFGIASALVIMISYGYIGISIMKITSAKGRSKAFNTCASHLTAVSLFYTSGIFVYLSSSSGGSSSFDRFASVFYTVVIPMLNPLIYSLRNKEIKDALKRLQKRKCC

SEQ ID NO: 303 - DNA, 1177 bp, Homo sapiens
  source (1)..(1177)
  CDS (201)..(977)
acagatactagaatcaccagtgcaatgactggggaaaggaacagtacgagaattacaaagttcattctcttgggattctctgaatttccaaagaaccctattttcctcttttcaatattcctagggatctacctcctgacagtgtcctggaacataaacctcatcacccttatcaggacgactcccatctgcatacacctatgtactttttccttagtaatctgtcgtttctggacatctgctatgtttccactatagcccccaagatgctctcagacttcttcaagaagcataaattcatctcctttatggggtgcagtatgcagtactttttcttctctagcctaggtctaactgagtgctgtcttctggcagccatggcttatgatcgatatgctgccatttgcaaccctctgctctacagggccatcatgtttcccaccctctgcgtgcagatggtggcaggatcttgtataactggattcttaggctcatttatccaactctgtgccttgcttcagctccatttctgtgggccaaatgtcatcaaccatttcttctgtgatctgccccagctgctgattctatcctgttctgacacctttttctttcaagtcatgacctctgttctcacagtgatctttggactcacgtctgtcttagttatcatgatatcttatggttatatcattgccaccattctgaagatcacctcagctgaaggcagagccaaatctttcaacacttgtgcttctcaccttacagcagtgatccttttctttggctcaggtatctttgtttatatgtatcctaatgctggtgattccctgagccaaaacaagttggcatcagtcttatacacagttacaatccccatgttaaatccagtgatctacagcctgaggaacaaggaaatcaaagatgctctaaacagatggaagaagagaatcttctcctggtgttatggaatgaaataatggaatttatttcagatgtataaacagtgtaggaagaacaacaactaaacatttattttcaactctcctgattgttggcagaattgcagttgttccttatataaacctagggctggcacaaaatcaggcaaatgcataaaagatatcttcaaatttaatagccattctttatcagttgtaaactcataaatcaataggcc

SEQ ID NO: 304 - protein, 258 aa, Homo sapiens [sequence omitted]

SEQ ID NO: 305 - DNA, 1243 bp, Homo sapiens
  source (1)..(1243)
  CDS (201)..(1043)
ggcctactgaagactctctactctcatctcctgaagagcagtaagagagaccaatgacatggagtggcggaaccatagtgggagagtgagtgagtttgtgttgctggggcttccctgctcctgcgccactacaggtactattgtttgcccttttgctgctggcctatgtgttggtgctgactgagaacacactcatcattatggcaattaggaaccattccaccctccacaaacccatgtacttttttctagctaatatgtcctttctggagatctggtatgtcactgtcactattcccaagatgcttgctggctttgttggatccaaacaggatcatggacagctaatctcctttgagggatgcatgacacagctctactttttccttggcttgggctgcactgagtgtgtccttctcgctgttatggcctatgatcgctatatggccatctgctatcctctccactacccagtcattgtcagtggccggctgtgtgtgcagatggctgctggctcttgggctggaggttttggcatctccatggtcaaagtttttcttatttctggcctctcttactgtggccccaacatcatcaaccactttttctgtgatgtctctccattgctcaacctctcatgcactgatatgtccacagcagagcttacagatttcatcctggccatttttattcttctagggccactctctgtcactggggcctcctatgtggccattactggtgctgtgatgcacattccttcggctgctggacgctataaggccttttccacctgtgcctctcatctcactgttgtgataatcttctatgcagccagtatcttcatctatgctcggccaaaggcactctcagcttttgacaccaacaagttgtctctgtactgtatgctgtcattgtaccattgctcaatcccatcatttactgcctgcgcaatcaagaggtcaagagagccctatgctgtactctgcaccctgtaccagcaccaggatcctgaccccaagaaagctagcagaaatgtatagaagggatgtgtgaaatctgataaaatgctattaaacttgggatcaatgtgttctatgaagtccagtggagttcttagggcctaaattgggggccagagtttcaaaggcatcactatggaactaggaatactttctttaactagtccaagaggagagagaggaataggttgcaagctagaaaatggatttctgcaggacag

SEQ ID NO: 306 - protein, 280 aa, Homo sapiens
MAIRNHSTLHKPMYFFLANMSFLEIWYVTVTIPKMLAGFVGSKQDHGQLISFEGCMTQLYFFLGLGCTECVLLAVMAYDRYMAICYPLHYPVIVSGRLCVQMAAGSWAGGFGISMVKVFLISGLSYCGPNIINHFFCDVSPLLNLSCTDMSTAELTDFILAIFILLGPLSVTGASYVAITGAVMHIPSAAGRYKAFSTCASHLTVVIIFYAASIFIYARPKALSAFDTNKLSLYCMLSLYHCSIPSFTACAIKRSREPYAVLCTLYQHQDPDPKKASRNV

SEQ ID NO: 307 - DNA, 1153 bp, Homo sapiens
  source (1)..(1153)
  CDS (201)..(953)
gctgggcttcccggctcctgcgccactacaggtactatcgtttgcccgttagtccgcggcctatgcgttggtgctgactgagaacacactcatcattatggcaagtaggaaccattccaccctccacaaacccatgtactttgttctagctaatatgtcctcctctggagatctggtatgtcactgtcactattcccaagatgcttgctggctttgttggatccaaacaggatcatggacagctaatctcctttgagggatgcatgacacagctctactttttccttggcttgggctgcactgagtgtgtccttctcgctgttatggcctatgatcgctatatggccatctgctatcctctccactacccagtcattgtcagtggccggctgtgtgtgcagatggctgctggctcttgggctggaggttttggcatctccatggtcaaagtttttcttatttctggcctctcttactgtggccccaacatcatcaaccactttttctgtgatgtctctccattgctcaacctctcatgcactgatatgtccacagcagagcttacagatttcatcctggccatttttattcttctagggccactctctgtcactggggcctcctatgtggccattactggtgctgtgatgcacacttcttcggctgctggacgctataaggccttttccacctgtgcctctcatctcactgttgtgataatcttctatgcagccagtatcttcatctatgctcgccaaaggcactctcagcttttgacaccaacaagttggtctctgtactgtatgctgtcattgtaccattgctcaatcccatcatttactgcctgcgcaatcaagaggtcaagagagccctatgctgtactctgcacctgtaccagcaccaggatcctgaccccaagaaagctagcagaaatgtatagaagggatgtgtgaaatctgataaaatgctattaaacttgggatcaatgtgttctatgaagtccagtggagttcttagggcctaaattgggggccagagtttcaaaggcatcactatggatctaggaatactttctttaactagtccaagaggagagagaggaataggttgcaagctagaaaatggatttctgcaggacagggccataaaatac

SEQ ID NO: 308 - protein, 250 aa, Homo sapiens
MLAGFVGSKQDHGQLISFEGCMTQLYFFLGLGCTECVLLAVMAYDRYMAICYPLHYPVIVSGRLCVQMAAGSWAGGFGISMVKVFLISGLSYCGPNIINHFFCDVSPLLNLSCTDMSTAELTDFILAIFILLGPLSVTGASYVAITGAVMHTSSAAGRYKAFSTCASHLTVVIIFYAASIFIYARQRHSQLLTPTSWSLYCMLSLYHCSIPSFTACAIKRSREPYAVLCTCTSTRILTPRKLAEMYRRDV

SEQ ID NO: 309 - DNA, 1351 bp, Homo sapiens
  source (1)..(1351)
  CDS (201)..(1151)
atttagatggaacttttatcaaaatacagtgagaagtcagacattcagaaatcgagaggcaaagtcagttatcagtggaaagggtaacatctcagtggattcatgtcctaagaagcctctgatatttcaaaactagagttcatcttagcaaaaattcatgaagtatccatcttgttctaggtgatgaaagaaaccacagcatggagctctggaacttcaccttgggaagtggcttcattttggtggggattctgaatgacagtgggtctcctgaactgctctgtgctacaattacaatcctatacttgttggccctgatcagcaatggcctactgctcctggctatcaccatggaagcccggctccacatgcccatgtacctcctgcttgggcagctctctctcatggacctcctgttcacatctgttgtcactcccaaggcccttgcggactttctgcgcagagaaaacaccatctcctttggaggctgtgcccttcagatgttcctggcactgacaatgggtggtgctgaggacctcctactggccttcatggcctatgacaggtatgtggccatttgtcatcctctgacatacatgaccctcatgagctcaagagcctgctggctcatggtggccacgtcctggatcctggcatccctaagtgccctaatatataccgtgtataccatgcactatcccttctgcagggcccaggagatcaggcatcttctctgtgagatcccacacttgctgaaggtggcctgtgctgatacctccagatatgagctcatggtatatgtgatgggtgtgaccttcctgattccctctcttgctgctatactggcctcctatacacaaattctactcactgtgctccatatgccatcaaatgaggggaggaagaaagcccttgtcacctgctcttcccacctgactgtggttgggatgttctatggagctgccacattcatgtatgtcttgcccagttccttccacagcaccagacaagacaacatcatctctgttttctacacaattgtcactccagccctgaatccactcatctacagcctgaggaataaggaggtcatgcgggccttgaggagggtcctgggaaaatacatgctgccagcacactccacgctctagggaaggatcatggctagcttccagaattccttctcctgagagtcaaaagattcatgttatgaatcaaatactaatggtaaaaccaatacagtgcagagtatagcatttaatagaaaagtgaaggaatgtaactggatttgtcaaatgctctttaaatcttctctccatgaagtaatttatagggcatgatttacactatc

SEQ ID NO: 310 - protein, 316 aa, Homo sapiens
MELWNFTLGSGFILVGILNDSGSPELLCATITILYLLALISNGLLLLAITMEARLHMPMYLLLGQLSLMDLLFTSVVTPKALADFLRRENTISFGGCALQMFLALTMGGAEDLLLAFMAYDRYVAICHPLTYMTLMSSRACWLMVATSWILASLSALIYTVYTMHYPFCRAQEIRHLLCEIPHLLKVACADTSRYELMVYVMGVTFLIPSLAAILASYTQILLTVLHMPSNEGRKKALVTCSSHLTVVGMFYGAATFMYVLPSSFHSTRQDNIISVFYTIVTPALNPLIYSLRNKEVMRALRRVLGKYMLPAHSTL

SEQ ID NO: 311 - DNA, 1393 bp, Homo sapiens
  source (1)..(1393)
  CDS (201)..(1193)
tctattaaaaagcggcactgtggagagaggacttggaaaataactaagttggtttaaattgcaaccaactaataataataaatatatatatttattgttaattagaacaagctagatagcaaagagctagaaatactcaactaggtgtcagttttaacatgaccctcttctacaagacttgatgtcacagacccaaaaaaatgtgttcttttttcttgtgccaaacaggtaaacaggcaaaaatatcaatgggagaagaaaaccaaacctttgtgtccaagtttatcttcctgggtctttcacaggacttgcagacccagatcctgctatttatccttttcctcatcatttatctgctgaccgtgcttggaaaccagctcatcatcattctcatcttcctggattctcgccttcacactcccatgtatttttttcttagaaatctctcctttgcagatctctgtttctctactagcattgtccctcaagtgttggttcacttcttggtaaagaggaaaaccatttctttttatgggtgtatgacacagataattgtctttcttctggttgggtgtacagagtgtgcgctgctggcagtgatgtcctatgaccggtatgtggctgtctgcaagcccctgtactactctaccatcatgacacaacgggtgtgtctctggctgtccttcaggtcctgggccagtggggcactagtgtctttagtagataccagctttactttccatcttccctactggggacagaatataatcaatcactacttttgtgaacctcctgccctcctgaagctggcttccatagacacttacagcacagaaatggccatcttttcaatgggcgtggtaatcctcctggcccctgtctccctgattcttggttcttattggaatattatctccactgttatccagatgcagtctggggaagggagactcaaggctttttccacctgtggctcccatcttattgttgttgtcctcttctatgggtcaggaatattcacctacatgcgaccaaactccaagactacaaaagaactggataaaatgatatctgtgttctatacagcggtgactccaatgttgaaccccataatttatagcttgaggaacaaagatgtcaaaggggctctcaggaaactagttgggagaaagtgcttctctcataggcagtgacctctgagtctgacttttagagctatggcaacattctttaaaaaggagcaagattttagtaggcaattatgaattaggttatttcaggaagaagtgtgaaaatgaacatgttctaaaaactgtgaatactacaatctaaactagaacatagggaaaaaataaaagcatgaaaagttaggtcatttcttgattgtaaaagg

SEQ ID NO: 312 - protein, 330 aa, Homo sapiens
MCSFFLCQTGKQAKISMGEENQTFVSKFIFLGLSQDLQTQILLFILFLIIYLLTVLGNQLIIILIFLDSRLHTPMYFFLRNLSFADLCFSTSIVPQVLVHFLVKRKTISFYGCMTQIIVFLLVGCTECALLAVMSYDRYVAVCKPLYYSTIMTQRVCLWLSFRSWASGALVSLVDTSFTFHLPYWGQNIINHYFCEPPALLKLASIDTYSTEMAIFSMGVVILLAPVSLILGSYWNIISTVIQMQSGEGRLKAFSTCGSHLIVVVLFYGSGIFTYMRPNSKTTKELDKMISVFYTAVTPMLNPIIYSLRNKDVKGALRKLVGRKCFSHRQ

SEQ ID NO: 313 - DNA, 1342 bp, Homo sapiens
  source (1)..(1342)
  CDS (201)..(1142)
ctgtacagacaaaagacactgactgaaatgttgaggagtgggagtggcagtacattcagtacattcagatcccatgaaacaaagaactcacccaaattcctacagcctgagtcccctcctcattaatgagattttgtaaaaagaaatctgtgttcctaatagaattttcttttgtcttcccagatttttgaagacaaaaaatgctggctagaaacaactccttagtgactgaatttattcttgctggattaacagatcatccagagttccggcaacccctctttttcctgtttctagtgatctacattgtcaccatggtaggcaaccttggcttgatcactcttttcggtctaaattctcacctccacacaccaatgtactatttcctcttcaatctctccttcattgatctctgttactcctctgttttcactcccaaaatgctaatgaactttgtgtcaaaaaagaatattatctccaatgttgggtgcatgactcggctgtttttctttctctttttcgtcatctctgaatgttacatgttgacttcaatggcatatgatcgctatgtggccatctgtaatccattgctgtataaggtcaccatgtcccatcaggtctgttctatgctcacttttgctgcttacataatgggattggctggagccacggcccacaccgggtgcatgcttagactcaccttctgcagtgctaatatcatcaaccattacttgtgtgacatactccccctcctccagctttcctgcaccagcacctatgtcaacgaggtggttgttctcattgttgtgggtactaatatcacggtacccagttgtaccatcctcatttcttatgttttcattgtcactagcattcttcatatcaaatccactcaaggaagatcaaaagccttcagtacttgtagctctcatgtcattgctctgtctctgttttttgggtcagcggcattcatgtatattaaatattcttctggatctatggagcagggaaaagtttcttctgttttctacactaatgtggtgcccatgctcaatcccctcatctacagtttgaggaacaaggatgtcaaagttgcactgaggaaagctctgattaaaattcagaggagaaatatattctaattagaagcagtaatgatgtaaaacaattgaaggacttcaaatttttattagtgtttttcatgaagagattttgttgtttctacagatggtgttatgtgtgatttaataaacttgtcttatcatttctcttatgagatcatcttgtgtcttcttttttgtttttgcatctctggcacttctcgcaatattactaaagaggt

SEQ ID NO: 314 - protein, 313 aa, Homo sapiens
MLARNNSLVTEFILAGLTDHPEFRQPLFFLFLVIYIVTMVGNLGLITLFGLNSHLHTPMYYFLFNLSFIDLCYSSVFTPKMLMNFVSKKNIISNVGCMTRLFFFLFFVISECYMLTSMAYDRYVAICNPLLYKVTMSHQVCSMLTFAAYIMGLAGATAHTGCMLRLTFCSANIINHYLCDILPLLQLSCTSTYVNEVVVLIVVGTNITVPSCTILISYVFIVTSILHIKSTQGRSKAFSTCSSHVIALSLFFGSAAFMYIKYSSGSMEQGKVSSVFYTNVVPMLNPLIYSLRNKDVKVALRKALIKIQRRNIF

SEQ ID NO: 315 - DNA, 1342 bp, Homo sapiens
  source (1)..(1342)
  CDS (201)..(1142)
ctgtacagacaaaagacactgactgaaatgttgaggagtgggagtggcagtacattcagaacattcagatcccatgaaacaaagaagtcacccaaattcctacagcctgagtcccctcctcattaatgagattttgtaaaaagaaatctgtgttcctaatagaattttcttttgtcttcccagatttttgaagacaaaaaatgctggctagaaacaactccttagtgactgaatttattcttgctggattaacagatcatccagagttccagcaacccctctttttcctgtttctagtggtctacattgtcaccatggtaggcaaccttggcttgatcattcttttcggtctaaattctcacctccacacaccaatgtactatttcctcttcaatctctccttcattgatctctgttactcctctgttttcactcccaaaatgctaatgaactttgtatcaaaaaagaatattatctcctatgttgggtgcatgactcagctgtttttctttctcttttttgtcatctctgaatgttacatgttgacctcaatggcatatgatcgctatgtggccatctgtaatccattgctgtataaggtcaccatgtcccatcaggtctgttctatgctcacttttgctgcttacataatgggattggctggagccacggcccacaccgggtgcatgcttagactcaccttctgcagtgctaatatcatcaaccattacttgtgtgacatactccccctcctccagctttcctgcaccagcacctatgtcaacgaggtggttgttctcattgttgtgggtattaatatcatggtacccagttgtaccatcctcatttcttatgttttcattgtcactagcattcttcatatcaaatccactcaaggaagatcaaaagccttcagtacttgtagctctcatgtcattgctctgtctctgttttttgggtcagcggcattcatgtatattaaatattcttctggatctatggagcagggaaaagtttcttctgttttctacactaatgtggtgcccatgctcaatcctctcatctacagtttgaggaacaaggatgtcaaagttgcactgaggaaagctctgattaaaattcagagaagaaatatattctaattagaagcagtaataatgtaaaacgattgaagaactttaaatttttattagtgtgttccatgaagagattttgttgtttctacagatggtgttatgtgtgatttaataaacttgtcttatcatttctcttatgaaatcatcttgtctctttttttggttttgcatctctggcacttctcacaattttactaaataggtca

SEQ ID NO: 316 - protein, 313 aa, Homo sapiens
MLARNNSLVTEFILAGLTDHPEFQQPLFFLFLVVYIVTMVGNLGLIILFGLNSHLHTPMYYFLFNLSFIDLCYSSVFTPKMLMNFVSKKNIISYVGCMTQLFFFLFFVISECYMLTSMAYDRYVAICNPLLYKVTMSHQVCSMLTFAAYIMGLAGATAHTGCMLRLTFCSANIINHYLCDILPLLQLSCTSTYVNEVVVLIVVGINIMVPSCTILISYVFIVTSILHIKSTQGRSKAFSTCSSHVIALSLFFGSAAFMYIKYSSGSMEQGKVSSVFYTNVVPMLNPLIYSLRNKDVKVALRKALIKIQRRNIF

SEQ ID NO: 317 - DNA, 973 bp, Homo sapiens
  source (1)..(973)
  CDS (201)..(773)
accttcatacccccatgtacttcttcctctttaacttgtccttcatagatctctgttattcttctgtgtttacacccaaaatgctaatgaactttatttcagagaagaatattatctccttcaaggggtgcatgacccaacttttctttttctgttttttttggtcatttctgaatgttatgtgctgacgtcaatggcgtatgatcgctgtggccatctgtaacccacttctgtatcacattgccatgtctcctacagtgtgctccagccttatgtttggttcctatttgatggccttttctggtgccatggcccacactggatgcatgctgagactgactttctgtgatgcgaacaccatcgatcactacttctgtgacatcctccctctgctccagctctcctgcaccagcacctacatcaatgagctggtggttttcactgtggttggcatcaacatcattgtgcccactgttaccatctttatctcttatggtttcatcctctccagcatcctccatatcagttccaaggagggcaggtccaaagctttcagcacttgcagttcccatataattgctgtttctctgttctttggatcaggtgcatttatgtatctcaacccatcttctgctgggtccatggataagagaaaattatcttctgtcttttatacaaatgtggttcccatgttgaaccccttaatctacagcctgaggaacaaagatgttaaatttgccctaagaaaagccctgagtagtaggaaactttgataagtaatagtatgtgtctgtgtgtatagtcacaagacagggatattctgtttgtttaattataatattatagtagcagccttcttatcctatttctttttaccatggtaaaaaaaactgagtcttctttaaattgattataatttttctggaatagatttcttcttttctctataattttcactattaaaaaaaatctt

SEQ ID NO: 318 - protein, 190 aa, Homo sapiens
MIAVAICNPLLYHIAMSPTVCSSLMFGSYLMAFSGAMAHTGCMLRLTFCDANTIDHYFCDILPLLQLSCTSTYINELVVFTVVGINIIVPTVTIFISYGFILSSILHISSKEGRSKAFSTCSSHIIAVSLFFGSGAFMYLNPSSAGSMDKRKLSSVFYTNVVPMLNPLIYSLRNKDVKFALRKALSSRKL

SEQ ID NO: 319 - DNA, 1342 bp, Homo sapiens
  source (1)..(1342)
  CDS (201)..(1142)
ctgtacagacaaaagacactgactgaaatgttgaggagtgggagtggcagtacattcagtacattcagatcccatgaaacaaagaactcacccaaattcctacagcttgagtcccctcctcattaatgagattttgtaaaaagaaatctgtgttcctaatagaattttcttttgtcttcccagatttttgaagacaaaaaatgctggctagaaacaactccttagtgactgaatttattcttgctggattaacagatcgtccagagttctggcaacccttctttttcctgttcctagtgatctacattgtcaccatggtaggcaaccttggcttgatcactcttttcggtctaaattctcacctccacacaccaatgtactatttcctcttcaatctctccttcattgatctctgttactcctctgttttcactcccaaaatgctaatgaactttgtgtcaaaaaagaatattatctccaatgttgggtgcatgactcggctgtttttctttctctttttcgtcatctctgaatgttacatgttgacctcaatggcatatgatcgctatgtggccatctgtaatccattgctgtataaggtcaccatgtcccatcaggtctgttctatgctcacttttgctgcttacataatgggattggctggagccacggcccacaccgggtgcatgtttagactcaccttctgcagtgctaatatcattaaccattacttgtgtgacatactccccctcctccagctttcctgcaccagcacctatgtcaacgaggtggttgttctcattgttgtgggtactaatatcacggtacccagttgtaccatcctcatttcttatgttttcattgtcactagcattcttcatatcaaatccactcaaggaagatcaaaagccttcagtacttgtagctctcatgtcattgctctgtctctgttttttgggtcagcggcattcatgtatattaaatattcttctggatctatggagcagggaaaagttttttctgttttctacactaatgtggtgcccatgctcaatcccctcatctacagtttgaggaacaaggatgtcaaagttgcactgaggaaagctctgattaaaattcagaggagaaatatattctaattagaagcagtaatgatgtaaaacaattgaaggacttcaaatttttattagtgtttttcatgaagagattttgttgtttctacagatggtgttatgtgtgatttaataaacttgtcttatcatttctcttatgagatcatcttgtgtcttcttttttgtttttgcatctctggcacttctcgcaatattactaaagaggt

SEQ ID NO: 320 - protein, 313 aa, Homo sapiens [sequence omitted]

SEQ ID NO: 321 - DNA, 1342 bp, Homo sapiens
  source (1)..(1342)
  CDS (201)..(1142)
ctgtacagacaaaagacactgactgaaatgttgaggagtgggagtggcagtacattcagtacattcagatcccatgaaacaaagaactcacccaaattcctacagcctgagtcccctcctcattaatgagattttgtaaaaagaaatctgtgttcctaatagaattttcttttgtcttcccagatttttgaagacaaaaaatgctggctagaaacaactccttagtgactgaatttattcttgctggattaacagatcgtccagagttccggcaacccctctttttcctgtttctagtgatctacattgtcaccatggtaggcaaccttggcttgatcattcttttcggtctaaattctcacctccacacaccaatgtactatttcctcttcaatctctccttcattgatctctgttactcctctgttttcactcccaaaatgctaatgaactttgtatcaaaaaagaatattatctcctatgttgggtgcatgactcagctgtttttctttctcttttttgtcatctctgaatgctacatattgacctcaatggcatatgatcgctatgtggccatctgtaatccattgctgtataaggtcaccatgtcccatcaggtctgttctatgctcacttttgctgcttacataatgggattggctggagccacggcccacaccgggtgcatgcttagactcaccttctgcagtgctaatatcatcaaccattacttgtgtgacatactccccctcctccagctttcctgcaccagcacctatgtcaacgaggtggttgttctcattgttgtgggtattaatatcatggtacccagttgtaccatcctcatttcttatgttttcattgtcactagcattcttcatatcaaatccactcaaggaagatcaaaagccttcagtacttgtagctctcatgtcattgctctgtctctgttttttgggtcagcggcattcatgtatattaaatattcttctggatctatggagcagggaaaagtttcttctgttttctacactaatgtggtgcccatgctcaatcctctcatctacagtttgaggaacaaggatgtcaaagttgcactgaggaaagctctgattaaaattcagagaagaaatatattctaattagaagcagtaataatgtaaaacgattgaagaactttaaatttttattagtgtgttccatgaagagattttgttgtttctacagatggtgttatgtgtgatttaataaacttgtcttatcatttctcttatgaaatcatcttgtctctttttttggttttgcatctctggcacttctcacaattttactaaataggtca

SEQ ID NO: 322 - protein, 313 aa, Homo sapiens [sequence omitted]

SEQ ID NO: 323 - DNA, 1330 bp, Homo sapiens
  source (1)..(1330)
  CDS (201)..(1130)
ggcccagcagagctgagatcctctcacagacacgttgttaatacctcagggtggggaggtgtgtagatgagggaggatggaagagagggcatctgcacactggctggtccactagagtcttcttcccttagccatgcttgtgcctgtcatgactctttgtgttttgccctctgcttccccagacagctcgccaagagagaatgactctgagaaacagctcctcagtgactgagtttatccttgtgggattatcagaacagccagagctccagctccctcttttccttctattcttagggatctatgtgttcactgtggtgggcaacttgggcttgatcaccttaattgggataaatcctagccttcacacccccatgtactttttcctcttcaacttgtcctttatagatctctgttattcctgtgtgtttacccccaaaatgctgaatgactttgtttcagaaagtatcatctcttatgtgggatgtatgactcagctatttttcttctgtttctttgtcaattctgagtgctatgtgttggtatcaatggcctatgatcgctatgtggccatctgcaaccccctgctctacatggtcaccatgtccccaagggtctgctttctgctgatgtttggttcctatgtggtagggtttgctggggccatggcccacactggaagcatgctgcgactgaccttctgtgattccaacgtcattgaccattatctgtgtgacgttctccccctcttgcagctctcctgcaccagcacccatgtcagtgagctggtatttttcattgttgttggagtaatcaccatgctatccagcataagcatcgtcatctcttacgctttgatactctccaacatcctctgtattccttctgcagagggcagatccaaagcctttagcacatggggctcccacataattgctgttgctctgttttttgggtcagggacattcacctacttaacaacatcttttcctggctctatgaaccatggcagatttgcctcagtcttttacaccaatgtggttcccatgcttaacccttcgatctacagtttgaggaataaggatgataaacttgccctgggcaaaaccctgaagagagtgctcttctaatgggtctcttcatatcactggcaaccgattctcggtaagcatgatactcaagtgtctttctatttataggcggaggaattttaatatttttcctcaaagagggtctcctctccacttttaaaaattggaaatctctttcctatactctccttgaggactatattattttgcaacaattaaattggctcactgcctgcaag

SEQ ID NO: 324 - protein, 309 aa, Homo sapiens
MTLRNSSSVTEFILVGLSEQPELQLPLFLLFLGIYVFTVVGNLGLITLIGINPSLHTPMYFFLFNLSFIDLCYSCVFTPKMLNDFVSESIISYVGCMTQLFFFCFFVNSECYVLVSMAYDRYVAICNPLLYMVTMSPRVCFLLMFGSYVVGFAGAMAHTGSMLRLTFCDSNVIDHYLCDVLPLLQLSCTSTHVSELVFFIVVGVITMLSSISIVISYALILSNILCIPSAEGRSKAFSTWGSHIIAVALFFGSGTFTYLTTSFPGSMNHGRFASVFYTNVVPMLNPSIYSLRNKDDKLALGKTLKRVLF

SEQ ID NO: 325 - DNA, 1333 bp, Homo sapiens
  source (1)..(1333)
  CDS (201)..(1133)
actttgggagttataatcactcggactgtgaagatagacccacagtgagtggtaaaaaccttcctaccaaagttcaaatctctctccttggattccttttctaagaatgggagatagagactaagaatgtggtggtgatgtttctttctaagtggtcctcttctcttgtcccctccgactctcctgcctgaccaaaaagaatggcagccaaaaactcttctgtgacagagtttatcctcgaaggcttaacccaccagccgggactgcggatccccctcttcttcctgtttctgggtttctacacggtcaccgtggtggggaacctgggcttgataaccctgattgggctgaactctcacctgcacactcccatgtacttcttcctttttaacctctctttaatagatttctgtttctccactaccatcactcccaaaatgctgatgagttttgtctcaaggaagaacatcatttccttcacagggtgtatgactcagctcttcttcttctgcttctttgtcgtctctgagtccttcatcctgtcagcgatggcgtatgaccgctacgtggccatctgtaacccactgttgtacacagtcaccatgtcttgccaggtgtgtttgctccttttgttgggtgcctatgggatggggtttgctggggccatggcccacacaggaagcataatgaacctgaccttctgtgctgacaaccttgtcaatcatttcatgtgtgacatccttcctctccttgagctctcctgcaacagctcttacatgaatgagctggtggtctttattgtggtggctgttgacgttggaatgcccattgtcactgtctttatttcttatgccctcatcctctccagcattctacacaacagttctacagaaggcaggtccaaagcctttagtacttgcagttcccacataattgtagtttctcttttctttggttctggtgctttcatgtatctcaaacccctttccatcctgcccctcgagcaagggaaagtgtcctccctgttctataccataatagtccccgtgttaaacccattaatctatagcttgaggaacaaggatgtcaaagttgccctgaggagaactttgggcagaaaaatcttttcttaagaaaggattagtattggaggaaggagatacaatgctttgcttattagtgtgtgttttcagtgagattcaagttccatttttttcctgtcttgtacagaaaaagaattttaaatctttacatttggatgagtgttaagtgcagacatattctccctgtctctgcttcacctagttattccaggatttcttcattttatgca

SEQ ID NO: 326 - protein, 310 aa, Homo sapiens
MAAKNSSVTEFILEGLTHQPGLRIPLFFLFLGFYTVTVVGNLGLITLIGLNSHLHTPMYFFLFNLSLIDFCFSTTITPKMLMSFVSRKNIISFTGCMTQLFFFCFFVVSESFILSAMAYDRYVAICNPLLYTVTMSCQVCLLLLLGAYGMGFAGAMAHTGSIMNLTFCADNLVNHFMCDILPLLELSCNSSYMNELVVFIVVAVDVGMPIVTVFISYALILSSILHNSSTEGRSKAFSTCSSHIIVVSLFFGSGAFMYLKPLSILPLEQGKVSSLFYTIIVPVLNPLIYSLRNKDVKVALRRTLGRKIFS

SEQ ID NO: 327 - DNA, 1339 bp, Homo sapiens
  source (1)..(1339)
  CDS (201)..(1139)
gctgatctgccttatctctttcttaaattatttaaacatgtttttatttgtgagaggtatgttttcaaatgtcgcaaattgtgaaatttaggtatatcttctgttagctttgcatactaaaaaatttctcaggtgatgatagaggaaagctattgacaatgccgatgtctctatcagaataggttttctgatgaacctggatggaacaacacaatctaacaacggtgaatgaattcattcttacgggaatcacagatatcgctgagctgcaggcaccattatttgcattgttcctcatgatctatgtgatctcagtgatgggcaatttgggcatgattgtcctcaccaagttggactccaggttgcaaacccctatgtacttttttctcagacatctggctttcatggatcttggttattcaacaactgtgggacccaaaatgttagtaaattttgttgtggataagaatataatttcttattatttttgtgcaacacagctagctttctttcttgtgttcattggtagtgaactttttattctctcagccatgtcctacgacctctatgtggccatctgtaaccctctgctatacacagtaatcatgtcacgaagggtatgtcaggtgctggtagcaatcccttacctctattgcacattcatttctcttctagtcaccataaagatttttactttatccttctgtggctacaacgtcattagtcatttctactgtgacagtctccctttgttacctttgctttgttcaaatacacatgaaattgaattgataattctgatctttgcagctattgatttgatttcatctcttctgatagttcttttatcttacctgctcatccttgtagccattctcaggatgaattctgctggcagacaaaaggctttttctacctgtggagcccacctgacagtggtcatagtgttctatgggactttgcttttcatgtacgtgcagcccaagtccagtcattcctttgacactgataaagtggcttccatattttacaccctggttatccccatgttgaatcccttgatctatagtttacgaaacaaagatgtaaaatatgccctacgaaggacatggaataacttatgtaatatttttgtttaaattttgtacaatatgattcctataaattaggttatgggcatgaatttttgctctgcatacttccagaagacataacaagcataactgattcaacatatatttacatatgtctcatacatgataggctcttctaattgctatacatagattaataaacaaaatagtagaaatctttgccttccttgatggatagatgaatt

SEQ ID NO: 328 - protein, 312 aa, Homo sapiens
MEQHNLTTVNEFILTGITDIAELQAPLFALFLMIYVISVMGNLGMIVLTKLDSRLQTPMYFFLRHLAFMDLGYSTTVGPKMLVNFVVDKNIISYYFCATQLAFFLVFIGSELFILSAMSYDLYVAICNPLLYTVIMSRRVCQVLVAIPYLYCTFISLLVTIKIFTLSFCGYNVISHFYCDSLPLLPLLCSNTHEIELIILIFAAIDLISSLLIVLLSYLLILVAILRMNSAGRQKAFSTCGAHLTVVIVFYGTLLFMYVQPKSSHSFDTDKVASIFYTLVIPMLNPLIYSLRNKDVKYALRRTWNNLCNIFV

SEQ ID NO: 329 - DNA, 1360 bp, Homo sapiens
  source (1)..(1360)
  CDS (201)..(1160)
tttaattatactttaccacagttttaatgaatgtgactgtagctttgtgtggttttgacctgatgggaagaggagactctatttagaatttgaaataaaggaaatacctctattgctcatacatcaaattgttaattttcttagaagataatgtttcaaatataataaatattgattttctagtttgcacagttaccaagatgaatcatgtggtaaaacacaatcacacggcagtgaccaaggtgactgaatttattctcatggggattacagacaaccctgggctgcaggctccactgtttggactcttcctcatcatatatctggtcacagtgataggcaatctgggcatggttatcttgacctacttggactccaagctacacacccccatgtactttttccttagacatttgtcaatcactgatcttggttactccactgtcattgccccgaagatgttagtaaacttcatagtgcacaaaaacacaatttcttacaattggtatgccactcagctagcattctttgagattttcatcatctctgagctctttattctatcagcaatggcctatgatcgctacgtagccatctgtaaacctcttctgtacgtgatcatcatggcagagaaagtactttgggtgctggtaattgttccctatctctatagcacgtttgtgtcactatttctcacaattaagttatttaaactgtccttctgtggctcaaacataatcagctatttttactgtgactgtatccctctgatgtccatactctgttctgacacaaatgaattagaattaataattttgatcttctcaggctgtaatttgctcttctccctctcaattgttctcatatcctacatgtttattctagtggccattctcagaatgaactcaaggaaagggaggtacaaagccttctccacctgtagctctcatctgacagtggtgatcatgttctatgggacattgttatttatttacttgcaacccaagtccagtcatactttggctattgataaaatggcctcagtgttttataccctgttgattcctatgctgaatccgttgatctacagcctaaggaacaaagaagtaaaagatgctctaaagagaactttaaccaatcgattcaaaattcccatttaatatcttaatactcagttgcatagttgggtacaataatctgtttagtactctgtcaaaccaattataacataaaaaaagtagaaatactctatctgcttagattttcctctttttctggacaaaacatgtcctcttagagcaacctgtactctttgccacctcaatggaataaataaatactatattcaggtaatatatgt

SEQ ID NO: 330 - protein, 319 aa, Homo sapiens
MNHVVKHNHTAVTKVTEFILMGITDNPGLQAPLFGLFLIIYLVTVIGNLGMVILTYLDSKLHTPMYFFLRHLSITDLGYSTVIAPKMLVNFIVHKNTISYNWYATQLAFFEIFIISELFILSAMAYDRYVAICKPLLYVIIMAEKVLWVLVIVPYLYSTFVSLFLTIKLFKLSFCGSNIISYFYCDCIPLMSILCSDTNELELIILIFSGCNLLFSLSIVLISYMFILVAILRMNSRKGRYKAFSTCSSHLTVVIMFYGTLLFIYLQPKSSHTLAIDKMASVFYTLLIPMLNPLIYSLRNKEVKDALKRTLTNRFKIPI

SEQ ID NO: 331 - DNA, 1351 bp, Homo sapiens
  source (1)..(1351)
  CDS (201)..(1151)
tctttctgtctctgaaataattaccaagtttacttattagacctagaagcttgagtttaataactgagttagagtaataaacaattcaaagaaatgttatcagggaattgtcctagccatataagggcagtcctgcaaataattctttaaagtttttaacctctcttttcccccaaacagatgaatttccaaactctgacatggctcctgaaaatttcaccagggtcactgagtttattcttacaggtgtctctagctgtccagagctccagattcccctcttcctggtctttctggtgctctatgggctgaccatggcagggaacctgggcatcatcaccctcaccagtgttgactctcgacttcaaacccccatgtactttttcctgcaacatctggctctcattaatcttggtaactctactgtcattgcccctaaaatgctgattaactttttagtaaagaagaaaactacctcattctatgaatgtgccacccaactgggagggttcttgttctttattgtatcggaggtaatcatgctggctttgatggcctgtgaccgctatgtggctatttgtaaccctctgctgtacatggtggtggtgtctcggcggctctgcctcctgctggtctccctcacatacctctatggcttttctacagctattgtggtttcatcttatgtattctctgtgtcttattgctcttctaatataatcaatcatttttactgtgataatgttcctctgttagcattatcttgctctgatacttacttaccagaaacagttgtctttatatctgcagcaacaaatgtggttggttccttgattatagttctagtatcttatttcaatattgttttgtctattttaaaaatatgttcatcagaaggaaggaaaaaagccttttctacctgtgcttcacatatgatggcagtcacaattttttatgggacattgctattcatgtatgtgcagccccgaagtaaccattcattggatactgatgataagatggcttctgtgttttacacgttggtaattcctatgctgaatcccttgatctacagcctgaggaataaggatgtgaagactgctctacagagattcatgacaaatctgtgctattcctttaaaacaatgtaattttaaacagtacaggtaaatgaggagagagttaatataagctgccattatgtaaaagaaaatgtaggaaaaagaaaaggtaggtagccgagttacaggttcgtaagcaatcataagaattacaacaagatacaatttagggagctttgaattaaaaaataaactgaaaccctttgagttgtgaggttaagttagaaaaa

SEQ ID NO: 332 - protein, 316 aa, Homo sapiens
MAPENFTRVTEFILTGVSSCPELQIPLFLVFLVLYGLTMAGNLGIITLTSVDSRLQTPMYFFLQHLALINLGNSTVIAPKMLINFLVKKKTTSFYECATQLGGFLFFIVSEVIMLALMACDRYVAICNPLLYMVVVSRRLCLLLVSLTYLYGFSTAIVVSSYVFSVSYCSSNIINHFYCDNVPLLALSCSDTYLPETVVFISAATNVVGSLIIVLVSYFNIVLSILKICSSEGRKKAFSTCASHMMAVTIFYGTLLFMYVQPRSNHSLDTDDKMASVFYTLVIPMLNPLIYSLRNKDVKTALQRFMTNLCYSFKTM

SEQ ID NO: 333 - DNA, 1336 bp, Homo sapiens
  source (1)..(1336)
  CDS (201)..(1136)
acatctaaatgttaatttacacttttatctacattggcaatataattccgttttaaggtcacattctataaatgtattagcaatttatagaaacactaaatgaattaaatgctaggttattgtataatcagaaaccttttgaagtcattcatgttaagtatcaactttgatttctcagcagtttaaagcaattgaacatcatgggtagaagaaataacacaaatgtgcctgacttcatccttacgggactgtcagattctgaagaggtccagatggccctctttatactatttctcctgatatacctaattactatgctgggcaatgtggggatgatattgataatccgcctggacctccagcttcacactcccatgtattttttccttactcacttgtcatttattgacctcagttactcaactgtcatcacacctaaaaccttagcgaacttactgacttccaactatatttccttcatgggctgctttgcccagatgttcttttttgtcttcttgggagctgctgaatgttttcttctctcatcaatggcctatgatcgctacgtagctatctgcagtcctctacgttacccagttattatgtccaaaaggctgtgttgcgctcttgtcactgggccctatgtgattagctttatcaactcctttgtcaatgtggtttggatgagcagactgcatttctgcgactcaaatgtagttcgtcactttttctgcgacacgtctccaattttagctctgtcctgcatggacacatacgacattgaaatcatgatacacattttagctggttccaccctgatggtgtcccttatcacaatatctgcatcctatgtgtccattctctctaccatcctgaaaattaattccacttcaggaaagcagaaagctttgtctacttgtgcctctcatctcttgggagtcaccatcttttatggaactatgatttttacttatttaaaaccaagaaagtcttattctttgggaagggatcaagtggcttctgttttttatactattgtgattcccatgctgaatccactcatttatagtcttagaaacaaagaagttaaaaatgctctcattagagtcatgcagagaagacaggactccaggtaattaaaatagcaggaatgctgaacatttaaactcatcttttctttcttttctatttggtatgtccttggtctccctataaaaacaattgaatccttcatgtttgcatttctgttgtgctaacctttgcttgactaaacgtgatcttgaacatttcaaggtgtatgttttcagaaatccagattgtaattagaaatcataat

SEQ ID NO: 334 - protein, 311 aa, Homo sapiens
MGRRNNTNVPDFILTGLSDSEEVQMALFILFLLIYLITMLGNVGMILIIRLDLQLHTPMYFFLTHLSFIDLSYSTVITPKTLANLLTSNYISFMGCFAQMFFFVFLGAAECFLLSSMAYDRYVAICSPLRYPVIMSKRLCCALVTGPYVISFINSFVNVVWMSRLHFCDSNVVRHFFCDTSPILALSCMDTYDIEIMIHILAGSTLMVSLITISASYVSILSTILKINSTSGKQKALSTCASHLLGVTIFYGTMIFTYLKPRKSYSLGRDQVASVFYTIVIPMLNPLIYSLRNKEVKNALIRVMQRRQDSR

SEQ ID NO: 335 - DNA, 1423 bp, Homo sapiens
  source (1)..(1423)
  CDS (201)..(1223)
aactggaaaataaaatcactttaattagcagggttttttaaaaacatgataaatttagccaagaaattaattacatattttttttccttttacttatacagtgaaattcatctatttggctccaattacttcatcattgtctattccattactatcagggaaattattatgccccaagaaaaaaacaaggatacaattgaatggactccactttcacaggctataacctttataacctgcaagtaaaaactgaaatggacaagttgtcatcaggtttggatatatacaggaatccactgaagaacaagactgaagtcaccatgtttatattgacaggcttcacagatgattttgagctgcaagtcttcctatttttactattttttgcaatctatctctttaccttgataggcaatttagggctggttgtgttggtcattgaggattcctggctccacaaccccatgtattattttcttagtgttttatcattcttggatgcttgctattctacagttgtcactccaaaaatgttggtcaatttcctggcaaaaaataaatccatttcatttatcggatgtgcaacacagatgcttctttttgttacttttggaactacagaatgttttctcttggctgcaatggcttatgatcactatgtagccatctacaaccctctcctgtattcagtgagcatgtcacccagagtctatgtgccactcatcactgcttcctacgttgctggcattttacatgctactatacatatagtggctacatttagcctgtccttctgtggatccaatgaaattaggcatgtcttttgtgatatgcctcctctccttgctatttcttgttctgacactcacacaaaccagcttctactcttctactttgtgggttctattgagatagtcactatcctgattgtcctcatttcctgtgatttcattctgttgtccattctgaagatgcattctgctaagggaaggcaaaaggccttctctacatgtggctctcacctaactggagtgacaatttatcatggaacaattctcgtcagttatatgagaccaagttccagctatgcttcagaccatgacatcatagtgtcaatattttacacaattgtgattcccaagttgaatcccatcatctatagtttgaggaacaaagaagtaaaaaaggcagtgaagaaaatgttgaaattggtttacaaatgaagaatatatttaaaattgagtaaacctgaaaaaaatgttgagtgtcagagttcacatctctatattttagttaaagtatttgcatatcaaagaatagtttcaaaaaagcattaagcagcctgccaatgcagcatttttcaaatgtaaacaaattgcatcacatatttgccaattaatttgttcagagatctatattaaat

SEQ ID NO: 336 - protein, 340 aa, Homo sapiens
MDSTFTGYNLYNLQVKTEMDKLSSGLDIYRNPLKNKTEVTMFILTGFTDDFELQVFLFLLFFAIYLFTLIGNLGLVVLVIEDSWLHNPMYYFLSVLSFLDACYSTVVTPKMLVNFLAKNKSISFIGCATQMLLFVTFGTTECFLLAAMAYDHYVAIYNPLLYSVSMSPRVYVPLITASYVAGILHATIHIVATFSLSFCGSNEIRHVFCDMPPLLAISCSDTHTNQLLLFYFVGSIEIVTILIVLISCDFILLSILKMHSAKGRQKAFSTCGSHLTGVTIYHGTILVSYMRPSSSYASDHDIIVSIFYTIVIPKLNPIIYSLRNKEVKKAVKKMLKLVYK

SEQ ID NO: 337 - DNA, 1480 bp, Homo sapiens
  source (1)..(1480)
  CDS (201)..(1280)
tttaatatataaacagcttaatacaattcagtggtaaattaaccagtagacctgatgattttagaaacagaataagtccagccaactaatgaacgtccatttcttccatttgattctgcagtgagtggcatgaacacatggctgaccagtttgtcactgtcttctgattcactactagagaattatgcactgctgaatatatgtcgtacagtatatacaagagcacagttaacatccccttgagtcatggtgttgttcattctttttgtcataatatgaactgtaactttatgcatatcttcaagtttgttctagatttcaacatgaagaatgtcactgaagttaccttatttgtactgaagggcttcacagacaatcttgaactgcagactatcttcttcttcctgtttctagcaatctacctcttcactctcatgggaaatttaggactgattttagtggtcattagggattcccagctccacaaacccatgtactattttctgagtatgttgtcttctgtggatgcctgctattcctcagttattaccccaaatatgttagtagattttacgacaaagaataaagtcatttcattccttggatgtgtagcacaggtgtttcttgcttgtagttttggaaccacagaatgctttctcttggctgcaatggcttatgatcgctatgtagccatctacaaccctctcctgtattcagtgagcatgtcacccagagtctacatgccactcatcaatgcttcctatgttgctggcattttacatgctactatacatacagtggctacatttagcctatccttctgtggagccaatgaaattaggcgtgtcttttgtgatatccctcctctccttgctatttcttattctgacactcacacaaaccagcttctactcttctactttgtgggctctatcgagctggtcactatcctgattgttctgatctcctatggtttgattctgttggccattctgaagatgtattctgctgaagggaggagaaaagtcttctccacatgtggagctcacctaactggagtgtcaatttattatgggacaatcctcttcatgtatgtgagaccaagttccagctatgcttcggaccatgacatgatagtgtcaatattttacaccattgtgattcccttgctgaatcccgtcatctacagtttgaggaacaaagatgtaaaagactcaatgaaaaaaatgtttgggaaaaatcaggttatcaataaagtatattttcatactaaaaaataaattataaaaggtgagggtgatactctgcacctcaataccaagaatgtgtcattgtggtgttatgatatatgttggtttccatccagggttcctggctcataattcccatagcctttgttacagtcttttgttataatgttgggtgttatacctcaggggcaggccttttaccttctcctgccctcctttcacttgcacca

SEQ ID NO: 338 - protein, 359 aa, Homo sapiens
MSYSIYKSTVNIPLSHGVVHSFCHNMNCNFMHIFKFVLDFNMKNVTEVTLFVLKGFTDNLELQTIFFFLFLAIYLFTLMGNLGLILVVIRDSQLHKPMYYFLSMLSSVDACYSSVITPNMLVDFTTKNKVISFLGCVAQVFLACSFGTTECFLLAAMAYDRYVAIYNPLLYSVSMSPRVYMPLINASYVAGILHATIHTVATFSLSFCGANEIRRVFCDIPPLLAISYSDTHTNQLLLFYFVGSIELVTILIVLISYGLILLAILKMYSAEGRRKVFSTCGAHLTGVSIYYGTILFMYVRPSSSYASDHDMIVSIFYTIVIPLLNPVIYSLRNKDVKDSMKKMFGKNQVINKVYFHTKK

SEQ ID NO: 339 - DNA, 1108 bp, Homo sapiens
  source (1)..(1108)
  CDS (201)..(908)
ttgtgggagtctcagatgatccggagctccagattcccctcttcctggtcttcctggtgctctatttgctgaccgtggcagggaacctgggcatcatcaccctcaccagtgttgaccctcaacttcaaacccccatgtactttttcctctgacacttggctattattaatctttgcaattctactgtcgttgcccctaaaatgctggttaacttcctggttaccaagaaaaccatatcatactatggatgtgcagcccaactgggtggattcttggttttcattgtggctgagattttcacgctggctgcaatggcctatgaccgctatgtggctatttggagccctctgctctacgccgtagtggtgtctccaaaggtgtgtcgtctgctggtgtccctcacataccttcagagtcttatcacagcactgactgtctcttcctgtgtgttctctgtgtcatactgttcttccaacattatcaaccatttttactgtgatgatgtccctttgctagcattgtcctgttctgatacctacattccagaaacagcagtctttatcttttcagggaccaacttgcttttctccatgatcgttgttctgatatcctacttcaacattgttattaccattttgaggatacgttcctcagaaggacgacaaaaagccttttccacctgtgcttctcacatgatagctgtggttgtgttctatgggactctccttttcatgtatttgcaaccaaggagtaatcattcattagatactgacaaaatggcttcggtcttctacaccctggtgataccagtgctgaaccctctaatctacagcctcaggaacaagaacgtgaaggatgcactaaagaggttcctagataacccatgccgatcactcaaactaatgtaaatgtaaagctaaaactatcttcctttagtgcttttcgttttttcctgaaaactgctgtgttttaaaaaaaagtgtcaagaaatttttagaaattccattcatttcagtgggaaatgtttaattgttcttatgtcaacctcacatacgcaaacaagaaaacaatatctataattaataaaaataatttgaaaataatcaca

SEQ ID NO: 340 - protein, 235 aa, Homo sapiens
MLVNFLVTKKTISYYGCAAQLGGFLVFIVAEIFTLAAMAYDRYVAIWSPLLYAVVVSPKVCRLLVSLTYLQSLITALTVSSCVFSVSYCSSNIINHFYCDDVPLLALSCSDTYIPETAVFIFSGTNLLFSMIVVLISYFNIVITILRIRSSEGRQKAFSTCASHMIAVVVFYGTLLFMYLQPRSNHSLDTDKMASVFYTLVIPVLNPLIYSLRNKNVKDALKRFLDNPCRSLKLM

SEQ ID NO: 341 - DNA, 1339 bp, Homo sapiens; identical to SEQ ID NO: 81
  source (1)..(1339)
  CDS (201)..(1139)

SEQ ID NO: 342 - protein, 312 aa, Homo sapiens; identical to SEQ ID NO: 82

SEQ ID NO: 343 - DNA, 1348 bp, Homo sapiens
  source (1)..(1348)
  CDS (201)..(1148)
ttactctctcccaagtgattgcaaagctgatttattagactgagaatactgagtttaataactgaattagattaatacatgacaagaagatcacacccaggaattgtccttgccatctagtggaaatcctagaaaatgattccttaacgtctataaccacttattttcttcctcaaacagatgaatttccaaactctgacatggctcctgaaaatttcaccagggtcactgagtttattctcacaggtgtctctagctgtccagagctccagattcccctcttcctggtcttcctagtgctctatgtgctgaccatggcagggaacctgggcatcatcaccctcaccagtgttgactctcgacttcaaacccccatgtactttttcctgagacatctagctatcatcaatcttggcaactctactgtcattgcccctaaaatgctgatgaactttttagtaaagaagaaaactacctcattctatgaatgtgccacccaactgggagggttcttgttctttattgtatcggaggtaatgatgctggctgtgatggcctatgaccgctatgtggccatttgtaaccctctgctctacatggtggtggtgtctcggcggctctgcctcctgctggtgtccctcacgtacctctatggcttttctacagctattgtggtttcaccttgtatattctctgtgtcttattgctcttctaatataatcaatcatttttactgtgatattgcacctctgttagcattatcttgctctgatacttacataccagaaacaatagtctttatatctgcagcaacaaatttgtttttttccatgattacagttctagtatcttatttcaatattgttttgtccattctaaggatacgttcaccagaaggaaggaaaaaagccttttccacctgcgcttcgcatatgatagcagtcacggttttctatgggacaatgctatttatgtatttgcagccccaaaccaaccactcactggatactgataagatggcttctgtgttttacacattggtgattcctatgctgaatcccttgatctacagcctgaggaataatgatgtaaatgttgccttaaagaaattcatggaaaatccatgttactcctttaaatcaatgtaattttagagctctataaataaatgaagagatagttcatgtaacctgccattatgtaagagaaataaaagtaagtttacaagcaatcctaagaattaccaagaggtaagatttaaagatcattgaattaaaaaaaatacatggaaacattttgagttatgagagtaatacaaaacaaaaatattatttattaactttgccca

SEQ ID NO: 344 - protein, 315 aa, Homo sapiens [sequence omitted]

SEQ ID NO: 345 - DNA, 1324 bp, Homo sapiens
  source (1)..(1324)
  CDS (201)..(1124)
  modified_base (1)..(7): a, t, c, g, unknown or other
nnnnnnngaattcctcttttaggaaagtagaaaattttgctttatatttcatttctgaatcaaatgtagaaataatgtttctattatctattgtgaataacaatctattctgtctacaaatattataatttgtttaaatagcactacatggaacagctaataacccaactgtttcttcctagaagagataactggactaaatgggccaacacaatctaacagtgctaactgaattcattctgatggaactcacaaggcggcctgagctgcagattcccctttttggagtcttcctcgtcatctacctaatcacagtggtgggcaacctaactatgatcattttgaccaaactggactcccacttacatacacctatgtacttttctatcagacatttggcttctgttgatcttggtaattctactgtcatttgtcccaaggtgctggcaaattttgttgtggatcgaaatactatttcctattatgcatgtgctgcacagctggcattcttccttatgttcattatcagtgaatttttcatcctgtcagccatggcctatgaccgctatgtggccatttgtaaccctctgctctattatgttattatgtctcagcgactgtgtcatgtactggtgggcattcaatatctctacagcacatttcaggctctgatgttcactattaagatttttacattgaccttctgtggctctaatgtcatcagtcatttttactgtgatgatgttcctttgctacctatgctttgctcaaatgcacaggaaatagaattgttgagcatactattttctgtatttaatttgatctcctcctttctgatagtcttagtgtcctacatgttgattttgttagctatatgtcaaatgcattctgcagagggcaggaaaaaggctttctccacatgtggttcccatttgacagtggtggttgtgttctatgggtctctactcttcatgtacatgcagcccaattccactcacttctttgatactgataaaatggcttctgtgttttacactttagtaatccccatgcttaaccctttgatttacagcttaagaaacgaagaggtgaaaaatgccttctataagctctttgagaattgatgtcaactttgtgtttaataatcaatttgtaatattgttataataaatatataatatagattaatgtcacttggtaatttttcatgtgtatataaattttccaattttcaaatttttttaattgttttttatttcaataatttttgggaagtaggaggtttctggttatgtgaataagttcattggggtaatttctgagg

SEQ ID NO: 346 - protein, 307 aa, Homo sapiens
MGQHNLTVLTEFILMELTRRPELQIPLFGVFLVIYLITVVGNLTMIILTKLDSHLHTPMYFSIRHLASVDLGNSTVICPKVLANFVVDRNTISYYACAAQLAFFLMFIISEFFILSAMAYDRYVAICNPLLYYVIMSQRLCHVLVGIQYLYSTFQALMFTIKIFTLTFCGSNVISHFYCDDVPLLPMLCSNAQEIELLSILFSVFNLISSFLIVLVSYMLILLAICQMHSAEGRKKAFSTCGSHLTVVVVFYGSLLFMYMQPNSTHFFDTDKMASVFYTLVIPMLNPLIYSLRNEEVKNAFYKLFEN

SEQ ID NO: 347 - DNA, 1171 bp, Homo sapiens; identical to SEQ ID NO: 73
  source (1)..(1171)
  CDS (201)..(971)

SEQ ID NO: 348 - protein, 256 aa, Homo sapiens; identical to SEQ ID NO: 74

SEQ ID NO: 349 - DNA, 1243 bp, Homo sapiens; identical to SEQ ID NO: 85
  source (1)..(1243)
  CDS (201)..(1043)

SEQ ID NO: 350 - protein, 280 aa, Homo sapiens; identical to SEQ ID NO: 86

SEQ ID NO: 351 - DNA, 1375 bp, Homo sapiens; identical to SEQ ID NO: 83
  source (1)..(1375)
  CDS (201)..(1175)

SEQ ID NO: 352 - protein, 324 aa, Homo sapiens; identical to SEQ ID NO: 84

SEQ ID NO: 353 - DNA, 1333 bp, Homo sapiens; identical to SEQ ID NO: 77
  source (1)..(1333)
  CDS (201)..(1133)

SEQ ID NO: 354 - protein, 310 aa, Homo sapiens; identical to SEQ ID NO: 78

SEQ ID NO: 355 - DNA, 1339 bp, Homo sapiens; identical to SEQ ID NO: 79
  source (1)..(1339)
  CDS (201)..(1139)

SEQ ID NO: 356 - protein, 312 aa, Homo sapiens; identical to SEQ ID NO: 80

SEQ ID NO: 357 - DNA, 1318 bp, Homo sapiens
  source (1)..(1318)
  CDS (201)..(1118)
gggaataacatcaagcagctgatatttgctgttttgttcacttgtctcagaacatgttttggggaaaaccaagggagagaacaaactcaagagggagcaggatgatgatagtcctcaggcctgggaaggatgtttctaatgattgaggagagttctttgatttctgtgattccaggctgtcagctcctgtgctttaaaatatggttgctacaaacaatgtgactgaaataattttcgtgggattttcccagaattggagtgagcagagggtcatttctgtgatgtttctcctcatgtacacagctgttgtgctgggcaatggcctcattgtggtgaccatcctggccagcaaagtgctcacctcccccatgtatttctttctcagctacttatcctttgtggagatctgctactgttctgtcatggcccccaagcttatctttgactcctttatcaagaggaaagtcatttctctcaagggctgcctcacacagatgttttccctccatttctttggtggcactgaggcctttctcctgatggtgatggcctatgaccgctatgtggccatctgcaagcccttgcactacatggccatcatgaaccagcgaatgtgtggtctcctcgtgaggatagcatggggcgggggcctgctgcattctgttgggcaaaccttcctgattttccagctcccgttctgtggccccaacatcatggaccactacttctgtgatgtccacccagtgctggagctggcctgcgcagacaccttcttcattagcctgctgatcatcaccaatggcggctccatctccgtagtcagtttcttcgtgctgatggcttcctacctgatcatcctgcacttcctgagaagccacaacttggaggggcagcacaaggccctctccacctgtgcctctcatgtcacagttgtcgacctgttcttcataccttgctccttggtctatattaggccctgtgtcaccctccctgcagacaagatagttgctgtattttatacagtggtcacacctctcttaaaccctgtgatttactccttcaggaatgctgaagtgaaaaatgccatgaggagatttattgggggaaaagtaatttgagaagagaagtagatgatttagttagggaaaataggaggagtaagggatgggaaattggggcatgtaagatctcactctgcatctaccttgcccaatggagtgagtggccttgggccagtcaccttttttgaagtttcagtttcctcatcttatgggattggacaagattaaagggagctctaggatggagtaagaggggt

SEQ ID NO: 358 - protein, 305 aa, Homo sapiens
MVATNNVTEIIFVGFSQNWSEQRVISVMFLLMYTAVVLGNGLIVVTILASKVLTSPMYFFLSYLSFVEICYCSVMAPKLIFDSFIKRKVISLKGCLTQMFSLHFFGGTEAFLLMVMAYDRYVAICKPLHYMAIMNQRMCGLLVRIAWGGGLLHSVGQTFLIFQLPFCGPNIMDHYFCDVHPVLELACADTFFISLLIITNGGSISVVSFFVLMASYLIILHFLRSHNLEGQHKALSTCASHVTVVDLFFIPCSLVYIRPCVTLPADKIVAVFYTVVTPLLNPVIYSFRNAEVKNAMRRFIGGKVI

SEQ ID NO: 359 - DNA, 1330 bp, Homo sapiens
  source (1)..(1330)
  CDS (201)..(1130)
gtcttgcatagggtaggctattgagcaccaaatgaataaacattgactatataaataaataaacaaatgagtcagaaaatatgcataaaagggttttattaacaagcaagtgctaaataaacatgaaggattagcgttatgattgcatgtgctttgtcacagggctcttctctgagatctgtcttctctgagtggaatccatggccagtacaagtaatgtgactgagttgattttcactggccttttccaggatccagctgtgcagagtgtatgctttgtggtgtttctccccgtgtaccttgccacggtggtgggcaatggcctcatcgttctgacggtcagtatcagcaagagtctggattctcccatgtacttcttccttagctgcctgtccttggtggagatcagttattcctccactatcgcccctaaattcatcatagacttacttgccaagattaaaaccatctctctggaaggctgtctgactcagatattcttcttccacttctttggggttgctgagatccttttgattgtggtgatggcctatgattgctacgtggccatttgcaagcctcttcattatatgaacattatcagtcgtcaactgtgtcaccttctggtggctggttcctggctggggggcttttgtcactccataattcagattctcgttatcatccaattgcccttctgtggtcccaatgtgattgaccactatttctgtgacctccagcctttattcaagcttgcctgcactgacaccttcatggagggggttattgtgttggccaacagtggattattctctgtcttctccttcctcatcttggtgtcctcttatattgtcattctggtcaacttgaggaaccattctgcagaggggaggcacaaagccctctccacctgtgcttctcacatcacagtggtcatcttgttttttggacctgctatcttcctctacatgcgaccttcttccactttcactgaagataaacttgtggctgtattctacacggtcatcacccccatgctgaaccccatcatttacacactcaggaatgcagaggtgaaaatcgccataagaagattgtggagcaaaaaggagaatccagggagggagtgaaaaaagagcttagggatgaaaaagtgatacaaaatgtatgtctgattactctctgttcttgaaatggattttgattttagtgggatattcaagaatgacagaaacaaatataaaggcttaatgatactgctgctgtgattctgcttagtagccaaagacacttggtatgctggtgtaatgtttgaaggacagaggtcaga

SEQ ID NO: 360 - protein, 309 aa, Homo sapiens
MASTSNVTELIFTGLFQDPAVQSVCFVVFLPVYLATVVGNGLIVLTVSISKSLDSPMYFFLSCLSLVEISYSSTIAPKFIIDLLAKIKTISLEGCLTQIFFFHFFGVAEILLIVVMAYDCYVAICKPLHYMNIISRQLCHLLVAGSWLGGFCHSIIQILVIIQLPFCGPNVIDHYFCDLQPLFKLACTDTFMEGVIVLANSGLFSVFSFLILVSSYIVILVNLRNHSAEGRHKALSTCASHITVVILFFGPAIFLYMRPSSTFTEDKLVAVFYTVITPMLNPIIYTLRNAEVKIAIRRLWSKKENPGRE

SEQ ID NO: 361 - DNA, 1345 bp, Homo sapiens
  source (1)..(1345)
  CDS (201)..(1145)
attactgtatagataagttatccactaaattgtgttttcatatccataattttgatctaggaaatatagaaaacaaatcattgctataataaaataacacatacatttcagttttgtgcaactctgttttgttcatcacagggtttttcttttttatctctccttgctacagagtatcttgtgattctaaaataacatccatggagaataatacagaggtgagtgaattcatcctgcttggtctaaccaatgccccagaactacaggttcccctctttatcatgtttaccctcatctacctcatcactctgactgggaacctggggatgatcatattaatcctgctggactctcatctccacactcccatgtacttttttctcagtaacctgtctcttgcaggcattggttactcctcagctgtcactccaaaggttttaactgggttgcttatagaagacaaagccatctcctacagtgcctgtgctgctcagatgttcttttgtgcagtctttgccactgtggaaaattacctcttgtcctcaatggcctatgaccgctacgcagcagtgtgtaaccccctacattataccaccaccatgacaacacgtgtgtgtgcttgtctggctataggctgttatgtcattggttttctgaatgcttctatccaaattggagatacatttcgcctctctttctgcatgtccaatgtgattcatcactttttctgtgacaaaccagcagtcattactctgacctgctctgagaaacacattagtgagttgattcttgttcttatatcaagttttaatgtcttttttgcacttcttgttaccttgatttcctatctgttcatattgatcaccattcttaagaggcacacaggtaagggataccagaagcctttatctacctgtggttctcacctcattgccattttcttattttatataactgtcatcatcatgtacatacgaccaagttccagtcattccatggacacagacaaaattgcatctgtgttctacactatgatcatccccatgctcagtcctatagtctataccctgaggaacaaagacgtgaagaatgcattcatgaaggttgttgagaaggcaaaatattctctagattcagtcttttaatgatgcaaaatcatcacaatgttattttatctcacttagatctactttatacaataactcaaatgttaaaatgctatatggtatatagaatgtaaaatttcatctaatattatttttgtctttagttgagaaacagttctaagtatccacgagttagaaaaatacgatgacaatttctcatggagtttaatgaaatatgt

SEQ ID NO: 362 - protein, 314 aa, Homo sapiens
MENNTEVSEFILLGLTNAPELQVPLFIMFTLIYLITLTGNLGMIILILLDSHLHTPMYFFLSNLSLAGIGYSSAVTPKVLTGLLIEDKAISYSACAAQMFFCAVFATVENYLLSSMAYDRYAAVCNPLHYTTTMTTRVCACLAIGCYVIGFLNASIQIGDTFRLSFCMSNVIHHFFCDKPAVITLTCSEKHISELILVLISSFNVFFALLVTLISYLFILITILKRHTGKGYQKPLSTCGSHLIAIFLFYITVIIMYIRPSSSHSMDTDKIASVFYTMIIPMLSPIVYTLRNKDVKNAFMKVVEKAKYSLDSVF

SEQ ID NO: 363 - DNA, 1132 bp, Homo sapiens
  source (1)..(1132)
  CDS (201)..(932)
aatcactcagtgttgatggaatttgtgttcctggcctatccctcctgcccagaactgcatattctgtccttccttggggtcagcctggtttatggtttgatcatcactgggaacattctcattgtggtgtccattcacacagaaacctgtctatgcacatccatgtactatttcctgggcagcctttctgggattgaaatatgctacactgcagtggtggtgccccatatcctggccaacaccctacagtcagagaagacatcactctcctgggctgtgccacccagatggctttcttcattgcactgggcagtgctgattgcttcctcttggctgccatggcctatgaccgctatgtggccatttgccacccgttgcagtaccctctcctcatgacattgactctttgtgtccacttggttgtggcatcagtcatcagtggtctgttcctgtccttacaactggtggccttcatcttctctctgccattctgccaggctcagggcattgagcacttcttttgtgatgtgccaccagtcatgcatgttgtttgtgctcagagtcacattcatgagcagtcagtgctggtggcagccatactagccattgctgtgcctttcttcctcatcaccacctcctacaccttcatagtggctgctctgctcaagatccactcggctgctggccgccaccgggccttctccacctgctcttcccacctcactgtggtgctgctgcagtatggctgctgtgccttcatgtacctgtgccccagctccagctacaaccccaagcaagatcggttcatctcactggtgtacacattgggaaccccactgctcaacccacttatctatgccctgaggaacagtgagatgaaaggggccgtagggagagttcttaccaggaactgcctttcccagaacagctaggaaagacgaggggacagcctatcaggcaagtatttggttccagcccaccaaatctgtatgaaactgagatttctatcatttggtgttaaaactcatctaaaagatggtataaattatatggatactgtttatgtgtgccaaagatttttaaatatttctacaatttgactctgtaatttctcttcttggaaagaactaca

SEQ ID NO: 364 - protein, 243 aa, Homo sapiens
MLHCSGGAPYPGQHPTVREDITLLGCATQMAFFIALGSADCFLLAAMAYDRYVAICHPLQYPLLMTLTLCVHLVVASVISGLFLSLQLVAFIFSLPFCQAQGIEHFFCDVPPVMHVVCAQSHIHEQSVLVAAILAIAVPFFLITTSYTFIVAALLKIHSAAGRHRAFSTCSSHLTVVLLQYGCCAFMYLCPSSSYNPKQDRFISLVYTLGTPLLNPLIYALRNSEMKGAVGRVLTRNCLSQNS

SEQ ID NO: 365 - DNA, 1345 bp, Homo sapiens
  source (1)..(1345)
  CDS (201)..(1145)
aatgctctatgaattattgtaatttaaagttgcattttgcggtcatgggcatgttttagatccgggactcctggaaacaagtaattacaatactggaataaagcaaaaaaatggcatgctgattgatctcagtagtcctccctccatttatcattctgattctgccttttcatttctacagggcagctacataattcccaatggagaacaacacagaggtgactgaattcatccttgtggggttaactgatgacccagaactgcagatcccactcttcatagtcttccttttcatctacctcatcactctggttgggaacctggggatgattgaattgattctactggactcctgtctccacacccccatgtacttcttcctcagtaacctctccctggtggactttggttattcctcagctgtcactcccaaggtgatggtggggtttctcacaggagacaaattcatattatataatgcttgtgccacacaattcttcttctttgtagcctttatcactgcagaaagtttcctcctggcatcaatggcctatgaccgctatgcagcattgtgtaaacccctgcattacaccaccaccatgacaacaaatgtatgtgcttgcctggccataggctcctacatctgtggtttcctgaatgcatccattcatactgggaacactttcaggctctccttctgtagatccaatgtagttgaacactttttctgtgatgctcctcctctcttgactctctcatgttcagacaactacatcagtgagatggttattttttttgtggtgggattcaatgacctcttttctatcctggtaatcttgatctcctacttatttatatttatcaccatcatgaagatgcgctcacctgaaggacgccagaaggccttttctacttgtgcttcccaccttactgcagtttccatcttttatgggacaggaatctttatgtacttacgacctaactccagccatttcatgggcacagacaaaatggcatctgtgttctatgccatagtcattcccatgttgaatccactggtctacagcctgaggaacaaagaggttaagagtgcctttaaaaagactgtagggaaggcaaaggcctctataggattcatattttaattataaagaattcacaataagataattttttccacctcatattaatctttgtctaccaagcccaatatttgggcttcctcatggacagtttctattgactgttttcttaaacatatgaattggccatactttcttcattctttaagtgacactttttttgttgttaaaatctggacattttaaataataaaaaatagcat

SEQ ID NO: 366 - protein, 314 aa, Homo sapiens
MENNTEVTEFILVGLTDDPELQIPLFIVFLFIYLITLVGNLGMIELILLDSCLHTPMYFFLSNLSLVDFGYSSAVTPKVMVGFLTGDKFILYNACATQFFFFVAFITAESFLLASMAYDRYAALCKPLHYTTTMTTNVCACLAIGSYICGFLNASIHTGNTFRLSFCRSNVVEHFFCDAPPLLTLSCSDNYISEMVIFFVVGFNDLFSILVILISYLFIFITIMKMRSPEGRQKAFSTCASHLTAVSIFYGTGIFMYLRPNSSHFMGTDKMASVFYAIVIPMLNPLVYSLRNKEVKSAFKKTVGKAKASIGFIF

SEQ ID NO: 367 - DNA, 1345 bp, Homo sapiens
  source (1)..(1345)
  CDS (201)..(1145)
cagtatgtaactctgtataattaatgcactgcatttggttgtcaaggccgcgctttttctagggaatcttgaagtacaagttattgctacaatgaaggaatacatattgtacttatacttttcaattttaattcaatttatttatcacactgttcttttttgtattgctacaagcatcctgtgagtcccccagagcagtgatggaaaataagacagaagtaacacaattcattcttctaggactaaccaatgactcagaactgcaggttcccctctttataacgttccccttcatctatattatcactctggttggaaacctgggaattattgtattgatattctgggattcctgtctccacaatcccatgtacttttttctcagtaacttgtctctagtggacttttgctactcttcagctgtcactcccatcgtcatggctggattccttatagaagacaaggtcatctcttacaatgcatgtgctgctcaaatgtatatctttgtagcttttgccactgtggaaaattacctcttggcctcaatggcctatgaccgctatgcagcagtgtgcaaacccctacattacaccacaaccatgacaacaactgtgtgtgctcgtctggccataggctcctacctctgtggtttcctgaatgcctccatccacactggggacacatttagtctctctttctgtaagtccaatgaagtccatcactttttctgtgatattccagcagtcatggttctctcttgctctgatagacatattagcgagcttgttcttatttatgttgtgagcttcaatatctttatagctctcctggttatcttgatatcctacacattcatttttatcaccatcctaaagatgcactcagcttcagtataccagaagcctttgtccacctgtgcctctcatttcattgcagtcggcatcttctatgggactattatcttcatgtacttacaacccagctccagtcactccatggacacagacaaaatggcacctgtgttctatacaatggtcatccccatgctgaaccctctggtctatagtctgaggaacaaggaagtgaagagtgcattcaagaaagttgttgagaaggcaaaattgtctgtaggatggtcagtttaacattgtgggatgcaccataacctagttttatttctctcggatcttctccatgttctgaatcacatttaaggtccacaataaagttaaattcctgaagtgattgccatgcctgtttaaaagtctattgtctaaataaaaggaaacattatgtccagaaacataacatctgaacaagaatggctaagacatcttgggacttc

SEQ ID NO: 368 - protein, 314 aa, Homo sapiens
MENKTEVTQFILLGLTNDSELQVPLFITFPFIYIITLVGNLGIIVLIFWDSCLHNPMYFFLSNLSLVDFCYSSAVTPIVMAGFLIEDKVISYNACAAQMYIFVAFATVENYLLASMAYDRYAAVCKPLHYTTTMTTTVCARLAIGSYLCGFLNASIHTGDTFSLSFCKSNEVHHFFCDIPAVMVLSCSDRHISELVLIYVVSFNIFIALLVILISYTFIFITILKMHSASVYQKPLSTCASHFIAVGIFYGTIIFMYLQPSSSHSMDTDKMAPVFYTMVIPMLNPLVYSLRNKEVKSAFKKVVEKAKLSVGWSV

SEQ ID NO: 369 - DNA, 1162 bp, Homo sapiens
  source (1)..(1162)
  CDS (201)..(962)
aggtaatgcaattaatcatcacatgaaatacatggagaataggaataacgtgacagagtttgttttactagggcttacagagaatccaaagatgcagaaaatcatatttgttgtgtttttttgtcatctatatcatcactgtggtgggaaatgcgctcattgtggtcaccatcactgccagcccatcactggggtcccccatgtaccttttcctggcctatctctcctttatagatgcctgctattcttctgtcaatacccctaagctgatcacagattcactctatggaaagaacaccatcctattcaatggatgcatgactcaagtctttggagaacatttcttcggaggtgcagagggtatcctacttactgtgatggcctatgaccgctatgtggccatctgcaagcccttgcactatatgactatcatgaaccagtgtgtgtatgccctgctaatgggagtggtgtggatgggaggctttcttcatgcaaccatacagatcctcttcatcttccaattacctttctgtggtcctaatgtcatagatcactttatgtgtgatctgaaccctttgctcaacctcgcctgcactgacacccatatgctgggactcttcattgctgccaacagtggattcatctgcttgttaaactttgtcctcctgctggtctcctatgtggtcatcttgcgctccctaaggactcacagcttggaggcaaggcacaaagccctctccacctgtgtctcccacatcacagttgtcatcttattctttgtgccctgcatatttgtgtacatgagacctgcagctactttacctattgataaagcagttgctatattctacactatgataactcctatgttaaaccccttaatctataccttgaggaatgcccagatgaaaaatgccatcaggaaattgtgtagtagaaaggacatttcaggtaacaaataaatgtaactagagctcaacattgattcaatttagtcatgtcctttgtagggacatggatgaagccggaaaccatcattctcagcaaactattgcaagaacaagaaaccaaacacctcatgttctcactcatagctgggaattgaacaatgagaacacatggacacaggaaggggaacatcacacaccggggcatgttgtgg

SEQ ID NO: 370 - protein, 253 aa, Homo sapiens [sequence omitted]

SEQ ID NO: 371 - DNA, 1036 bp, Homo sapiens
  source (1)..(1036)
  CDS (201)..(836)
aactaagaagtcagctggagaagtttacaggtacctattcctagagaattttgggaacagaaggaatcatctgtgagatggcagagtaatgaaaaggcaaagttttggactatttgattcttttatgcttcttttttttcatttttttttctaaaggtaaaatattccttcctggaggttttatcacccacactacatagatgaagaataaaaggaatgtgactgaattcgttttaacaggtcttacacagaaccctaaaatggagaaagtcatgtttgcagtatttttggttctttacatgataacactttcaggcaacctgctccttgtggttacaattaccaccagccaggctcttagctcccccatgtacttcttcctgagccacctttctttgatagacacagtttattcttcttcttcagctcctaagttgattgtcgattcccttcatgagaagaaaatcatctcctttaatgggtgtatggctcaagcctatgaagaacacatttttggtgctactgagatcatcctgctgacagtgatggcctgtgacaactatgtggccatctgcaaacctctgcactacacaaccatcatgagccacagcctgtgcattctcctagtggtagtggcctggataggaggatttctccatgcaaatattcagattctatttacagtatggctgcccttctgtggccccaatgtcatagaccacttcatgtgtgacttgtgccctttgttaaaacttgtttgcctggacactcatacccttggtctctttgttgctgccaacagtgggttcatctgcttattaaacttccttctctaggtggtatcctatgtgatcatcttgagatgtttaaagaactatatcttggaggggaggggtaaagccctctccacctgtatttctcacatcataatagttgtcttattctttgtgccttgtatatttgtgtatctgcacccagtgacaaactctgcccattgataaagctgctgctgtattttatactatggtggtcccaa

SEQ ID NO: 372 - protein, 211 aa, Homo sapiens
MKNKRNVTEFVLTGLTQNPKMEKVMFAVFLVLYMITLSGNLLLVVTITTSQALSSPMYFFLSHLSLIDTVYSSSSAPKLIVDSLHEKKIISFNGCMAQAYEEHIFGATEIILLTVMACDNYVAICKPLHYTTIMSHSLCILLVVVAWIGGFLHANIQILFTVWLPFCGPNVIDHFMCDLCPLLKLVCLDTHTLGLFVAANSGFICLLNFLL

SEQ ID NO: 373 - DNA, 1222 bp, Homo sapiens
  source (1)..(1222)
  CDS (201)..(1022)
catattacaatggagaagtttaaacaaatttaaagatgtatcaataaaaattgttttcttttcaggtattgtaattaaccaccatttgaaatacatggtgaatagaaacaatgtgacagagtttattctactggggcttatagagaatccaaaaatgcagaaaatcatatttgttgtgttttgtcatctacatcaccaccatgataggaaatgtgctcattgtggtcaccgtcactgccagcccatcattgaggtcccccatgtacttttacctggcctatctgtcctttattgatgcctgctattcctccgtcaatgcccctaagctgatcacagattcactctatgaaaacaagactatcttactcaatggatgtatgactcaagtctttggagaacattttttcggaggtgttgaggtcatcctacttactgtaatggcctatgaccgctacgtggtcatctgcaagcccttgcactataccaccatcatgaagcagcatgtttgtagcctgctagtgggagtgtcatgggtaggaggctttcttcatgcaaccgtacagatcctcttcatcttccaattacctttctgtggtcctaatgtcatagatcactttatgtgggatctcaaccctttgctcaatcttgtctgcactaatacccacactctaggactcttcgttgctgccaacagtgggttcatatgcctgttaaactttctcttgctcctggtctcctatatggtcatactgtactccttaaggacccacagcttagaggcaaggtgcaaagccctctccacctgtgtctcccacatcacagttgtcatcttattctttataccctgcatatttgtgtacatgagacctccagctactttacccattgataaagcagttgctgtattctacactatgatagctcctatgttaaaccccttaatctacaccttgaggaatgctcagatgaaaaatgccattaggaaattgtgtagtaggaaagctatttcaagtgtcaaataaatgtgactggagcccaacatgattcaactgaggcaagggtcaaaaggacattttgggtaatgtcagcaaggaatacttattggataaataaaataattaaccactgtgatccatagatgatgccttgaggggagtcaaaatgggttcaagaaaaaggagaaaacctaaccgtgtatcattctcacaaacagggaaaattc

SEQ ID NO: 374 - protein, 273 aa, Homo sapiens [sequence omitted]

SEQ ID NO: 375 - DNA, 1408 bp, Homo sapiens
  source (1)..(1408)
  CDS (201)..(1208)
tgggtagaaaggcattgtattagatgcagaggcaaaaaacctaactctaacacttaaagaaataagaaatgcaactaatctttggtttcaacagcaattgattggctttaagtcacagtatacttatgaggcaaaaattaataataacattaatttaaaaatagctttgtaaatcctaataccataagagattatttgtaatgctaggatccaaaccaagagttcatttgtatattttgccctgtgcctctcaacaggtttctaccatgggtgacaggggaacaagcaatcactcagaaatgactgacttcattcttgcaggcttcagggtacgcccagagctccacattctcctcttcctgctatttttgtttgtttatgccatgatccttctagggaatgttgggatgatgaccattattatgactgatcctcggctgaacacaccaatgtattttttcctaggcaatctctccttcattgatcttttctattcatctgttattgaacccaaggctatgatcaacttctggtctgaaaacaagtctatctcctttgcaggctgtgtggcccagctctttctctttgccctcctcattgtgactgagggatttctcctggcggccatggcttatgaccgctttattgccatctgcaaccctctgctctactctgttcaaatgtccacacgtctgtgtactcagttggtggctggttcctatttttgtggctgcattagctcagttattcagactagcatgacatttactttatctttttgcgcttctcgggctgttgaccacttttactgtgattctcgcccacttcagagactgtcttgttctgatctctttatccatagaatgatatctttttccttatcatgtattattatcttgcctactatcatagtcattatagtatcttacatgtatattgtgtccacagttctaaagatacattctactgagggacataagaaggccttctccacctgcagctctcacctgggagttgtgagtgtgctgtatggtgctgtcttttttatgtatctcactcctgacagatttcctgagctgagtaaagtggcatccttatgttactccctagtcactcccatgttgaatcctttgatttactctctgaggaacaaagatgtccaagaggctctaaaaaaatttctagagaagaaaaatattattctttgattattatttctctttcaccaattttattgtggctatttatttaatacacctgtgttcattaataaaagttactctcccgaatgtcataaaaatactcttagatgttttcatgtgatgtgctctttccatattttacttttttacctcccaagacatcattaattctgaaaatcttggatattggagatatcctggacatt

SEQ ID NO: 376 - protein, 335 aa, Homo sapiens
MLGSKPRVHLYILPCASQQVSTMGDRGTSNHSEMTDFILAGFRVRPELHILLFLLFLFVYAMILLGNVGMMTIIMTDPRLNTPMYFFLGNLSFIDLFYSSVIEPKAMINFWSENKSISFAGCVAQLFLFALLIVTEGFLLAAMAYDRFIAICNPLLYSVQMSTRLCTQLVAGSYFCGCISSVIQTSMTFTLSFCASRAVDHFYCDSRPLQRLSCSDLFIHRMISFSLSCIIILPTIIVIIVSYMYIVSTVLKIHSTEGHKKAFSTCSSHLGVVSVLYGAVFFMYLTPDRFPELSKVASLCYSLVTPMLNPLIYSLRNKDVQEALKKFLEKKNIIL

SEQ ID NO: 377 - DNA, 1165 bp, Homo sapiens
  source (1)..(1165)
  CDS (201)..(965)
ccaaaaggacatgacaacacaaatttcaatatcctccacaactaaaaaaacggatattttatcatcccgagaaataggcagaaagttcaatttttaaccttgtcttttaccttttaataggttcttgccatgggtgaaaagggaacaggcagaaagttcaatttttaaccttgtctcataccttttaacaggttcttgccatgggtgacaagggaacaggcaaccattcagatgtaactgatttcattcttgaaggcttcagggtccgcccagagttctacattctcctcttcttcctgttcctgctgatctatagcatggttcttttggggaacattagtgtgatgacaatcattgtaactgattcccagctgaacacaccaatgtatttttttctaggcaacctctccttcattgacgtctcctactccactgttattgctcctaaagccatggcccacttcctgtctgaaaaaaagacagtctcttttgcaggttgtgttgcccagttattcctttttgccctgttcattgtaacagaggggtttgtcctggcagccatggcctatgaccgcttcagtgccatctgcaatcctcttcttcatagtgttcacatgtcaagacgcctctgcactcagttggttgctggttcttatttctgtggctgggccagttccatcctccaagtcagtgtaacattctcagtgtccttctgtgcttccagagtcattgctcacttctactgtgattcttatcaaattgaaaagatttcctgttctaatctctttgtcaataagatggtatctctgagtttgagtgtcatcattattttgcctacaattgttgttattatagtatcttacctgtatattgtatcctcagtcttgaagatcccctccagtgaagggagaaagaaagacttttccacttgcagctcccatcggggtgttgtaagtttgctctaagggactgtttcctttgtgtacctcacacctccaagcaatcctgaacttcgcaaagtggcttcagtattttacatatgtgttacacccatgttaaaccctctgatctactctctaagaaacaaagatgtcaaagaagctttgagaaaaatcctgtgtaacaaaaaagctttatcctaattctacttccttatgatttcctc

SEQ ID NO: 378 - protein, 254 aa, Homo sapiens
MGDKGTGNHSDVTDFILEGFRVRPEFYILLFFLFLLIYSMVLLGNISVMTIIVTDSQLNTPMYFFLGNLSFIDVSYSTVIAPKAMAHFLSEKKTVSFAGCVAQLFLFALFIVTEGFVLAAMAYDRFSAICNPLLHSVHMSRRLCTQLVAGSYFCGWASSILQVSVTFSVSFCASRVIAHFYCDSYQIEKISCSNLFVNKMVSLSLSVIIILPTIVVIIVSYLYIVSSVLKIPSSEGRKKDFSTCSSHRGVVSLL

SEQ ID NO: 379 - DNA, 1351 bp, Homo sapiens
  source (1)..(1351)
  CDS (201)..(1151)
agatttatacagaatgtttatttttccttaattttatcttatcataaacatcatttctgcttcagagaaacagaatggtaagacaactgagaataaagatgttttatggatgttattattatttttgagattacctctatattgatttaataccctttgatgcacatactttgatttttagagagaaactcatctaagatatgatctgtgaaaatcacaccagagtcactgaatttattcttcttggttttacaaacaaccccgagatgcaagtttccctctttatttttttcctggccatttatacagtcactttgttgggcaactttcttattgtcacagttaccagtgtggatctcgcacttcaaacacccatgtacttctttcttcaaaatctgtcacttcttgaagtatgtttcaccttggttatggtgccaaaaatgcttgtagatctagtgtccccaaggaaaattatctcttttgtgggctgtggtacccagatgtacttcttcttcttctttggcagttctgaatgtttccttctctccatgatggcttatgatcgctttgtggccatctgtaaccctctccattattcagtcataatgaacaggtccctatgcttgtggatggccataggctcttggatgtccggtgttcctgtgtctatgctacagacagcttggatgatggcccttcctttctgtggaccaaatgccgtggaccactttttctgtgatggtcccccagtgttaaaactagtcacagtggatacaaccatgtatgaaatgcaagcacttgcctccacactcctgtttatcatgtttcccttttgtctcattttggtttcctacacccgcattatcataacaattctgaggatgtcctctgccactggccgccagaaggcattttctacttgttcctcacacctcattgtggtgtccctcttctacggaacagccagtctgacctacctgcggcccaaatcaaaccagtcccctgagagcaagaagctagtgtcattgtcctacactgtcatcacacctatgctaaaccccatcatctacggcctgaggaacaatgaagtgaaaggggctgtcaagaggacaatcactcaaaaagtcttacagaagttagatgtgttttgacttctattgtgtaagaatgcttccaaagtagggacagcagaacctactaaccaaagcttaaaacggaatggaagagttgctcttatttcatcactaactggtgggtgcatttctgtgtatcattcaggttcctagcaggaaagagatggtactcctgaattgggataagtgagaaaacgctttatgagagggctatttag

SEQ ID NO: 380 - protein, 316 aa, Homo sapiens
MICENHTRVTEFILLGFTNNPEMQVSLFIFFLAIYTVTLLGNFLIVTVTSVDLALQTPMYFFLQNLSLLEVCFTLVMVPKMLVDLVSPRKIISFVGCGTQMYFFFFFGSSECFLLSMMAYDRFVAICNPLHYSVIMNRSLCLWMAIGSWMSGVPVSMLQTAWMMALPFCGPNAVDHFFCDGPPVLKLVTVDTTMYEMQALASTLLFIMFPFCLILVSYTRIIITILRMSSATGRQKAFSTCSSHLIVVSLFYGTASLTYLRPKSNQSPESKKLVSLSYTVITPMLNPIIYGLRNNEVKGAVKRTITQKVLQKLDVF

SEQ ID NO: 381 - DNA, 1342 bp, Homo sapiens
  source (1)..(1342)
  CDS (201)..(1142)
ctgccactttctagatattacctcagacacattatttaatctctctgagacccatggctcattcagagaaaggtattaattctctcacttgattttgagaggaactgtgtggcaagtgctttaccaaattacagaaatgttgcttgttatttctaaataacttctcttcttggctgtgcctcagcttctggcctggagtgatggctggggaaaaccatactacactgcctgaattcctccttctgggattctctgacctcaaggccctgcagggccccctgttctgggtggtgcttctggtctacctggtcaccttgctgggtaactccctgatcatcctcctcacacaggtcagccctgccctgcactcccccatgtacttcttcctgcgccaactctcagtggtggagctcttctacaccactgacatcgtgcccaggaccctggccaatctgggctccccgcatccccaggccatctctttccagggctgtgcagcccagatgtacgtcttcattgtcctgggcatctcggagtgctgcctgctcacggccatggcctatgaccgatatgttgccatctgccagcccctacgctattccaccctcttgagcccacgggcctgcatggccatggtgggtacctcctggctcacaggcatcatcacggccaccacccatgcctccctcatcttctctctaccttttcgcagccacccgatcatcccgcactttctctgtgacatcctgccagtactgaggctggcaagtgctgggaagcacaggagcgagatctccgtgatgacagccaccatagtcttcattatgatccccttctctctgattgtcacctcttacatccgcatcctgggtgccatcctagcaatggcctccacccagagccgccgcaaggtcttctccacctgctcctcccatctgctcgtggtctctctcttctttggaacagccagcatcacctacatccggccgcaggcaggctcctctgttaccacagaccgcgtcctcagtctcttctacacagtcatcacacccatgctcaaccccatcatctacacccttcggaacaaggacgtgaggagggccctgcgacacttggtgaagaggcagcgcccctcaccctgaagggactcggatgtctgctcactcactcagtgctcatcctcccactcttcagggactggatttaaaccccactctcacagaaatcatgcagcacctcaaaggaaaaggcttcctggaagaaagtgctgaaattaaaacagagataaatctacatattgcctcttatcccagagtccacactcactatcagagcatgggtt

SEQ ID NO: 382 - protein, 313 aa, Homo sapiens
MAGENHTTLPEFLLLGFSDLKALQGPLFWVVLLVYLVTLLGNSLIILLTQVSPALHSPMYFFLRQLSVVELFYTTDIVPRTLANLGSPHPQAISFQGCAAQMYVFIVLGISECCLLTAMAYDRYVAICQPLRYSTLLSPRACMAMVGTSWLTGIITATTHASLIFSLPFRSHPIIPHFLCDILPVLRLASAGKHRSEISVMTATIVFIMIPFSLIVTSYIRILGAILAMASTQSRRKVFSTCSSHLLVVSLFFGTASITYIRPQAGSSVTTDRVLSLFYTVITPMLNPIIYTLRNKDVRRALRHLVKRQRPSP

SEQ ID NO: 383 - DNA, 1330 bp, Homo sapiens
  source (1)..(1330)
  CDS (201)..(1130)
aaaggtcacttaaacaaaagatatggggcttgcatggagccaagtgcaccccaatgggacactggtttgggccatatggatggtgagcaatgtatgacctgattctgttcattaagataagctttatgtctcctactctaagaaactcttcaattttcatcattctcaccttttgcctttaggttttccgaaggtcaacaatgaaaaacagaaccatgtttggtgagtttattctactgggccttacaaatcaacctgaactccaagtgatgatattcatctttctgttcctcacctacatgctaagtatcctaggaaatctgactattatcaccctcaccttactagacccccacctccagacccccatgtatttcttcctccggaatttctccttcttagaaatttccttcacatccatttttattcccagatttctgaccagcatgacaacaggaaataaagttatcagctttgctggctgcttgactcagtatttttttgctatatttcttggagctaccgagttttacctcctggcctccatgtcttatgatcgttatgtggccatctgcaaacccttgcattacctgactattatgagcagcagagtctgcatacaactagtgttctgctcctggttggggggattcctagcaatcttaccaccaatcatcctgatgacccaggtagatttctgtgtctccaacattctgaatcactattactgtgactatgggcctctcgtggagcttgcctgctcagacacaagcctcttagaactgatggtcatcctcttggccgttgtgactctcatggttactctggtgctggtgacactttcttacacatacattatcaggactattctgaggatcccttctgcccagcaaaggacaaaggccttttccacttgttcctcccacatgattgtcatctccctctcttatggcagctgcatgtttatgtacattaatccttctgcaaaagaaggaggtgctttcaacaaaggaatagctgtactcattacttcggttactcccttactgaatcccttcatatatactttaagaaatcagcaagtgaaacaagctttcaaggactcagtcaaaaagattgtgaaactttaaaaaaggagattacacttcaaaatacattttcacttaacaaatatgcattgaatgtctatatttcaagtgctaaattggcccttgaagattaaaataggaaaagtatatgtcttaatttcaagaaaactatagtctagaatcaaggaaagatatataaatggtaaatttatgtaataaatttacaaaaaacaaaataatat

SEQ ID NO: 384 - protein, 309 aa, Homo sapiens
MKNRTMFGEFILLGLTNQPELQVMIFIFLFLTYMLSILGNLTIITLTLLDPHLQTPMYFFLRNFSFLEISFTSIFIPRFLTSMTTGNKVISFAGCLTQYFFAIFLGATEFYLLASMSYDRYVAICKPLHYLTIMSSRVCIQLVFCSWLGGFLAILPPIILMTQVDFCVSNILNHYYCDYGPLVELACSDTSLLELMVILLAVVTLMVTLVLVTLSYTYIIRTILRIPSAQQRTKAFSTCSSHMIVISLSYGSCMFMYINPSAKEGGAFNKGIAVLITSVTPLLNPFIYTLRNQQVKQAFKDSVKKIVKL

SEQ ID NO: 385 - DNA, 1243 bp, Homo sapiens
  source (1)..(1243)
  CDS (201)..(1043)
ttttttaattgatcattcttgggtgtttctcgtggagggggatttggcagggtcataggacaatagtggagggaaggtcagcagataaacaagtgaacaaaggtctctggttttcctaggcagaggagctccttggattttcttatctccatgagttccaggttctgctgtttgctctgatcctgttgatatatgtgctgatgctgctgggcaacctggccatcatcagcttcatttgccttgattcccgccttcactcacccatgtacttcttcctctgcaacttctccctcatggagatggtggtcacctccactgtggtacataggatgctggcagacctgctatccactcacaagaccatgtccctggccaaatgcctaacccagtctttcttttacttctccctgggctctgccaacttcctgatactcatggtcatggcctttgatcgctacgtggccatctgccaccccctgcgctacccaaccatcacgaatggtccagtgtgtgtgaagctggtggtggcctgttgggtggttggtttcctctccattgtctctcccacactgcagaaaacacgactctggttctgtggccctaacatcatcggccactacttctgtgactctgccccgctgctcaagcttgcctgctctgacacccgccacattgagcgcatggacctcttcctgtccctgctctttgtgctgaccaccatgctgcttatcatcctctcctacatcctcattgtggctgcagtgctgcacatcccttcctcctctggatgccagaaggccttctccacctgtgcctctcacctcacagtggtggttctgggctatggcagtgccatcttcatctacgtgaggccaggcaagggccactccacatacctcaacaaggcggtggccatggtgactgcaatggtaacccctttcctcaaccccttcatcttcaccttccggaatgagaaggtcaaggaggtcattgaggatgtgactaaaaggatcttccttggagacccagcagcctgtaggtgagagggtgagcccttgacagggctagagagcacctgacaagtcacgaggagtagacttgctgcaggtgggcacccacatgcctaagctggagctcctcactctcttttttctcattttctcctggtccctcatcttcatgcaagtttcttctcctgcactgcagagaactaatggacacacattggtagaatgtctcaaag

SEQ ID NO: 386 - protein, 280 aa, Homo sapiens
MLLGNLAIISFICLDSRLHSPMYFFLCNFSLMEMVVTSTVVHRMLADLLSTHKTMSLAKCLTQSFFYFSLGSANFLILMVMAFDRYVAICHPLRYPTITNGPVCVKLVVACWVVGFLSIVSPTLQKTRLWFCGPNIIGHYFCDSAPLLKLACSDTRHIERMDLFLSLLFVLTTMLLIILSYILIVAAVLHIPSSSGCQKAFSTCASHLTVVVLGYGSAIFIYVRPGKGHSTYLNKAVAMVTAMVTPFLNPFIFTFRNEKVKEVIEDVTKRIFLGDPAACR

SEQ ID NO: 387 - DNA, 1051 bp, Homo sapiens
  source (1)..(1051)
  CDS (201)..(851)
aattgcttgcatccaaaatatacacacagcattaagggctggtttttatcttttattttcccaatcctctttccttctcaaggtgtccaagacacacagagccactgaatctcacaggtgtctgagaattcctcctcctgggactctcagaggatccagaactgcagccggtcctcgctttgctctccctgtccctgtccatgtatctggtcacggtgctgaggaacctgctcagcatcctggctgtcagctctgactcccacctccacacccccatgtacttcttcctctccaacctgtgctgggctgacatcggttacacctcggccacggttcccaagatgattgtggacacgcagtcgcatggcagagtcatctctcatgctggctgcctgacacagatgtctttcttggtcctttttgcatgtatagaagacatgctcctgactgtgatggcctatgactgctttgtagccatctgttgccctctgcactacccagtcatcgtgaatcctcacctctgtgtcttcttcgttttggtgtcctttttccttagcctgttggattcccagctgcacagttggattgtgttacaattcaccatcatcaagaatgtggaaatctctaattttgtctgtgacccctctcaacttctcaaacttgcctgttctgacagcgtcatcaatagcatattcatatattttgatagtactatgtttggttttcttcccatttcagggatccttttgtcttactctaaaattgtcccctccgttctaaggatgtcatcgtcagatgggaagtataaagccttctccacctgtggctctcacctagcagttgtttgctgatttgatggaacaggcattggcatgtacctgacttcagctgtggcaccaccccccaggaatggtgtcgtggagtcagggatgtacgctgtggtcacccccatgctgaaccttttcatctacagcctgagaaacaggcacacacaaagtgccctgcggaggctgcgcacagaacagttgaatctcatgatctcttgcatcct

SEQ ID NO: 388 - protein, 216 aa, Homo sapiens
MYLVTVLRNLLSILAVSSDSHLHTPMYFFLSNLCWADIGYTSATVPKMIVDTQSHGRVISHAGCLTQMSFLVLFACIEDMLLTVMAYDCFVAICCPLHYPVIVNPHLCVFFVLVSFFLSLLDSQLHSWIVLQFTIIKNVEISNFVCDPSQLLKLACSDSVINSIFIYFDSTMFGFLPISGILLSYSKIVPSVLRMSSSDGKYKAFSTCGSHLAVVC

SEQ ID NO: 389 - DNA, 1336 bp, Homo sapiens
  source (1)..(1336)
  CDS (201)..(1136)
actttcatagcagtcatggatgttaaatattagtcaactgagtatttacatacgtaaatatatgtaacctaattaaattgactatttcttttgtttagaattgactatatttcttttgtttataaactagaggtattgtaatgccaatcattgtgacatttttctgatttcttttttttaggtaactgaatattggatacatggctcacacaaatgaatcgatggtgtctgagtttgtacttttgggactctctaattcctggggacttcaacttttctttttcgccatcttctctatagtctatgtgacatcagtgctaggcaatgtcttaattattgtcattatttcttttgactcccatttgaactctcctatgtacttcttgctcagtaatctttctttcattgatatctgtcagtctaactttgccacccccaagatgcttgtagacttttttattgagcgcaagactatctcctttgagggttgcatggcccagatattcgttcttcacagttttgttgggagtgagatgatgttgcttgtagctatggcatatgacagatttatagccatatgtaagcctctgcactacagtacaattatgaaccggaggctctgtgtaatttttgtgtctatttcctgggcggtgggcgttcttcattctgtgagccacttggcttttacagtggacctgccattctgtggtcccaatgaggtggatagcttcttttgtgaccttcccttggtgatagagctggcttgcatggatacatatgaaatggaaattatgaccctaacgaacagtggcctgatatcattgagctgtttcctggctttaattatttcctacaccatcattttgatcggtgtccgatgcaggtcctccagtgggtcatctaaggctctttctacattaactgcccacatcacagtggtcattcttttcttcgggccttgcatttatttctatatatggccttttagcagacttcctgtggacaaatttctttctgtgttctacactgtttgtactcccttgttgaaccccatcatctactctttgaggaatgaagatgttaaagcagccatgtggaagctgagaaaccatcatgtgaactcctggaaaaactagggatcgttacgaaggagcataatcctgaattagaatgaagaccctccagtgtatcatagtgtcatgccaaccatctttgccagacatatgggttattgagttacagaattggttttttgttttaagtgcaagggaattgcatcaagtcagtctctggttctatttaaatataatgttaactattttttcattgtttataa

SEQ ID NO: 390 - protein, 311 aa, Homo sapiens
MAHTNESMVSEFVLLGLSNSWGLQLFFFAIFSIVYVTSVLGNVLIIVIISFDSHLNSPMYFLLSNLSFIDICQSNFATPKMLVDFFIERKTISFEGCMAQIFVLHSFVGSEMMLLVAMAYDRFIAICKPLHYSTIMNRRLCVIFVSISWAVGVLHSVSHLAFTVDLPFCGPNEVDSFFCDLPLVIELACMDTYEMEIMTLTNSGLISLSCFLALIISYTIILIGVRCRSSSGSSKALSTLTAHITVVILFFGPCIYFYIWPFSRLPVDKFLSVFYTVCTPLLNPIIYSLRNEDVKAAMWKLRNHHVNSWKN

SEQ ID NO: 391 - DNA, 1339 bp, Homo sapiens
  source (1)..(1339)
  CDS (201)..(1139)
aattactgcagagtaattgtttcaaagtgatataatatttaagctaatctctgtgttgatatatttaaaattatatgatctcatatcatcaactattatcaccaactaatagaaataagaaaatattggtgttaactgtgacttattttttaattctctttgtatataaagaacttctggaacctttctgagttgagtaaatggatcttaaaaatggatctctagtgaccgagtttattttactaggattttttggacgatgggaacttcaaattttcttctttgtgacattttccctgatctacggtgctactgtgatgggaaacattctcattatggtcacagtgacatgtaggtcaacccttcattctcccttgtactttctccttggaaatctctcttttttggacatgtgtctctccactgccacaacacccaagatgatcatagatttgctcactgaccacaagaccatctctgtgtggggctgcgtgacccagatgttcttcatgcacttctttgggggtgctgagatgactcttctgataatcatggcctttgacaggtatgtagccatatgtaaacccctgcactataggacaatcatgagccacaagctgctaaaggggtttgcgatactttcatggataattggttttttacactccataagccagatagttttaacaatgaacttgcctttctgtggccacaatgtcataaacaacatattttgtgatcttccccttgtgatcaagcttgcttgcattgaaacatacaccctggaattatttgtcattgctgacagcgggctgctctctttcacctgtttcatcctcttgcttgtttcttacattgtcatcctggtcagtgtaccaaaaaaatcatcacatgggctctccaaggcgctgtccacattgtctgcccacatcattgtggtcactctgttctttggaccttgtatttttatctatgtttggccattcagtagtttggcaagcaataaaactcttgccgtattttatacagttatcacacccttactgaatccgagtatttataccctgagaaataagaaaatgcaagaggccataagaaaattacggttccaatatgttagttctgcacagaatttctagatgttagcactatataattaacttttaaatgctacgataagatagtttgaatagattatgtataatgcatcatttcacttttcttatgttataataataacgcataaagacaatactaaattactttaaattttacatttaagacttttataaacataaggatagagatctgcagcaaaatagacataaaaatagacata

SEQ ID NO: 392 - protein, 312 aa, Homo sapiens
MDLKNGSLVTEFILLGFFGRWELQIFFFVTFSLIYGATVMGNILIMVTVTCRSTLHSPLYFLLGNLSFLDMCLSTATTPKMIIDLLTDHKTISVWGCVTQMFFMHFFGGAEMTLLIIMAFDRYVAICKPLHYRTIMSHKLLKGFAILSWIIGFLHSISQIVLTMNLPFCGHNVINNIFCDLPLVIKLACIETYTLELFVIADSGLLSFTCFILLLVSYIVILVSVPKKSSHGLSKALSTLSAHIIVVTLFFGPCIFIYVWPFSSLASNKTLAVFYTVITPLLNPSIYTLRNKKMQEAIRKLRFQYVSSAQNF

SEQ ID NO: 393 - DNA, 1315 bp, Homo sapiens
  source (1)..(1315)
  CDS (201)..(1115)
gactatttgggatacttctctgggccattagtaaaatcactgactgacaaaattccacaaaagtaagggtccttgtaagttcaagtgccttgactgagtaccaaatgtggacatcaacatgaacatttctttccaatatgcatcatttccctaccccttattctcacttattttgatcattatgggataaagttgacgatatggaaagagcaaaccattcagtggtatcggaatttattttgttgggactttccaaatctcaaaatcttcagattttattcttcttgggattctctgtggtcttcgtggggattgtgttaggaaacctgctcatcttggtgactgtgacctttgattcgctccttcacacaccaatgtattttctgcttagcaacctctcctgcattgatatgatcctggcttcttttgctacccctaagatgattgtagatttcctccgagaacgtaagaccatctcatggtggggatgttattcccagatgttctttatgcacctcctgggtgggagtgagatgatgttgcttgtagccatggcaatagacaggtatgttgccatatgcaaacccctccattacatgaccatcatgagcccacgggtgctcactgggctactgttatcctcctatgcagttggatttgtgcactcatctagtcaaatggctttcatgttgactttgcccttctgtggtcccaatgttatagacagctttttctgtgaccttccccttgtgattaaacttgcctgcaaggacacctacatcctacagctcctggtcattgctgacagtgggctcctgtcactggtctgcttcctcctcttgcttgtctcctatggagtcataatattctcagttaggtaccgtgctgctagtcgatcctctaaggctttctccactctctcagctcacatcacagttgtgactctgttctttgctccgtgtgtctttatctacgtctggcccttcagcagatactcggtagataaaattctttctgtgttttacacaattttcacacctctcttaaatcctattatttatacattaagaaatcaagaggtaaaagcagccattaaaaaaagactctgcatataaatttaaagcatactttttagatgagacttttgaagagacactctcttgtttgtttgaacatttaagaaactcgtttttaatgtatcaggttcgtgcaaaagtcattgcggtttttgccattaaagtaaatgacaaaattaaagtaatggcaaaaaccactataacttgtgtaccagctaacagttcaagttccatatgag

SEQ ID NO: 394 - protein, 304 aa, Homo sapiens
MERANHSVVSEFILLGLSKSQNLQILFFLGFSVVFVGIVLGNLLILVTVTFDSLLHTPMYFLLSNLSCIDMILASFATPKMIVDFLRERKTISWWGCYSQMFFMHLLGGSEMMLLVAMAIDRYVAICKPLHYMTIMSPRVLTGLLLSSYAVGFVHSSSQMAFMLTLPFCGPNVIDSFFCDLPLVIKLACKDTYILQLLVIADSGLLSLVCFLLLLVSYGVIIFSVRYRAASRSSKAFSTLSAHITVVTLFFAPCVFIYVWPFSRYSVDKILSVFYTIFTPLLNPIIYTLRNQEVKAAIKKRLCI

SEQ ID NO: 395 - DNA, 1447 bp, Homo sapiens
  source (1)..(1447)
  CDS (201)..(1247)
tgattttatttcttaaattaatgtatttagatatcccagttggttgaacatctccttgacaaccctcccctttaacgcaatcttccatacttagctgtactagctgtataacttgtaataactcatgaaaacccagacacatacatagcaataggaattggaattctgaaaagtttaagtgtaattggaaaatcaaacccatgctcacttcattaactgatctctgtttctctcctattcaggtagctgaaattaagtcccttccaaaatcgatgaatgagacaaatcattctcgggtgacagaatttgtgttgctgggactgtctagttcaagggagctccaacctttcttgtttcttacattttcactactttatctagcaattctgttgggcaactttctcatcatcctcactgtgacctcagattcccgccttcacacccccatgtactttctgcttgcaaacctgtcatttatagacgtatgtgttgcctcttttgctacccctaaaatgattgcagactttctggttgagcgcaagactatttcttttgatgcctgcctggcccagattttctttgttcatctcttcactggcagtgaaatggtgctcctagtttccatggcctatgaccgttatgttgctatatgcaaacctctccactacatgacagtcatgagccgtcgtgtatgtgttgtgctcgtcctcatttcatggtttgtgggcttcatccatactaccagccagttggcattcactgttaatctgccattttgtggtcctaataaggtagacagttttttctgtgaccttcctctagtgaccaagttagcctgcatagacacttatgttgtcagcttactaatagttgcagatagtggctttctttctctgagttcctttctcctcttggttgtctcctacactgtaatacttgttacagttaggaatcgctcctctgcaagcatggcgaaggcccgctccacattgactgctcacatcactgtggtcactttattctttggaccatgcattttcatctatgtgtggcccttcagcagttactcagttgacaaagtccttgctgtattctacaccatcttcacgcttattttaaaccctgtaatctacacgctaagaaacaaagaagtgaaggcagctatgtcaaaactgaagagtcggtatctgaagcctagtcaggtttctgtagtcataagaaatgttcttttcctagaaacaaagtaaacttatgagactgttaccactttagccctgtctccatacacttacaagtggattcactgtaatcttaaagcaaatcaacttggcctgtgggaaagctcagttgatcgatttgaagcaaactgtaatgataataaaaactcatgaaataaactttagtgattttaaatattctttctccattgtatattttttaatatcct

SEQ ID NO: 396 - protein, 348 aa, Homo sapiens
MLTSLTDLCFSPIQVAEIKSLPKSMNETNHSRVTEFVLLGLSSSRELQPFLFLTFSLLYLAILLGNFLIILTVTSDSRLHTPMYFLLANLSFIDVCVASFATPKMIADFLVERKTISFDACLAQIFFVHLFTGSEMVLLVSMAYDRYVAICKPLHYMTVMSRRVCVVLVLISWFVGFIHTTSQLAFTVNLPFCGPNKVDSFFCDLPLVTKLACIDTYVVSLLIVADSGFLSLSSFLLLVVSYTVILVTVRNRSSASMAKARSTLTAHITVVTLFFGPCIFIYVWPFSSYSVDKVLAVFYTIFTLILNPVIYTLRNKEVKAAMSKLKSRYLKPSQVSVVIRNVLFLETK

SEQ ID NO: 397 - DNA, 1336 bp, Homo sapiens
  source (1)..(1336)
  CDS (201)..(1136)
actttcatagcagtcatggatgttaaatattagtcaactgagtatttacatacgtaaatatatgtaacctaattaaattgactatttcttttgtttagaattgactatatttcttttgtttataaactagaggtattgtaatgccaatcattgtgacatttttctgatttcttttttttaggtaactgaatattggatacatggctcacacaaatgaatcgatggtgtctgagtttgtacttttgggactctctaattcctggggacttcaacttttcttttttgccatcttctctatagtctatgtgacatcagtgctaggcaatgtcttaattattgtcattatttcttttgactcccatttgaactctcctatgtacttcttgctcagtaatctttctttcattgatatctgtcagtctaactttgccacccccaagatgcttgtagacttttttattgagcgcaagactatctcctttgagggttgcatggcccagatattcgttcttcacagttttgttgggagtgagatgatgttgcttgtagctatggcatatgacagatttatagccatatgtaagcctctgcactacagtacaattatgaaccggaggctctgtgtaatttttgtgtctatttcctgggcggtgggcgttcttcattctgtgagccacttggcttttacagtggacctgccattctgtggtcccaatgaggtggatagcttcttttgtgaccttcccttggtgatagagctggcttgcatggatacatatgaaatggaaattatgaccctaacgaacagtggcctgatatcattgagctgtttcctggctttaattatttcctacaccatcattttgatcggtgtccgatgcaggtcctccagtgggtcatctaaggctctttctacattaactgcccacatcacagtggtcattcttttcttcgggccttgcatttatttctatatatggccttttagcagacttcctgtggacaaatttctttctgtgttctacactgtttgtactcccttgttgaaccccatcatctactctctgaggaatgaagatgttaaagcagccatgtggaagctgagaaaccgtcatgtgaactcctggaaaaactagggatcattacgaaggagcataatcctgaattagaatgaagaccctccagtgtatcatagtgtcatgccaaccatctttgccagacatatgggttattgagttacagaattggctttttgttttaagtgcaagggaattgcatcaagtcagtctctggttctatttaaatataatgttaactattttttcattgtttataa

SEQ ID NO: 398 - protein, 311 aa, Homo sapiens
MAHTNESMVSEFVLLGLSNSWGLQLFFFAIFSIVYVTSVLGNVLIIVIISFDSHLNSPMYFLLSNLSFIDICQSNFATPKMLVDFFIERKTISFEGCMAQIFVLHSFVGSEMMLLVAMAYDRFIAICKPLHYSTIMNRRLCVIFVSISWAVGVLHSVSHLAFTVDLPFCGPNEVDSFFCDLPLVIELACMDTYEMEIMTLTNSGLISLSCFLALIISYTIILIGVRCRSSSGSSKALSTLTAHITVVILFFGPCIYFYIWPFSRLPVDKFLSVFYTVCTPLLNPIIYSLRNEDVKAAMWKLRNRHVNSWKN

SEQ ID NO: 399 - DNA, 1372 bp, Homo sapiens
  source (1)..(1372)
  CDS (201)..(1172)
atttacataagttctttcctattatccacctatccagacatactattatggcctcttcaaaatttttgcattcagcaaatgcacattatatctgagatctcagaatccctcaccttaaaagtattcttaattcaaattctgattcctttctatttatcctcctttagagttgtttcagaacaagtttgcagcttggaaccatggataagtccaattcttcagtggtgtctgaatttgtactgttgggactctgtagttctcaaaaactccagcttttctatttttgtttcttctctgtgttgtatacagtcattgtgctgggaaatcttctcattatcctcacagtgacttctgataccagcctgcactcccctatgtactttctcttgggaaacctttcctttgttgacatttgtcaggcttcttttgctacccctaaaatgattgcagattttctgagtgcacacgagaccatatctttcagtggctgcatagcccaaattttctttattcacctttttactggaggggagatggtgctacttgtttcgatggcctatgacaggtatgtagccatatgcaaacccttatactatgtggtcatcatgagccgaaggacatgcactgtcttggtaatgatctcctgggctgtgagcttggtgcacacattaagccagttatcatttactgtgaacctgcctttttgtggacctaatgtagtagacagctttttttgtgatcttcctcgagtcaccaaacttgcctgcctggactcttacatcattgaaatactaattgtggtcaatagtggaattctttccctaagcactttctctctcttggtcagctcctacatcattattcttgttacagtttggctcaagtcttcagctgcaatggcaaaggcattttctacgctggcttcccatattgcagtagtaatattattctttggaccttgcatcttcatctatgtgtggccctttaccatctctcctttggataaatttcttgccatattttacactgttttcacccccgtcctaaaccccattatttatacactaaggaatagggatatgaaggctgccgtaaggaaaattgtgaaccattacctgaggccaaggagaatttctgaaatgtcactagtagtgagaacttcctttcattaagacaaaactccttcaaattcctcaggtcaatacactgtttaatattttaatgtatttttgtggtgtatctcaattgtggggaaagtagtgaagaagataatatagagaacatttaatgaatattaacaagtctttttctaggtatcaagtgaaagttaaatataaaaacatggaaaaatctctgtttagattactggttc

SEQ ID NO: 400 - protein, 323 aa, Homo sapiens
MDKSNSSVVSEFVLLGLCSSQKLQLFYFCFFSVLYTVIVLGNLLIILTVTSDTSLHSPMYFLLGNLSFVDICQASFATPKMIADFLSAHETISFSGCIAQIFFIHLFTGGEMVLLVSMAYDRYVAICKPLYYVVIMSRRTCTVLVMISWAVSLVHTLSQLSFTVNLPFCGPNVVDSFFCDLPRVTKLACLDSYIIEILIVVNSGILSLSTFSLLVSSYIIILVTVWLKSSAAMAKAFSTLASHIAVVILFFGPCIFIYVWPFTISPLDKFLAIFYTVFTPVLNPIIYTLRNRDMKAAVRKIVNHYLRPRRISEMSLVVRTSFH

SEQ ID NO: 401 - DNA, 1345 bp, Homo sapiens
  source (1)..(1345)
  CDS (201)..(1145)
ctctaatatttcataatttccattcaaaacaatataccaaatgagaaggatggaaagaatagtcaaggtaagttttatgagaagataaaatttctgaaagtagataattggaaatgaatcttttgcttctattgaatctgactttccttttttttttttttttttttcgtgatacaggcttctgcctatgaatcaagacaatggatgtgggcaataagtctaccatgtctgaatttgttttgctggggctctctaattcctgggaactacagatgtttttctttatggtgttttcattgctttatgtggcaacaatggtgggtaacagcctcatagtcatcacagttatagtggaccctcacctacactctcctatgtatttcctgcttaccaatctttcaatcattgatatgtctcttgcttctttcgccaccccaaagatgattacagattacctaacaggtcacaaaaccatctcttttgatggctgccttacccagatattctttctccaccttttcactggaactgagatcatcttactcatggccatgtcctttgataggtatattgcaatatgcaagcccctgcactatgcttctgtcattagtccccaggtgtgtgttgctctcgtggtggcttcctggattatgggagttatgcattcaatgagtcaggtcatatttgccctcacgttaccattctgtggtccctatgaggtagacagctttttctgtgaccttcctgtggtgttccagttggcttgtgtggatacttatgttctgggcctctttatgatctcaacaagtggcataattgcgttgtcctgttttattgttttatttaattcatatgttattgtcctggttactgtgaagcatcattcttccagaggatcatctaaggccctttctacttgtacagctcatttcattgttgtcttcttgttctttgggccatgcatcttcatctacatgtggccactaagcagctttctcacagacaagattctgtctgtgttttataccatctttactcccactctgaacccaataatctatactttgaggaatcaagaagtaaagatagccatgaggaaactgaaaaataggtttctaaattttaataaggcaatgccttcatagtttttgtgacacagaacattagacacaatgctgtgttaggcttttctttctagagggttcttaccaaattgtaattgccaagaatttgtgagggctcaagttcagtgcattttgaaactattctcatgaatgtgaatgtgttcaaaatacatttgaaatttcagaaaagcaagttaaaagaaataaagactataaaaatg

SEQ ID NO: 402 - protein, 314 aa, Homo sapiens
MDVGNKSTMSEFVLLGLSNSWELQMFFFMVFSLLYVATMVGNSLIVITVIVDPHLHSPMYFLLTNLSIIDMSLASFATPKMITDYLTGHKTISFDGCLTQIFFLHLFTGTEIILLMAMSFDRYIAICKPLHYASVISPQVCVALVVASWIMGVMHSMSQVIFALTLPFCGPYEVDSFFCDLPVVFQLACVDTYVLGLFMISTSGIIALSCFIVLFNSYVIVLVTVKHHSSRGSSKALSTCTAHFIVVFLFFGPCIFIYMWPLSSFLTDKILSVFYTIFTPTLNPIIYTLRNQEVKIAMRKLKNRFLNFNKAMPS

SEQ ID NO: 403 - DNA, 1075 bp, Homo sapiens
  source (1)..(1075)
  CDS (201)..(875)
taagtcataaaaaataatatgtaattgaatcatttgaaatatctaggaaggccattgggaaaaatttttggccactgtgagtctggaaaagagacaatagggaactatctgatggtaggctgccactaaattagtctgtgcaaaaatcccactttgagtttgattgctatattttttcctagttctcctcccaactggaaatgctagagtccttccagaaatcagagcaaatggcctggagcaatcagtctgcggtaaccgaattcatactacggggtctgtccagttctttagaactccagattttctacttcctgtttttctccatagtctatgcagccactgtgctggggaaccttcttattgtggtcaccattgcatcagagccacaccttcattcccctatgtactttctgctgggcaatctctccttcattgacatgtccctggcctcatttgccacccccaaaatgattgcagacttccttagagaacacaaagccatctcttttgaaggctgcatgacccagatgttcttcctacatctcttagggggtgctgagattgtactgctgatctccatgtcctttgataggtacgtggctatctgtaagcctctacattacctaacaatcatgagccgaagaatgtgtgttgggcttgtgatactttcctggattgtcggcatcttccatgctctgagtcagttagcatttacagtgaatctgcccttctgtggacccaatgaagtagacagtttcttttgtgacctccctttggtgattaaacttgcttgtgttgacacatatattctgggggtgttcatgatctcaaccagtggcatgattgcctggtgtgcttcatcctcttggtgatctcttacactatcatcctggtcaccgttcggcagcgttcctctggtggatcctccaaagccctctccacgtgcagtgcccactttactgttgtgacccttttctttggcccatgcactttcatttatgtgtggcctttcacaaatttcccaatagacaaagtactctcagtattttataccatatacactcccctcttg

SEQ ID NO: 404 - protein, 224 aa, Homo sapiens [sequence omitted]

SEQ ID NO: 405 - DNA, 1324 bp, Homo sapiens
  source (1)..(1324)
  CDS (201)..(1124)
attgtgttttcatttttcattttaaatttggagaaattaaggtaatggagtttccccagaataggagagggatgggaaatgttgtttttagctgaagtactgcatgtgccaaatattttttagctgtataactagtatctagttggaagacatagtaataacaattaattctgcttcttaatgtactgcaggccagggaaatggaaagcgagaacagaacagtgataagagaattcatcctccttggtctgacccagtctcaagatattcagctcctggtctttgtgctagttttaatattctacttcatcatcctccctggaaattttctcattattttcaccataaagtcagaccctgggctcacagcccccctctatttctttctgggcaacttggccttcctggatgcatcctactccttcattgtggctccccggatgttggtggacttcctctctgcgaagaagataatctcctacagaggctgcatcactcagctctttttcttgcacttccttggaggaggggagggattactccttgttgtgatggcctttgaccgctacatcgccatctgccggcctctgcactatcctactgtcatgaaccctagaacctgctatgcaatgatgttggctctgtggcttgggggttttgtccactccattatccaggtggtcctcatcctccgcttgcctttttgtggcccaaaccagctggacaacttcttctgtgatgtcccacaggtcatcaagctggcctgcaccgacacatttgtggtggagcttctgatggtcttcaacagtggcctgatgacactcctgtgctttctggggcttctggcctcctatgcagtcattctttgtcgcatacgagggtcttcttctgaggcaaaaaacaaggccatgtccacgtgcatcacccatatcattgttatattcttcatgtttggacctggcatcttcatctacacgcgccccttcagggctttcccagctgacaaggtggtttctctcttccacacagtgatttttcctttgttgaatcctgtcatttatacccttcgcaaccaggaagtgaaagcttccatgaaaaaggtgtttaataagcacatagcctgaaaaagggcgcaaaaaaaaaaagaataaaaatagactgtagaattttatctgaaattgatttgtttatttccaagtactgcaatcactgagtacctcccatttgtcaggactattctgggaactgaaaaaagaaattactgaggcagataaggtccatctgctctccaagagatacaacctagtaaaaatagaccaccatt

SEQ ID NO: 406 - protein, 307 aa, Homo sapiens
MESENRTVIREFILLGLTQSQDIQLLVFVLVLIFYFIILPGNFLIIFTIKSDPGLTAPLYFFLGNLAFLDASYSFIVAPRMLVDFLSAKKIISYRGCITQLFFLHFLGGGEGLLLVVMAFDRYIAICRPLHYPTVMNPRTCYAMMLALWLGGFVHSIIQVVLILRLPFCGPNQLDNFFCDVPQVIKLACTDTFVVELLMVFNSGLMTLLCFLGLLASYAVILCRIRGSSSEAKNKAMSTCITHIIVIFFMFGPGIFIYTRPFRAFPADKVVSLFHTVIFPLLNPVIYTLRNQEVKASMKKVFNKHIA

SEQ ID NO: 407 - DNA, 1375 bp, Homo sapiens
  source (1)..(1375)
  CDS (201)..(1175)
tagctgcattggattgcattggattctagcaaaataacacagagaaccacaatcaattcaaaatttggtaggacatattcccacctggtctcagattatctcatgtattttcctgtatacctcaagttctcgtctcagtaaaatccttgagatacgtagcaagcaattggattacactccaagagacttggattacactcatgtctttcttctttgtagacttaagacccatgaacaggtcagcaacacacatcgtgacagagtttattctcctgggattccctggttgctggaagattcagattttcctcttctcattgtttttggtgatttatgtcttgaccttgctgggaaatggagccatcatctatgcagtgagatgcaacccactactacacacccccatgtactttctgctgggaaattttgccttccttgagatctggtatgtgtcctccactattcctaacatgctagtcaacattctctccaagaccaaggccatctcattttctgggtgcttcctccagttctatttcttcttttcactgggaacaactgaatgtctctttctggcagtaatggcttatgatcgatacctggccatctgccacccactgcagtaccctgccatcatgactgtaaggttctgtggtaagctggtgtctttctgttggcttattggattccttggatacccaattcccattttctacatctcccaactccccttctgtggtcctaatatcattgatcacttcctgtgtgacatggacccattgatggctctatcctgtgccccagctcccataactgaatgtattttctatactcagagctcccttgtcctctttttcactagtatgtacattcttcgatcctatatcctgttactaacagctgtttttcaggtcccttctgcagctggtcggagaaaagccttctctacctgtggttctcatttggttgtggtatctcttttctatgggacagtcatggtaatgtatgtaagtcctacatatgggatcccaactttattgcagaagatcctcacactggtatattcagtaacgactcctctttttaatcctctgatctatactcttcgtaataaggacatgaaactcgctctgagaaatgtcctgtttggaatgagaattcgtcaaaattcgtgagccaaagatgtgccatacttacaagttctaacgaagaacaaggtcgagatgttgtcagttctttagcagtctttcagtcctcagtctgagtagttagaggttgtatattttacctggaagtgtgcccagcttaaatatgtttccagcactgactctttaaaccttaattaactggtcttcaacatccacttaaaagtttt

SEQ ID NO: 408 - protein, 324 aa, Homo sapiens
MSFFFVDLRPMNRSATHIVTEFILLGFPGCWKIQIFLFSLFLVIYVLTLLGNGAIIYAVRCNPLLHTPMYFLLGNFAFLEIWYVSSTIPNMLVNILSKTKAISFSGCFLQFYFFFSLGTTECLFLAVMAYDRYLAICHPLQYPAIMTVRFCGKLVSFCWLIGFLGYPIPIFYISQLPFCGPNIIDHFLCDMDPLMALSCAPAPITECIFYTQSSLVLFFTSMYILRSYILLLTAVFQVPSAAGRRKAFSTCGSHLVVVSLFYGTVMVMYVSPTYGIPTLLQKILTLVYSVTTPLFNPLIYTLRNKDMKLALRNVLFGMRIRQNS

SEQ ID NO: 409 - DNA, 1081 bp, Homo sapiens
  source (1)..(1081)
  CDS (201)..(881)
acaacctgaagtttacaagaatcagacccacaggactcatttgagaaagataaaccaggtgtgcttaagaattcttttagaatatccaatatattcacctgcaagagtcaaactccttatcccaaaaaaagcttcaagatgcttcatcagcaaagcaaattgtcattgaccatcggtgttctctccacagtctgggaagcatgaataactcacagatatctactgtgacgcagtttgtgttgttggggtttcctggtccctggaaaattcagatcatctttttctcaatgattttgttggtctacatcttcactctgactgggaatatggccatcatctgtgcagtgaggtgggaccatcgactccatacccctatgtacgtgctcctagccaacttctccttcctagagatctggtatgtgacctgcacagtccccaacatgctggtaaattttttctccaaaactaagaccatatcattctctggatgtttcactcagttccacttcttcttttccctgggcacaactgaatgcttcttcctctgtgtcatggcttatgatcggtacctggccatctgccacccactgcactatccctccattatgactggccagctctgtggcatcttggtgtctctttgttggctcattggtttccttggacattcaatttccattttcttcatttttcaactacctttctgtggtcccaacatcattgatcattttctgtgtgatgtagacccactgatggcattgtcctctgcccctactcacatcatagggcatgtgttccattctgtgagctctcttttcatcaacctcaccatggtgtacatccttgggtcctataccttggtgctcagaactgtgctttaggttccttcttcagctggatggcaaaaggccatctctacctgtgggtcacacttggttgttgtgtctctgttctatggagccataatgctgatgtatgtgagtcccacacctggcaactcagttgctatgcataagctcatcacactgatatattctgtggtaacacctgtcttaaaccccctcatctacagcctacgcaa

SEQ ID NO: 410 - protein, 226 aa, Homo sapiens
MNNSQISTVTQFVLLGFPGPWKIQIIFFSMILLVYIFTLTGNMAIICAVRWDHRLHTPMYVLLANFSFLEIWYVTCTVPNMLVNFFSKTKTISFSGCFTQFHFFFSLGTTECFFLCVMAYDRYLAICHPLHYPSIMTGQLCGILVSLCWLIGFLGHSISIFFIFQLPFCGPNIIDHFLCDVDPLMALSSAPTHIIGHVFHSVSSLFINLTMVYILGSYTLVLRTVL

SEQ ID NO: 411 - DNA, 1393 bp, Homo sapiens
  source (1)..(1393)
  CDS (201)..(1193)
gtgtatctgggcgttactggctttgtacatatgtttaagtgaacccttctaatctctttgaacttcaattaccctgtctgtgaaagagaagggtaaagaatacctcctcgcagctcaaagagtcattaggaagaccaaatgagataatgtatgtaaaaatacttagtacatcatccagcatgagttagcaaaatctccaaatgttctttattattcattctttggttacttctgtttttctaacagctttgggaccccagaacagaacaatgcattttgtgactgagtttgtcctcctgggtttccatggtcaaagggagatgcagagctgcttcttctcattcatcctggttctctatctcctgacactgctagggaatggagctattgtctgtgcagtgaaattggacaggcggctccacacacccatgtacatccttctgggaaactttgcctttctagagatctggtacatttcctccactgtcccaaacatgctagtcaatatcctctctgagattaaaaccatctccttctctggttgcttcctgcaattctatttctttttttcactgggtacaacagagtgtttctttttatcagttatggcttatgatcggtacctggccatctgtcgtccattacactacccctccatcatgactgggaagttctgtataattctggtctgtgtatgctgggtaggcggatttctctgctatccagtccctattgttcttatctcccaacttcccttctgtgggcccaacatcattgaccacttggtgtgtgacccaggcccattgtttgcactggcctgcatctctgctccttccactgagcttatctgttacaccttcaactcgatgattatctttgggcccttcctctccatcttgggatcttacactctggtcatcagagctgtgctttgtattccctctggtgctggtcgaactaaagctttctccacatgtgggtcccacctaatggtggtgtctctattctatggaacccttatggtgatgtatgtgagcccaacatcagggaacccagcaggaatgcagaagatcatcactctggtatacacagcaatgactccattcttaaatccccttatctatagtcttcgaaacaaagacatgaaagatgctctaaagagagtcctggggttaacagttagccaaaactgagatatctttgaaaaagaagccaaattggccacttctgaccttaattttttataactatagagagtagcttcagtagtatgttctggctcacactcaggtagacagacttatctttcacagttccttagcagttaaattcagctcattaatgataaatgccaatgctcaataaaacattttaaacatatgtggcctcactg

SEQ ID NO: 412 - protein, 330 aa, Homo sapiens
MFFIIHSLVTSVFLTALGPQNRTMHFVTEFVLLGFHGQREMQSCFFSFILVLYLLTLLGNGAIVCAVKLDRRLHTPMYILLGNFAFLEIWYISSTVPNMLVNILSEIKTISFSGCFLQFYFFFSLGTTECFFLSVMAYDRYLAICRPLHYPSIMTGKFCIILVCVCWVGGFLCYPVPIVLISQLPFCGPNIIDHLVCDPGPLFALACISAPSTELICYTFNSMIIFGPFLSILGSYTLVIRAVLCIPSGAGRTKAFSTCGSHLMVVSLFYGTLMVMYVSPTSGNPAGMQKIITLVYTAMTPFLNPLIYSLRNKDMKDALKRVLGLTVSQN

SEQ ID NO: 413 - DNA, 1327 bp, Homo sapiens
  source (1)..(1327)
  CDS (201)..(1127)
acgtattttattttagtgaggaataaagaggatgaagaatagaagggttaactcaggatacaagacataagttgtcttcagctacggaacattggttgggacaaataatgttcttatctggagaggagatagaaaacagatgaaaaggtggttataacagataacaatttgccctattttattctgcagagtgagaaattatggaaacacagaacctcacagtggtgacagaattcattcttcttggtctgacccagtctcaagatgctcaacttctggtctttgtgctagtcttaattttctaccttatcatcctccctggaaatttcctcatcattttcaccataaagtcagaccctgggctcacagcccccctctatttctttctgggcaacttggccttactggatgcatcctactccttcattgtggttcccaggatgttggtggacttcctctctgagaagaaggtaatctcctatagaagctgcatcactcagctctttttcttgcattttcttggagcgggagagatgttcctcctcgttgtgatggcctttgaccgctacatcgccatctgccggcctttacactattcaaccatcatgaaccctagagcctgctatgcattatcgttggttctgtggcttgggggctttatccattccattgtacaagtagcccttatcctgcacttgcctttctgtggcccaaaccagctcgataacttcttctgtgatgttccacaggtcatcaagctggcctgcaccaatacctttgtggtggagcttctgatggtctccaacagtggcctgctcagcctcctgtgcttcctgggccttctggcctcctatgcagtcatcctctgtcgtataagggagcactcctctgaaggaaagagcaaggctatttccacatgcaccacccatattatcattatatttctcatgtttggacctgctattttcatctacacttgccccttccaggctttcccagctgacaaggtagtttctcttttccatactgtcatctttcctttgatgaaccctgttatttatacgcttcgcaaccaggaggtgaaagcttccatgaggaagttgttaagtcaacatatgttttgctgaatagaagaaagagaaaagcaagaacggagaaagtccagttgaatttagctaaatcatttcctcattcatgcattgaatcagtcagtcatttagcaagtattataattattaagtacttcccattttcaggcactattccaggcatatgaatgagacaggtaagattccaggtctcctagatttatattcaaggggataaa

SEQ ID NO: 414 - protein, 308 aa, Homo sapiens
METQNLTVVTEFILLGLTQSQDAQLLVFVLVLIFYLIILPGNFLIIFTIKSDPGLTAPLYFFLGNLALLDASYSFIVVPRMLVDFLSEKKVISYRSCITQLFFLHFLGAGEMFLLVVMAFDRYIAICRPLHYSTIMNPRACYALSLVLWLGGFIHSIVQVALILHLPFCGPNQLDNFFCDVPQVIKLACTNTFVVELLMVSNSGLLSLLCFLGLLASYAVILCRIREHSSEGKSKAISTCTTHIIIIFLMFGPAIFIYTCPFQAFPADKVVSLFHTVIFPLMNPVIYTLRNQEVKASMRKLLSQHMFC

SEQ ID NO: 415 - DNA, 1432 bp, Homo sapiens
  source (1)..(1432)
  CDS (201)..(1232)
cctatgaagatacacttatatgctccagagcttgtggtttgcttctgggaaaccaacagcatcaataggtcattgctcttttatggaagtggacagctcagactatacgtctcctttttcagacttaatagatactgacactaaatttcaaggtccgtttattgaaagatccaaaggaatgcataagtttggtttttcatatggctctttatttttcactcatactccatggtatgagtgatcttttctttctctctacaggtcatccaagagcgagctgtaggatggaggccatgaaactattaaatcaatctcaagtgtcagaattcattttgctgggactgaccagctcccaggatgtagagtttcttctctttgccctcttctcggttatctatgtggtcacagttttgggtaaccttcttattatagtcacagtgtttaacacccctaacctgaatactcccatgtattttctccttggtaatctctcttttgtagatatgacccttgcttcttttgccacccctaaggtgattctgaacttgttaaaaaagcagaaggtaatttcttttgctgggtgcttcactcagatatttctccttcacttactgggtggggttgaaatggtactgttggtctccatggcttttgacagatatgtggccatttgtaagcccctacactacatgaccatcatgaacaagaaggtatgtgttttgcttgtagtgacctcatggctcttgggtctccttcactcagggtttcagataccatttgctgtgaacttgcccttttgtggtcccaatgtggtagacagcattttttgtgacctccctttggttactaagcttgcctgtatagacatatattttgtacaggtagtcattgttgccaacagtggcataatctccctgagctgtttcattattttgcttatctcctacagtctgatcctcataaccattaagaaccactctcctactgggcaatctaaagcccgttccactttgactgctcacatcacagtggtgattctcttctttggcccatgcatctttatctacatttggcccttcggcaaccactctgtagataagttccttgctgtgttttataccatcatcactcctatcttgaatccaattatctatactctgagaaacaaagaaatgaagatatccatgaaaaaactctggagagcttttgtgaattctagagaagatacttagattaaaaatataatggtagaggccgggcatggtggctgatgcctgtaatccccacactttgggaggaatatcaggggaaccagcccccaatatttcaacataggttcttttctattttccctaagtgttgactggtctgagaaataaagggaaagaatacaaaagagagaaattttaaagctgggtgtccaggggagaca

SEQ ID NO: 416 - protein, 343 aa, Homo sapiens
MALYFSLILHGMSDLFFLSTGHPRASCRMEAMKLLNQSQVSEFILLGLTSSQDVEFLLFALFSVIYVVTVLGNLLIIVTVFNTPNLNTPMYFLLGNLSFVDMTLASFATPKVILNLLKKQKVISFAGCFTQIFLLHLLGGVEMVLLVSMAFDRYVAICKPLHYMTIMNKKVCVLLVVTSWLLGLLHSGFQIPFAVNLPFCGPNVVDSIFCDLPLVTKLACIDIYFVQVVIVANSGIISLSCFIILLISYSLILITIKNHSPTGQSKARSTLTAHITVVILFFGPCIFIYIWPFGNHSVDKFLAVFYTIITPILNPIIYTLRNKEMKISMKKLWRAFVNSREDT

SEQ ID NO: 417 - DNA, 1444 bp, Homo sapiens
  source (1)..(1444)
  CDS (201)..(1244)
ttttcaaaaaccttgtccattttgataggcaaataattgaaagccaagctaaacttgcattacacgtctagctggcagtcatcatgttctatgttcatatttttctagtgagcagccatggggtttcatccactgaacactctcttaagtgttatctccctttgttctgttaggagaattgagccaggcccaccaggcccatgggtaactggactgcagcggtgactgagtttgttctgctggggttttccctgagcagggaggtggagctgctgctcctggtgctcctgctgcccacgttcctgctgactcttctggggaacctgctcatcatctccactgtgctgtcctgctcccgcctccacacccccatgtacttcttcttgtgcaacctctctatcctggacatcctcttcacctcagtcatctctccaaaagtgttggccaacttaggatctagggataaaaccatctcctttgccggatgtatcacccagtgctatttctactttttcttgggcacagttgagttcctcctgctgacggtcatgtcctatgaccgttatgccaccatctgctgccccctgcggtacaccaccatcatgagaccttctgtctgcattgggaccgttgtattctcttgggtgggaggcttcctgtctgtgctctttccaaccatcctcatctcccagctgcccttctgtggctccaatatcattaaccacttcttctgtgacagtggacccttgctggccctggcctgtgcagacaccactgccatcgagctgatggattttatgctttcttccatggtcatcctctgctgcatagtcctcgtggcctattcctatacgtacatcatcttgaccatagtgcgcattccttctgcaagtggaaggaagaaggcctttaatacctgtgcttcccacctgaccatagtcatcattcctagtggcatcactgtgtttatctatgtgactccctcccagaaagaatatctggagatcaacaagatccctttggttctgagcagtgtggtgactccattcctcaacccctttatatatactctgaggaatgacacagtgcagggagtcctcagggatgtgtgggtcagggttcgaggagtttttgaaaagaggatgagggcagtgctgagaagcagattatcctccaacaaagaccaccaaggaagggcttgctcttctccaccatgtgtctattctgtaaagctccagtgttagaaagagaggagctgccttagtgaaagagtgagctagctaaggaattctgaatagtctatagtggaaagactgactgcggagacagagacttgaacgctggccttggttttcactttaatctgtgaccgcagctgtgtcaccagccattctgactctcagtactctcagctgaagtgcaacagggctggacttgatgatct

SEQ ID NO: 418 - protein, 347 aa, Homo sapiens
MGNWTAAVTEFVLLGFSLSREVELLLLVLLLPTFLLTLLGNLLIISTVLSCSRLHTPMYFFLCNLSILDILFTSVISPKVLANLGSRDKTISFAGCITQCYFYFFLGTVEFLLLTVMSYDRYATICCPLRYTTIMRPSVCIGTVVFSWVGGFLSVLFPTILISQLPFCGSNIINHFFCDSGPLLALACADTTAIELMDFMLSSMVILCCIVLVAYSYTYIILTIVRIPSASGRKKAFNTCASHLTIVIIPSGITVFIYVTPSQKEYLEINKIPLVLSSVVTPFLNPFIYTLRNDTVQGVLRDVWVRVRGVFEKRMRAVLRSRLSSNKDHQGRACSSPPCVYSVKLQC

SEQ ID NO: 419 - DNA, 1396 bp, Homo sapiens
  source (1)..(1396)
  CDS (201)..(1196)
ttaccctttagagaaaatcttctctagtgctaaaatcaatcagatgatgaccttaagtgcttcagatcttaacaggacctgcaattggataaactggggatatgagtcccatatcatgatgaagtaagtttcaggactgtaagcagaggacctgctcttaccaggatcatgtttttgttgttggacaggtgaaaaagacaatgagtcctgatgggaaccacagtagtgatccaacagagttcgtcctggcagggctcccaaatctcaacagcgcaagagtggaattattttctgtgtttcttcttgtctatctcctgaatctgacaggcaatgtgttgattgtgggggtggtaagggctgatactcgactacagacccctatgtacttctttctgggtaacctgtcctgcctagagatactgctcacttctgtcatcattccaaagatgctgagcaatttcctctcaaggcaacacactatttcctttgctgcatgtatcacccaattctatttctacttctttctcggggcctccgagttcttactgttggctgtcatgtctgcggatcgctacctggccatctgtcatcctctgcgctaccccttgctcatgagtggggctgtgtgctttcgtgtggccttggcctgctgggtggggggactcgtccctgtgcttggtcccacagtggctgtggccttgcttcctttctgtaagcagggtgctgtggtacagcacttcttctgcgacagtggcccactgctccgcctggcttgcaccaacaccaagaagctggaggagactgactttgtcctggcctccctcgtcattgtatcttccttgctgatcactgctgtgtcctacggcctcattgtgctggcagtcctgagcatcccctctgcttcaggccgtcagaaggccttctctacctgtacctcccacttgatagtggtgaccctcttctatggaagtgccatttttctctatgtgcggccatcgcagagtggttctgtggacactaactgggcagtgacagtaataacgacatttgtgacaccactgttgaatccattcatctatgccttacgtaatgagcaagtcaaggaagctttgaaggacatgtttaggaaggtagtggcaggcgttttagggaatcttttacttgataaatgtctcagtgagaaagcagtaaagtaaaagtgaagagtctagtaactagtcttttttttttttttttttttttttttttgagagagagagagagaaagtctcactctgtcgcccaggctggagtgcagtggcgcgatctcagctcactgcaacctccacctcctgggtttaagcaattctcctgcctcagcctcctgagtagctgggattacatgtgcccaccacca

SEQ ID NO: 420 - protein, 331 aa, Homo sapiens
MSPDGNHSSDPTEFVLAGLPNLNSARVELFSVFLLVYLLNLTGNVLIVGVVRADTRLQTPMYFFLGNLSCLEILLTSVIIPKMLSNFLSRQHTISFAACITQFYFYFFLGASEFLLLAVMSADRYLAICHPLRYPLLMSGAVCFRVALACWVGGLVPVLGPTVAVALLPFCKQGAVVQHFFCDSGPLLRLACTNTKKLEETDFVLASLVIVSSLLITAVSYGLIVLAVLSIPSASGRQKAFSTCTSHLIVVTLFYGSAIFLYVRPSQSGSVDTNWAVTVITTFVTPLLNPFIYALRNEQVKEALKDMFRKVVAGVLGNLLLDKCLSEKAVK

SEQ ID NO: 421 - DNA, 1342 bp, Homo sapiens
  source (1)..(1342)
  CDS (201)..(1142)
tgtgttccaataagatcttgtttacaaaacacctgccagagaacattgtttctccctacttgtcatctttccacgtaagaaagaaacttctctgccactgcccctagtttttacaatctctttctagttccccctcactttcctctcacctctatgttaattcttgttttgtccattctctaggtaagattctctgggatatggaaagaatcaacagcacactgttgactgcgtttatcctgacaggaattccgtatccactcaggctaaggacactcttttttgtgttcttttttctaatctacatcctgactcagctgggaaacctgcttattttaatcactgtctgggcagacccaaggctccatgcccgccccatgtacatctttcttggtgttctctcagtcattgatatgagcatctcctccatcattgtccctcgcctcatgatgaacttcactttaggtgtcaaacccatcccatttggtggctgtgttgctcaactctatttctatcacttcctgggcagcacccagtgcttcctctacaccctaatggcctatgacaggtacctggcaatatgtcagcccctgcgctaccctgtgctcatgactgctaagctgagcgccttgcttgtggctggagcctggatggcaggatccatccatggggctctccaggccatcctaaccttccgcctgccctactgtgggcccaatcaggtggattacttcttctgtgacatccctgcagtgttgagactggcctgtgctgacacaacagtcaacgagctggtgacgtttgtagacattggggtggtggttgccagttgcttctccctgatcctcctctcctacatacagatcattcaggccatcctgagaatccacacagctgatgggcggcgccgggctttttcaacttgtggagcccatgtaaccgtggtcaccgtgtactatgtgccctgtgccttcatctacctgaggcctgaaaccaacagccccctggatggggcagctgccctagtccccacggccatcactcctttcctcaacccccttatctacactctgcggaaccaagaggtgaagctggccctgaaaagaatgctcagaagcccaagaactccgagtgaggtttgaaagtgtctttctcccactagggaagctgccacaattagaatttattataatgtttaggcttcggtaacttttttcttttcttcttgttttttctcttttatatagccatactgtatgatcaaacacagtttaaggtaaaatactaactttctaacagttccttagtatcctctcaagataactctcagccactgcaagag

SEQ ID NO: 422 - protein, 313 aa, Homo sapiens
MERINSTLLTAFILTGIPYPLRLRTLFFVFFFLIYILTQLGNLLILITVWADPRLHARPMYIFLGVLSVIDMSISSIIVPRLMMNFTLGVKPIPFGGCVAQLYFYHFLGSTQCFLYTLMAYDRYLAICQPLRYPVLMTAKLSALLVAGAWMAGSIHGALQAILTFRLPYCGPNQVDYFFCDIPAVLRLACADTTVNELVTFVDIGVVVASCFSLILLSYIQIIQAILRIHTADGRRRAFSTCGAHVTVVTVYYVPCAFIYLRPETNSPLDGAAALVPTAITPFLNPLIYTLRNQEVKLALKRMLRSPRTPSEV

SEQ ID NO: 423 - DNA, 1333 bp, Homo sapiens
  source (1)..(1333)
  CDS (201)..(1133)
tggaggacttctccttttaagtaaacctaaataactaatggtgacaccacctcctcttttaaaaaacaatttgactctatcttgtttatctcataattcctaggcatcaatcatccgacaaaagcattcacttacaacatcattgtgctgtgtttctcttgtcaaacgtcaccattcatcttagcagactacaaaaagacatgggaaagaccaaaaacacatcgctggatgccgtggtgacagatttcattcttctgggtttgtctcaccccccaaatctaagaagcctcctcttcctggtcttcttcatcatttacatcctcactcagctggggaacctgctcattctgctcaccatgtgggctgacccgaagctctgtgctcgccccatgtacattcttctgggagtgctctcattcctggacatgtggctctcctcagtcaccgttcctcggcttattttggattttactccttccatcaaggctatcccgtttggtggctgtgtggctcaactgtatttctttcacttcctgggcagcacccagtgcttcctctacaccttgatggcctatgacaggtacctagcaatatgtcagcccctgcactacccagtgctcatgaatgggaggttatgcacagtccttgtggctggagcttgggtcgccggctccatgcatgggtctatccaggccaccttgaccttccgcctgccctactgtgggcccaatcaggtggattactttatctgtgacatccgcgcagtattgagactggcctgtgctgacacaactgtcaatgagcttgtgacctttgtggacgtcagggtagtggccgccagttgcttcatgttaattctgctctcctatgccaacatagtccatgccatcctgaagatacgcaccgctgatgggaggcgccgggccttctccacctgtggctcccacctaatcgtggtcacagtctactatgtcccctgtattttcatctaccttagggctggctccaaagaccccctggatggggcagcggctgtgttttacactgttgtcactccattactgaaccccctcatctatacactgaggaaccaggaagtgaagtctgccctgaagaggataacagcaggttgaaggactgaatgaaaataagtaactacatctgcatcattatcactgccactctcttcagctactgctgcatgtgacaaatgcccaataaactgctaaggatttaaagtgaatttattttcactttctttggcagaaaattctgaattatttcgacccaaaatcttttcccctaattaaactggttcaggttgttttacata

SEQ ID NO: 424 - protein, 310 aa, Homo sapiens
MGKTKNTSLDAVVTDFILLGLSHPPNLRSLLFLVFFIIYILTQLGNLLILLTMWADPKLCARPMYILLGVLSFLDMWLSSVTVPRLILDFTPSIKAIPFGGCVAQLYFFHFLGSTQCFLYTLMAYDRYLAICQPLHYPVLMNGRLCTVLVAGAWVAGSMHGSIQATLTFRLPYCGPNQVDYFICDIRAVLRLACADTTVNELVTFVDVRVVAASCFMLILLSYANIVHAILKIRTADGRRRAFSTCGSHLIVVTVYYVPCIFIYLRAGSKDPLDGAAAVFYTVVTPLLNPLIYTLRNQEVKSALKRITAG

SEQ ID NO: 425 - DNA, 1342 bp, Homo sapiens
  source (1)..(1342)
  CDS (201)..(1142)
gtttaaatagaagtgcctggcatggctcctggtaagtagtgggtatactgtaacaactactgttaaattgatttcataagctatatgctctgatgataaataagcaattcagataagaatacaaagtcatttcaattagttctattcctataataataaaactaaattagctttcattttttcccccctaagctcattgaatggacagtctaaaccaaacaagagtgactgaatttgtcttcttgggactcactgataaccgggtgctggaaatgctgtttttcatggcattctcagccatttatatgctaacgctttcagggaacattctcatcatcattgccacagtctttactccaagtctccatacccccatgtatttcttcctgagcaatctgtcctttattgacatctgccactcatctgtcactgtgcctaagatgttggagggtttgcttttagaaagaaagaccatttcctttgacaactgcatcacacagctcttcttcctacatctctttgcctgtgccgagatctttctgctgatcattgtggcgtatgatcgttacgtggctatctgcactccactccactaccccaatgtgatgaacatgagagtctgtatacagcttgtctttgctctctggttggggggtactgttcactcactagggcagaccttcttgactattcgtctaccttactgtggccccaacattattgacagctacttctgtgatgtgcctcttgttatcaagctggcctgcacagatacatacctcacaggaatactgattgtgaccaatagtggaaccatctccctctcctgtttcttggccgtggtcacctcctatatggtcatcctggtttctcttcgaaaacactcagctgaagggcgccagaaagccctgtctacctgctcggcccacttcatggtggttgccctcttctttgggccatgtatcttcatctatactcggccagacaccagcttctccattgacaaggtggtgtctgtcttctacacagtggtcacccctttgctgaatcccttcatttacaccttgaggaatgaggaggtaaaaagtgccatgaagcagctcaggcagagacaagtttttttcacgaaatcatatacataatgggcattgggattgcagacataattgcagccacatccttaatgaaagagcaaaagtaaagagtcaaaatcaacttatataacttggtaaattaggtaaaatggcatagagcaggtcagatttctgctcattaaagataagaacttattctgttcattaaagataagaacttattaactattatttaaataaagcaaaag

SEQ ID NO: 426 - protein, 313 aa, Homo sapiens
MDSLNQTRVTEFVFLGLTDNRVLEMLFFMAFSAIYMLTLSGNILIIIATVFTPSLHTPMYFFLSNLSFIDICHSSVTVPKMLEGLLLERKTISFDNCITQLFFLHLFACAEIFLLIIVAYDRYVAICTPLHYPNVMNMRVCIQLVFALWLGGTVHSLGQTFLTIRLPYCGPNIIDSYFCDVPLVIKLACTDTYLTGILIVTNSGTISLSCFLAVVTSYMVILVSLRKHSAEGRQKALSTCSAHFMVVALFFGPCIFIYTRPDTSFSIDKVVSVFYTVVTPLLNPFIYTLRNEEVKSAMKQLRQRQVFFTKSYT

SEQ ID NO: 427 - DNA, 1339 bp, Homo sapiens
  source (1)..(1339)
  CDS (201)..(1139)
caaaatttacaatagaggaatatgagttgctttgtgactgaaattgtctctaaaggcatatattagcccttgtctagttttctgacaacatatgaattgctcatgattttgccaacatcaatgctttttgtcctaaatcaaagtttctccttactctcctctttcagttagcatgagagttgtcacagccgacagaggcaatggatgaagccaatcactctgtggtctctgagtttgtgttcctgggactctctgactcgcggaagatccagctcctcctcttcctctttttctcagtgttctatgtgtcaagcctgatgggaaatctcctcattgtgctaactgtgacctctgaccctcgtttacagtcccccatgtacttcctgctggccaacctttccatcatcaatttggtattttgttcctccacagctcccaagatgatttatgaccttttcaggaagcacaagaccatctcttttgggggctgtgtagttcagatcttctttatccatgcagttgggggaactgagatggtgctgctcatagccatggcttttgaccgatatgtggccatatgtaagcctctccactacctgaccatcatgaacccacaaaggtgcattttgtttttagtcatttcctggattataggtattattcactcagtgattcagttggcttttgttgtagacctgctgttctgtggccctaatgaattagatagtttcttttgtgatcttcctcgatttatcaaactggcttgcatagagacctacacattgggattcatggttactgccaatagtggatttatttctctggcttcttttttaattctcataatctcttacatctttattttggtgactgttcagaaaaaatcttcaggtggtatattcaaggctttctctatgctgtcagctcatgtcattgtggtggttttggtctttgggccattaatctttttctatatttttccatttcccacatcacatcttgataaattccttgccatctttgatgcagttatcactcccgttttgaatccagtcatctatacttttagaaataaagagatgatggtggcaatgagaagacgatgctctcagtttgtgaattacagtaaaatcttttaaatatattgagaatatacaaaaaggcaaattatactagaatttcagacagatatgtgttaagtaagctatgttaaatttaaccagaatatcactttctactagtatgtattgtgttgtcttttttttcttcccaaattgaattgtggtatcaatctcttgcttatataggagatttaaagattaaacagtgtggctacttt

SEQ ID NO: 428 - protein, 312 aa, Homo sapiens
MDEANHSVVSEFVFLGLSDSRKIQLLLFLFFSVFYVSSLMGNLLIVLTVTSDPRLQSPMYFLLANLSIINLVFCSSTAPKMIYDLFRKHKTISFGGCVVQIFFIHAVGGTEMVLLIAMAFDRYVAICKPLHYLTIMNPQRCILFLVISWIIGIIHSVIQLAFVVDLLFCGPNELDSFFCDLPRFIKLACIETYTLGFMVTANSGFISLASFLILIISYIFILVTVQKKSSGGIFKAFSMLSAHVIVVVLVFGPLIFFYIFPFPTSHLDKFLAIFDAVITPVLNPVIYTFRNKEMMVAMRRRCSQFVNYSKIF

SEQ ID NO: 429 - DNA, 1339 bp, Homo sapiens
  source (1)..(1339)
  CDS (201)..(1139)
cagccagctgacccctctaagtggaagtccagggtgcatgtgatgagggttatttggctgtgtaagatgttaatatgatagttattttcatggctggaggctttctttcttgaacatgaatacttgcgtaggtaattctttctcattttctttcttccttcaggtaagtaacatgaaaactgatcttggagtctgaggcaatgaatggaatgaatcactctgtggtatcagaatttgtattcatgggactcaccaactcacgggagattcagcttctactttttgttttctctttgttgttctactttgcgagcatgatgggaaaccttgtcattgtattcactgtaaccatggatgctcatctgcactcccccatgtatttcctcctggctaacctctcaatcattgatatggcattttgctcaattacagcccctaagatgatttgtgatattttcaagaagcacaaggccatctcctttcggggatgtattactcagatcttctttagccatgctcttgggggcactgagatggtgctgctcatagccatggcctttgacagatacatggccatatgtaaacctctccactacctgaccatcatgagcccaagaatgtgtctatactttttagccacttcctctatcattggccttatccactcattggtccaattagtttttgtggtagatttacctttttgtggtcctaatatctttgacagtttttactgtgatctccctcggctcctcagacttgcctgtaccaacacccaagaactggagttcatggtcactgtcaatagtggactcatttctgtgggctcctttgtcttgctggtaatttcctacatcttcattctgttcactgtttggaaacattcttctggtggtctagccaaggccctctctaccctgtcagctcatgtcactgtggtcatcttgttctttgggccactgatgtttttctacacatggccttctcccacatcacacctggataaatatcttgctatttttgatgcatttattactccttttctgaatccagttatctacacattcaggaacaaagacatgaaagtggcaatgaggagactgtgcagtcgtcttgcgcattttacaaagattttgtaaatggcttggctgtcaagatgtgtaactatggattactcctcatgctgattgcataaaagaaactgcaatttcagagaaatactgaagactcaggccatactatatgcctgaaaatttatgaaatcatggtaacaatttcaccattaaattagaagtgatgttatcctttggcacagtgtgcatcaaagtgctaaatatta

SEQ ID NO: 430 - protein, 312 aa, Homo sapiens
MNGMNHSVVSEFVFMGLTNSREIQLLLFVFSLLFYFASMMGNLVIVFTVTMDAHLHSPMYFLLANLSIIDMAFCSITAPKMICDIFKKHKAISFRGCITQIFFSHALGGTEMVLLIAMAFDRYMAICKPLHYLTIMSPRMCLYFLATSSIIGLIHSLVQLVFVVDLPFCGPNIFDSFYCDLPRLLRLACTNTQELEFMVTVNSGLISVGSFVLLVISYIFILFTVWKHSSGGLAKALSTLSAHVTVVILFFGPLMFFYTWPSPTSHLDKYLAIFDAFITPFLNPVIYTFRNKDMKVAMRRLCSRLAHFTKIL

SEQ ID NO: 431 - DNA, 1276 bp, Homo sapiens
  source (1)..(1276)
  CDS (201)..(1076)
aaggtctcattgtcattttaatctatatccttaatgattagtgataagatttttatatacctgttggtcattaggttagttttaacgctaaagtggaaatagacttttataactttgacttctttccttctcgttcattaatatgattataatttacatttttggctgttgttctctagctatcactgctaacaaagccaatggttggggcaaatcactccgtggtgtcagagtttgtgttcctgggactcaccaattcctgggagatccgacttctcctccttgtgttctcctccatgttttacatggccagtatgatgggaaactctctcattttgctcactgtgacttctgaccctcacttgcactcccccatgtattttctgttagccaacctctccttcattgacctgggtgtttcctctgtcacttctcccaaaatgatttatgacctgttcagaaagcacgaagtcatctcctttggaggctgcatcgctcaaatcttcttcatccacgtcattggcggtgtggagatggtgctgctcatagccatggcctttgacagatatgtggccatatgtaagcccctccagtacctgaccattatgagcccaagaatgtgcatgttcttcttagtggctgcctgggtgaccggccttatccactctgtagttcaattggtttttgtagtaaacttgcccttctgtggtcctaatgtatcggacagcttttactgtgaccttcctcggttcatcaaacttgcctgcacagacagctaccgactggagttcatggttacagccaacagtggattcatctctctgggctccttcttcatactgatcatttcctatgtggtcatcattctcactgttctgaaacactcttcagctggtttatccaaggctctgtccaccctttcagctcacgtcagtgtggtagttttgttctttggtcctttgatttttgtctatacgtggccatctccctccacacacctggataagtttctggccatctttgatgcagttctcactcctgttttaaatcctatcatctacacattcaggaattgagaaatgaaggtggcaatgagaaaagtatgccgacaactagtaaatcacaggaagatctcctaagtcatggcttgttttgtgagtgtcttcattaactattgaagtttattgctgaagcttctctttgtcctaccttaatttgatcatccacatggatattgggtctattttgtttgtcatttaggagggagggaaatttg

SEQ ID NO: 432 - protein, 291 aa, Homo sapiens
MVGANHSVVSEFVFLGLTNSWEIRLLLLVFSSMFYMASMMGNSLILLTVTSDPHLHSPMYFLLANLSFIDLGVSSVTSPKMIYDLFRKHEVISFGGCIAQIFFIHVIGGVEMVLLIAMAFDRYVAICKPLQYLTIMSPRMCMFFLVAAWVTGLIHSVVQLVFVVNLPFCGPNVSDSFYCDLPRFIKLACTDSYRLEFMVTANSGFISLGSFFILIISYVVIILTVLKHSSAGLSKALSTLSAHVSVVVLFFGPLIFVYTWPSPSTHLDKFLAIFDAVLTPVLNPIIYTFRN

SEQ ID NO: 433 - DNA, 1222 bp, Homo sapiens
  source (1)..(1222)
  CDS (201)..(1022)
tagaggctattaatataatactattaattagaaatttctcatttttttttctctttaggtaacgtgaaagtgaacttatcaaatgaatagggacaaccagtctgtggtgtctgaattcgtgttgctgggactctcaaattcttgggagactcaagatttttcttttttgcttttcttgtcttttctatgtgtccggtgtgatggcaaacctcattgtagtggtcattgtaacctctgacccttacttgcactcctccttgtatattttgctggccaacctctctgtcattgatctcacattttgctccattgcagcacgcaagatgatttgtgatattttcaggaaacagaaagtcatttccttttggggctgtgtagctcagatcttctttagccatgctgttgggggcactgagatggtgctgctcatagccatggcctttgacagatatgttgccgtatgtaagccccttcactacctgaccatcatgcatccaagaatgtgcattttgattctagtggcttcctgggccattggtctcattcactcattggtccaattgtcttttgtagtaaacttgcccttctgtggccctaatgtgttggacagcttttactgtgacatacctcagctcatcaaacttgcttgcacaaatacctataaactgcagttcatggttactgctaatagtgggttcatttccttgagtgctttcttcttgctcatcctctcttacatcttcattctggccactcttcagaaacactcctcaggaggctcatccaaggctgtctctactctgtcagctcatattactgttgtggttttattctttggtccactgatttttttctatgtatggccctctcctccaacacatctgaataaatttctagccatatttgatgccattttcactccttttctgaatccagtcatctacacattcaggaacagggaaatgaagattgcaataaggagagtgttcggtcaatttatgggttttagaaaaactacttaagtggctttattaaaacacagaatttccaagtgactattgaaagtccacagtaggcagtcctcatagcaatgagaacacttggacacaggaaggggaacatcacacactgaggcctgtcatggggttgggggagggatagcattaggagatatacccaatgttaaatgacgagttaatgggtgcagcacacccacatggca

SEQ ID NO: 434 - protein, 273 aa, Homo sapiens [sequence omitted]

SEQ ID NO: 435 - DNA, 1351 bp, Homo sapiens
  source (1)..(1351)
  CDS (201)..(1151)
agaagaaagagtgtggcttcaggaccagggtgttggctatcatgaaatgaggaagcataaacagtagaagtgatttcttaggttgttgagatagatagaataatataaatgtggcataccttgtgtttagttcaagaactataatctagatgtaacacctgaaaataaactcttttattgatattctacaggcagaagaaatgaagatagcaaacaacacagtagtgacagaatttatcctccttggtctgactcagtctcaagatattcagctcttggtctttgtgctgatcttaattttctaccttatcatcctccctggaaattttctcattattttcaccataaggtcagaccctgggctcacagcccccctctatttatttctgggcaacttggccttcctggatgcatcctactccttcattgtggctcccaggatgttggtggacttcctctctgagaaaaaggtaatctcctacagaggctgcatcactcagctctttttcttgcacttccttggaggaggggagggattactccttgttgtgatggcctttgaccgctacatcgccatctgccggcctctgcactgttcaactgtcatgaaccctagagcctgctatgcaatgatgttggctctgtggcttgggggttttgtccactccattatccaggtggtcctcatcctccgcttgcctttttgtggcccaaaccagctggacaacttcttctgtgatgtccgacaggtcatcaagctggcttgcaccgacatgtttgtggtggagcttctaatggtcttcaacagtggcctgatgacactcctgtgctttctggggcttctggcttcctatgcagtcatcctctgccatgttcgtagggcagcttctgaagggaagaacaaggccatgtccacgtgcaccactcgtgtcattattatacttcttatgtttggacctgctatcttcatctacatgtgccctttcagggccttaccagctgacaagatggtttctctctttcacacagtgatctttccattgatgaatcctatgatttatacccttcgcaaccaggaagtgaaaacttccatgaagaggttattgagtcgacatgtagtctgtcaagtggattttataataagaaactgagaaggaggaattctggctggaattcatatcattcatttaacaagtcctgtttttcactgagtacctcccatttgccaggtaccattgtaggcaatggaggagagttatgcataatgagagaataaacttattatatttaaagaatataaaggaaaccccagagtggttgaagtataatgagtaagtgtgagaaatttaag

SEQ ID NO: 436 - protein, 316 aa, Homo sapiens
MKIANNTVVTEFILLGLTQSQDIQLLVFVLILIFYLIILPGNFLIIFTIRSDPGLTAPLYLFLGNLAFLDASYSFIVAPRMLVDFLSEKKVISYRGCITQLFFLHFLGGGEGLLLVVMAFDRYIAICRPLHCSTVMNPRACYAMMLALWLGGFVHSIIQVVLILRLPFCGPNQLDNFFCDVRQVIKLACTDMFVVELLMVFNSGLMTLLCFLGLLASYAVILCHVRRAASEGKNKAMSTCTTRVIIILLMFGPAIFIYMCPFRALPADKMVSLFHTVIFPLMNPMIYTLRNQEVKTSMKRLLSRHVVCQVDFIIRN

SEQ ID NO: 437 - DNA, 973 bp, Homo sapiens
  source (1)..(973)
  CDS (201)..(773)
  modified_base (151): a, t, c, g, unknown or other
  modified_base (841)..(940): a, t, c, g, unknown or other
accttcatacccccatgtacttcttcctctttaacttgtccttcatagatctctgttattcttctgtgtttatacccaaaatgctaatgaactttatttcagagaagaatattatgtccttcaaggggtgcatgacccaactttccttttnctgatttttttggtcatttctgaaggttatgtgctgacgtcaatggcgtatgatcgctgtggccatctgtaccccacttctgtatcacattgccatgtctcctacagtgtgctccagccttatgtttggttcctatttgatgcctttttctggtgccatggcccacactggatgcatgctgagactgactttctgtgatgcgaacaccatcgatcactacttctgtgacatcctccctctgctccagctctcctgcaccagcacctacatcaatgagctggtggttttcactgtggttggcatcaacatcattgtgcccactgttaccatctttatctcttatggtttcatcctctccagcatcctccatatcagttccaaggagggcaggtccaaagctttcagcacttgcagttcccatataattgctgtttctctgttctttggatcaggtgcatttatgtatctcaacccatcttctgctgggtccatggataagagaaaattatcttctgtcttttatacaaatgtggttcccatgttgaaccccttaatctacagcctgaggaacaaagatgttaaatttgccctaagaaaagccctgagtagtaggaaactttgataagtaatagtatgtgtctgtgtgtatagtcacaagacagggatattctgtttgtttaattataatannnnnnnnnnnnnnnnnnnnnnnnnnnnnnnnnnnnnnnnnnnnnnnnnnnnnnnnnnnnnnnnnnnnnnnnnnnnnnnnnnnnnnnnnnnnnnnnnnnnacccccaacaccccccacaccccatacccccca

SEQ ID NO: 438 - protein, 190 aa, Homo sapiens [sequence omitted]

SEQ ID NO: 439 - DNA, 1390 bp, Homo sapiens
  source (1)..(1390)
  CDS (201)..(1190)
cccagcagccacaaaaatgcaaatttagataattaagttattattttcatctaataactgagatatgtggtgcccagtgatgctaaagttaacagacattttgtggtcagaagattaaatttgtataagaattttggaacagaagagggttaagaggaacaaaggatatattaaaggaaaacttgcaatgtttttcccccatgcaattagttctattacttatgtttctccttgtctttataggcaatactgcacctgcattctcagtgaccttggaatctatggacataccacaaaatatcacagaatttttcatgctggggctctcacagaactcagaggtacagagagttctctttgtggtctttttgctgatctatgtggtcacggtttgtggcaacatgctcattgtggtcactatcacctccagccccacgctggcttcccctgtgtattttttcctggccaacctatcctttattgacaccttttattcttcttctatggctcctaaactcattgctgactcattgtatgaggggagaaccatctcttatgagtgctgcatggctcagctctttggagctcattttttgggaggtgttgagatcattctgctcacagtgatggcttatgaccgctatgtggccatctgtaagcccctgcacaatactaccatcatgaccaggcatctctgtgccatgcttgtaggggtggcttggcttgggggcttcctgcattcattggttcagctcctcctggtcctttggttgcccttctgtgggcccaatgtgatcaatcactttgcctgtgacttgtaccctttgctggaagttgcctgcaccaatacgtatgtcattggtctgctggtggttgccaacagtggtttaatctgcctgttgaacttcctcatgctggctgcctcctacattgtcatcctgtactccttgaggtcccacagtgcagatgggagatgcaaagccctctccacctgtggagcccacttcattgttgttgccttgttctttgtgccctgtatatttacttatgtgcatccattttctactttacctatagacaaaaatatggcattattttatggtattctgacacctatgttgaatccactcatttataccctgagaaatgaagaggtaaaaaatgccatgagaaagctctttacatggtaagaaattgcaggtggaaaatgagtggtaaagcaggaaataaaaatgactttatttttgtaagtgaaacaaaccaagccttactttttttgtatcatgtatagttgtattccatcttaagcataatttcatcttcactgacttttttttttttgagacggagtctcacttcaacacccaggctggagtgcagtggcacgatc

SEQ ID NO: 440 - protein, 329 aa, Homo sapiens
MQLVLLLMFLLVFIGNTAPAFSVTLESMDIPQNITEFFMLGLSQNSEVQRVLFVVFLLIYVVTVCGNMLIVVTITSSPTLASPVYFFLANLSFIDTFYSSSMAPKLIADSLYEGRTISYECCMAQLFGAHFLGGVEIILLTVMAYDRYVAICKPLHNTTIMTRHLCAMLVGVAWLGGFLHSLVQLLLVLWLPFCGPNVINHFACDLYPLLEVACTNTYVIGLLVVANSGLICLLNFLMLAASYIVILYSLRSHSADGRCKALSTCGAHFIVVALFFVPCIFTYVHPFSTLPIDKNMALFYGILTPMLNPLIYTLRNEEVKNAMRKLFTW

SEQ ID NO: 441 - DNA, 1036 bp, Homo sapiens
  source (1)..(1036)
  CDS (201)..(836)
actaagaagtcagctggagaagtttacaggtacctattcctagagaattttgggaacagaaggaatcatctgtgagatggcagagtaatgaaaaggcaaagttttggactatttgattcttttatgcttcttttttttcattttttttttctaaaggtaaaatattccttcctggaggttttatcacccacactacatagatgaagaataaaaggaatgtgactgaattcgttttaacaggtcttacacagaaccctaaaatggagaaagtcatgtttgcagtatttttggttctttacatgataacactttcaggcaacctgctccttgtggttacaattaccaccagccaggctcttagctcccccatgtacttcttcctgagccacctttctttgatagacacagtttattcttcttcttcagctcctaagttgattgtcgattcccttcatgagaagaaaatcatctcctttaatgggtgtatggctcaagcctatgaagaacacatttttggtgctactgagatcatcctgctgacagtgatggcctgtgacaactatgtggccatctgcaaacctctgcactacacaaccatcatgagccacagcctgtgcattctcctagtggtagtggcctggataggaggatttctccatgcaaatattcagattctatttacagtatggctgcccttctgtggccccaatgtcatagaccacttcatgtgtgacttgtgccctttgttaaaacttgtttgcctggacactcatacccttggtctctttgttgctgccaacagtgggttcatctgcttattaaacttccttctctaggtggtatcctatgtgatcatcttgagatgtttaaagaactatatcttggaggggaggggtaaagccctctccacctgtatttctcacatcataatagttgtcttattctttgtgccttgtatatttgtgtatctgcacccagtgacaaactctgcccattgataaagctgctgctgtattttatactatggtggtcccaa

SEQ ID NO: 442 - protein, 211 aa, Homo sapiens; identical to SEQ ID NO: 372

SEQ ID NO: 443 - DNA, 1330 bp, Homo sapiens
  source (1)..(1330)
  CDS (201)..(1130)
tatatataatatataatttatatatatatataataatatattatatatattatatatgtattttttgtgatggggatgaaggctagtatctttcttactccataatcttggtggtatctcagaaaactttcttatgtctcataatttatgtctttgcagagccagccagccactttgtcggtcatcagggcagataatccatgggtgccaagaacaatgtgactgagtttgttttatttggcctttttgagagcagagagatgcagcatacatgctttgtggtattcttcctctttcatgtgctcactgtcctggggaaccttctggtcatcatcaccatcaatgctagaaagaccctgaagtctcccatgtatttcttcctgagccagttgtcttttgctgacatatgttatccatccactaccatacccaagatgattgctgacacttttgtggagcataagatcatctccttcaatggctgcatgacccagctcttttctgcccacttctttggtggcactgagatcttcctccttacagccatggcctatgaccgctatgtggccatctgtaggcccctgcactacacagccatcatggattgccggaagtgtggcctgctagcgggggcctcctggttagctggcttcctgcattccatcctgcagaccctcctcacggttcagctgcctttttgtgggcccaatgagatagacaacttcttctgtgatgttcatcccctgctcaagttggcctgtgcagacacctacatggtaggtctcatcgtggtggccaacagcggtatgatttctttagcatccttttttatccttatcatttcctatgttatcatcttactgaacctaagaagccagtcatctgaggaccggcgtaaggctgtctccacatgtggctcacacgtaatcactgtccttttggttctcatgccccccatgttcatgtacattcgtccctccaccaccctggctgctgacaaacttatcatcctctttaacattgtgatgccacctttgctgaaccctttgatctatacactaaggaacaacgatgtgaaaaatgccatgaggaagctgtttagggtcaagaggagcttaggggagaagtgacattccagagaatctcaatccagctaggaaattgggagactttccatcttgtagcatctaacacagcctttttatttccagtctgatgtttgcaatggcaattatcctcctagctcttgttgttataataattccacatattctttcaatcctttattcattaaatatttattggatgtttacagtgagtgagaatacaa

SEQ ID NO: 444 - protein, 309 aa, Homo sapiens
MGAKNNVTEFVLFGLFESREMQHTCFVVFFLFHVLTVLGNLLVIITINARKTLKSPMYFFLSQLSFADICYPSTTIPKMIADTFVEHKIISFNGCMTQLFSAHFFGGTEIFLLTAMAYDRYVAICRPLHYTAIMDCRKCGLLAGASWLAGFLHSILQTLLTVQLPFCGPNEIDNFFCDVHPLLKLACADTYMVGLIVVANSGMISLASFFILIISYVIILLNLRSQSSEDRRKAVSTCGSHVITVLLVLMPPMFMYIRPSTTLAADKLIILFNIVMPPLLNPLIYTLRNNDVKNAMRKLFRVKRSLGEK

SEQ ID NO: 445 - DNA, 1324 bp, Homo sapiens
  source (1)..(1324)
  CDS (201)..(1124)
ttcaggaatgtatattccagcacccacttgtaaacgatccagagacaagacagcacctagtataatggtctacacataaggatgctcatcatatgggcctaaaaccttggttctgagcccctgagccctgaaagggaaagtagtgacttcatgtatctgtgtctgtggttcattttcttcaggtgtatggagaaaacaccatggaaacagggaacctcacgtgggtatcagactttgtcttcctggggctctcgcagactcgggagctccagcgtttcctgtttctaatgttcctgtttgtctacatcaccactgttatgggaaacatccttatcatcatcacagtgacctctgattcccagctccacacacccatgtactttctgctccgaaacctggctgtcctagacctctgtttctcttcagtcactgctcccaaaatgctagtggacctcctctctgagaagaaaaccatctcttaccagggctgcatgggtcagatcttcttcttccactttttgggaggtgccatggtcttcttcctctcagtgatggcctttgaccgcctcattgccatctcccggcccctccgctatgtcaccgtcatgaacactcagctctgggtggggctggtggtagccacctgggtgggaggctttgtccactctattgtccagctggctctgatgctcccactgcccttctgtggccccaacattttggataacttctactgtgatgttccccaagtactgagacttgcctgcactgacacctcactgctggagttcctcaagatctccaacagtgggctgctggatgtcgtctggttcttcctcctcctgatgtcctacttattcatcctggtgatgctgaggtcacatccaggggaggcaagaaggaaggcagcttccacctgcaccacccacatcatcgtggtttccatgatcttcgttccaagcatttacctctatgcccggcccttcactccattccctatggacaagcttgtgtccatcggccacacagtcatgacccccatgctcaaccccatgatctataccctgaggaaccaggacatgcaggcagcagtgagaagattagggagacaccggctggtttgagagtgacaatggtaggtttcttctctttggctttgttttccctttgtgaagtggagagggagctactacctttgctctcttcatagtgtgttgaggttcatcatagcagggaatgaattttgaaactaagcaacttcgtgttttaggaaaaaagaaagtatcctctttggtggttaaggtttgtgataaagagttttaac

SEQ ID NO: 446 - protein, 307 aa, Homo sapiens
METGNLTWVSDFVFLGLSQTRELQRFLFLMFLFVYITTVMGNILIIITVTSDSQLHTPMYFLLRNLAVLDLCFSSVTAPKMLVDLLSEKKTISYQGCMGQIFFFHFLGGAMVFFLSVMAFDRLIAISRPLRYVTVMNTQLWVGLVVATWVGGFVHSIVQLALMLPLPFCGPNILDNFYCDVPQVLRLACTDTSLLEFLKISNSGLLDVVWFFLLLMSYLFILVMLRSHPGEARRKAASTCTTHIIVVSMIFVPSIYLYARPFTPFPMDKLVSIGHTVMTPMLNPMIYTLRNQDMQAAVRRLGRHRLV

SEQ ID NO: 447 - DNA, 1408 bp, Homo sapiens
  source (1)..(1408)
  CDS (201)..(1208)
gtggttgaggacagcatggccgaagggaaaaaagacccagattcttgtaatatactgtagggcgtggtcagggaagtaagtctctggaacccttgaaaacatatggaacttcctccccgtggagggctttcctaagctacatctcggattgacactcaacaactcaacttaatcaactcaatcctgactgtccaaggaaaatgattgaattttcattttttttgtttgtttgtttgtttcaatggtttctctgtaggaacgtgggggaagatcctatggaaccacagaacaccacacaggtatcaatgtttgtcctcttagggttttcacagacccaagagctccagaaattcctgttccttctgttcctgttagtctatgttaccaccattgtgggaaacctccttatcatggtcacagtgacttttgactgccggctccacacacccatgtattttctgctccgaaatctagctctcatagacctctgctattccacagtcacctctccaaagatgctggtggacttcctccatgagaccaagacgatctcctaccagggctgcatggcccagatcttcttcttccaccttttgggaggtgggactgtcttttttctctcagtcatggcctatgaccgctacatagccatctcccagcccctccggtatgtcaccatcatgaacactcaattgtgtgtgggcctggtagtagccgcctgggtggggggctttgtccactccattgtccaactggctctgatacttccactgcccttctgtggccccaatatcctagataacttctactgtgatgttccccaagtactgagacttgcctgcactgatacctccctcctggagttcctcatgatctccaacagtgggctgctagttatcatctggttcctcctccttctgatctcttatactgtcatcctggtgatgctgaggtcccactcgggaaaggcaaggaggaaggcagcttccacctgcaccacccacatcatcgtggtgtccatgatcttcattccctgtatctatatctatacctggcccttcaccccattcctcatggacaaggctgtgtccatcagctacacagtcatgacccccatgctcaaccccatgatctacaccctgagaaaccaggacatgaaagcagccatgaggagattaggcaagtgcctagtaatttgcagggagtaaactttaagtaagttgactttaaatgacaaatttctctggatttttattttcccacatgaaaaatggaggaaagtctttataaagcataacaaatcagattacacttatatttcttgaggacctagtgctgtgtcaagtactgtgttaagcacttccacgctttttttctttttttttttttttagatggagccttgctct

SEQ ID NO: 448 - protein, 335 aa, Homo sapiens
MIEFSFFLFVCLFQWFLCRNVGEDPMEPQNTTQVSMFVLLGFSQTQELQKFLFLLFLLVYVTTIVGNLLIMVTVTFDCRLHTPMYFLLRNLALIDLCYSTVTSPKMLVDFLHETKTISYQGCMAQIFFFHLLGGGTVFFLSVMAYDRYIAISQPLRYVTIMNTQLCVGLVVAAWVGGFVHSIVQLALILPLPFCGPNILDNFYCDVPQVLRLACTDTSLLEFLMISNSGLLVIIWFLLLLISYTVILVMLRSHSGKARRKAASTCTTHIIVVSMIFIPCIYIYTWPFTPFLMDKAVSISYTVMTPMLNPMIYTLRNQDMKAAMRRLGKCLVICRE

SEQ ID NO: 449 - DNA, 1318 bp, Homo sapiens
  source (1)..(1318)
  CDS (201)..(1118)
agataaaattatgatcttgttgaattctgaatgtctttaagtaatagattatagaaagtcactgtaagagtgagcagaatgatataaaatgaggctttgaatttgaatataataattctgacttccttctccttctcttcttcaaggtaactgcagaggctatttcctggaatgaatcaacgagtgaaacgaataactctatggtgactgaattcatttttctgggtctctctgattctcagggactccagaccttcctatttatgttgttttttgtattctatggaggaatcgtgtttggaaaccttcttattgtcataacagtggtatctgactcccaccttcactctcccatgtacttcctgctagccaacctctcactcattgatctgtctctgtcttcagtcacagcccccaagatgattactgactttttcagccagcgcaaagtcatctctttcaagggctgccttgttcagatatttctccttcacttctttggtgggagtgagatggtgatcctcatagccatgggctttgacagatatatagcaatatgcaaacccctacactacactacaattatgtgtggcaacgcatgtgtcggcattatggctgtcgcatggggaattggctttctccattcggtgagccagttggcctttgccgtgcacttacccttctgtggtcccaatgaggtcgatagtttttattgtgaccttcctagggtaatcaaacttgcctgtacagatacctacaggctagatattatggtcattgctaacagtggtgtgctcactgtgtgttcttttgttcttctaatcatctcatacactatcatcctaatgaccatccagcatcgccctttagataagtcgtccaaagctctgtccactttgactgctcacattacagtagttcttttgttctttggaccatgtgtctttatttatgcctggccattccccatcaagtcattagataaattccttgctgtattttattctgtgatcacccctctcttgaacccaattatatacacactgaggaacaaagacatgaagacggcaataagacagctgagaaaatgggatgcacattctagtgtaaagttttagatcttatataactgtgagattaatctcagataatgacacaaaatatagtgaagttggtaagttatttagtaaagctcatgaaaattgtgccctccattcccatataatttattaattgtctaggaacttccacatacattgcctcaatttatctttcaacaacttgtgtgttatattttggaatacagatacaaagttat

SEQ ID NO: 450 - protein, 305 aa, Homo sapiens
MVTEFIFLGLSDSQGLQTFLFMLFFVFYGGIVFGNLLIVITVVSDSHLHSPMYFLLANLSLIDLSLSSVTAPKMITDFFSQRKVISFKGCLVQIFLLHFFGGSEMVILIAMGFDRYIAICKPLHYTTIMCGNACVGIMAVAWGIGFLHSVSQLAFAVHLPFCGPNEVDSFYCDLPRVIKLACTDTYRLDIMVIANSGVLTVCSFVLLIISYTIILMTIQHRPLDKSSKALSTLTAHITVVLLFFGPCVFIYAWPFPIKSLDKFLAVFYSVITPLLNPIIYTLRNKDMKTAIRQLRKWDAHSSVKF

SEQ ID NO: 451 - DNA, 1351 bp, Homo sapiens
  source (1)..(1351)
  CDS (201)..(1151)
atttgatctttgtcacattgctgaatgttaagaactattattatttattccattttacagatgaggaaagtgagacccagaaaattctgctggttgttgaatagcatagagctgttgagttgccatttggtctgtgatagagcctatgttttaaccactgtcacttaattttgtttctgatctcaccagatacagtatccatgcctagtcagaactatagcatcatatctgaatttaacctctttggcttctcagccttcccccagcacctcctgcccatcttgttcctgctgtacctcctgatgttcctgttcacattgctgggcaaccttctcatcatggccacaatctggattgaacacagactccacacacccatgtacctcttcttgtgcaccctctccgtctctgagattctgttcactgttgccatcacccctcgcatgctggctgatctgctttccacccatcattccatcacctttgtggcttgtgccaaccagatgttcttctccttcatgtttggcttcactcactccttccttctcctggtcatgggctatgatcgctatgtggccatctgccacccactgcgttacaatgtgctcatgagcccccgtgactgtgcccatcttgtggcctgtacctgggctggtggctcagtcatggggatgatggtgacaacgatagttttccacctcactttctgtgggtctaatgtgatccaccattttttctgtcatgtgctttccctcttgaagttggcctgtgaaaacaagacatcatctgtcatcatgggtgtgatgctggtgtgtgtcacagccctgataggctgtttattcctcatcatcctctcctatgtcttcattgtggctgccatcttgaggattccctctgccgaaggccggcacaagacattttctacgtgtgtatcccacctcactgtggtggtcacgcactatagttttgcctcctttatctacctcaagcccaagggcctccattctatgtacagtgacgccttgatggccaccacctatactgtcttcacccccttccttagcccaatcattttcagcctaaggaacaaggagctgaagaatgccataaataaaaacttttacagaaaattctgtcctccaagttcctgagcgccagtttggtggtgatgaaatataataatgtgtatctccatagggctgttgtaagtgttcaggtatgtgaaaatatgtgtttgatacatactagctattgttttcccttccctttttgcttaagctcaagtgatcataatcttttctttatgagccattatgatgacctttatcccattatctgtgcctagaaatgt

SEQ ID NO: 452 - protein, 316 aa, Homo sapiens
MPSQNYSIISEFNLFGFSAFPQHLLPILFLLYLLMFLFTLLGNLLIMATIWIEHRLHTPMYLFLCTLSVSEILFTVAITPRMLADLLSTHHSITFVACANQMFFSFMFGFTHSFLLLVMGYDRYVAICHPLRYNVLMSPRDCAHLVACTWAGGSVMGMMVTTIVFHLTFCGSNVIHHFFCHVLSLLKLACENKTSSVIMGVMLVCVTALIGCLFLIILSYVFIVAAILRIPSAEGRHKTFSTCVSHLTVVVTHYSFASFIYLKPKGLHSMYSDALMATTYTVFTPFLSPIIFSLRNKELKNAINKNFYRKFCPPSS

SEQ ID NO: 453 - DNA, 1231 bp, Homo sapiens
  source (1)..(1231)
  CDS (201)..(1031)
agcatttctggtaagtttgtaatgcatgtttttctcatgttctgttctttcttgtgtgtttttttgtttgtttgtttgtttttggtagaaacatcaaccaggtgaaagcagggaatgagacacaaatttcagaatttcttcttctaggattttcagagaaacaagaattgcagcccttcctctttgggctgttcctgtccatgtacctggtcactgtgctcgggaacctgctcatcatcctggccgcaatctcagactcctgcctccacacccccatgtacttctttctctccaacctgtccttcgtagatatctgttttgcctccaccatggtcccaaagatgttggtgaacatccagacacagagcaaagtcattacctatgcaggttgcatcacccagatgtgcttttttgtactctttatagtgttggacagcttactcctgaccgtgatggcctatgaccagtttgtggccatctgtcaccccctgcactacacggtcatcatgagccctcagctctgtggactgctggttctggtgtcctggatcatgagtgtcctaaactccatgttacaaagcttagtgacattgcagttgtccttctgcacagacttggaaatccctcactttttctgtgaacttaatgagatgatccaccttgcctgttctgacacctttgtgaacaacatggtgatgcattttgcagctgtgctgctggacggtggtcctctcgttgggatcctttattcttactgtaggatagtttcctccatacgtgcaatctcgtcaactcaggggaagtacaaggcactttccacctgtgcatctcacctctcagttgtctccatattttatggtacggggctaggggtgtaccttagctctactatgacccaaaacttacactcaactgctgtcgcctcggtgatgtacactgtggtcacccccatgctcaaccccttcatttacagtctgaggaataaagacataaagggggctctgacacaattcttcagagggaaacaataaaagagccatttttcggctgggcacagtggctcaagcctgtaatcccagcactttgggaggcagaggtgggcagatcatgaggtcaggagttcaagaccagcctggccaacatggtgaaacccccatctctactaaaaatacaaaaattagctgggcgtagtggcatgcgcctgtagtcccagccactcaggaggttgagg

SEQ ID NO: 454 - protein, 276 aa, Homo sapiens
MYLVTVLGNLLIILAAISDSCLHTPMYFFLSNLSFVDICFASTMVPKMLVNIQTQSKVITYAGCITQMCFFVLFIVLDSLLLTVMAYDQFVAICHPLHYTVIMSPQLCGLLVLVSWIMSVLNSMLQSLVTLQLSFCTDLEIPHFFCELNEMIHLACSDTFVNNMVMHFAAVLLDGGPLVGILYSYCRIVSSIRAISSTQGKYKALSTCASHLSVVSIFYGTGLGVYLSSTMTQNLHSTAVASVMYTVVTPMLNPFIYSLRNKDIKGALTQFFRGKQ

SEQ ID NO: 455 - DNA, 1339 bp, Homo sapiens
  source (1)..(1339)
  CDS (201)..(1139)
agaatggctggataactctacacaaatagaataaaaatagataccacttcctgagagattcattgtctttgtaaggactccaggaagggtgacaaatgtccatcaaaaggtgatattgtaaagtgatgacaagctgagctgccacttgctgttcattaaacgttgctttttcctccttccccagcagacacaacagctacatggaagcagaaaaccttacagaattatcaaaatttctcctcctgggactctcagatgatcctgaactgcagcccgtcctctttgggctgttcctgtccatgtacctggtcacggtgctggggaacctgctcatcattctggccgtcagctctgactcccacctccacacccccatgtacttcttcctctccaacctgtcctttgttgacatctgtttcatctccaccacagtccccaagatgctagtgagcatccaggcacggagcaaagacatctcctacatggggtgcctcactcaggtgtattttttaatgatgtttgctggaatggatactttcctactggccgtgatggcctatgaccggtttgtggccatctgccacccactgcactacacggtcatcatgaacccctgcctctgtggcctcctggttctggcatcttggttcatcattttctggttctccctggttcatattctactgatgaagaggttgaccttctccacaggcactgagattccgcatttcttctgtgaaccggctcaggtcctcaaggtggcctgctctaacaccctcctcaataacattgtcttgtatgtggccacggcactgctgggtgtgtttcctgtagctgggatcctcttctcctactctcagattgtctcctccttaatgggaatgtcctccaccaagggcaagtacaaagccttttccacctgtggatctcacctctgtgtggtctccttgttctatggaacaggacttggggtctatctgagttctgctgtgacccattcttcccagagcagctccaccgcctcagtgatgtacgccatggtcacccccatgctgaaccccttcatctacagcctgaggaacaaggatgtgaagggggccctggaaagactcctcagcagggccgactcttgtccatgacaaatcagggcctcagaactaagaggacacactgcgtacccctaaggcaaatgttgtgggtttaaatatccggctctttttctcttttaaaaaatgtgcttgatgtgggatttttggttgttgttattgggttgtttgttgttgttattgttattgtttttgagacagagtctggctctgtcgcccaggctagagtgcag

SEQ ID NO: 456 - protein, 312 aa, Homo sapiens
MEAENLTELSKFLLLGLSDDPELQPVLFGLFLSMYLVTVLGNLLIILAVSSDSHLHTPMYFFLSNLSFVDICFISTTVPKMLVSIQARSKDISYMGCLTQVYFLMMFAGMDTFLLAVMAYDRFVAICHPLHYTVIMNPCLCGLLVLASWFIIFWFSLVHILLMKRLTFSTGTEIPHFFCEPAQVLKVACSNTLLNNIVLYVATALLGVFPVAGILFSYSQIVSSLMGMSSTKGKYKAFSTCGSHLCVVSLFYGTGLGVYLSSAVTHSSQSSSTASVMYAMVTPMLNPFIYSLRNKDVKGALERLLSRADSCP

SEQ ID NO: 457 - DNA, 1216 bp, Homo sapiens
  source (1)..(1216)
  CDS (201)..(1016)
ctcattttgaaagtcattatcaatcacatagaaccagggaatgatacacagatttcagaatttcttcttctgggactttcagataaaccagaattgcagcccttcctctttgggctgttcttctccatgtacctggtcactgtgcttgggaatctgctcatcatcctggccacaatctcagactcccacctccacaccccatgtacttcttcctctccaacctgtcctttgcggacatctgtttcatctctactacaatcccaaagatgctcgtaaacatccagacacagagcagagtcatcacttatgcaggctgcatcacccagatgtgcttttttgtactcttagaagcactggacagcttactcctgaccgtgatggcctatgaccagtttgtggccatctgtcaccccctgcactacatggtcatcatgagcccctggttctgtggactgctggttctggcatcctggatcatcatgagcccctggctctgtggactgctggttctggcattctggattatcagtgatctggattcctcattacatagcttgatggtgctgtcactgcccttctgcacagatttccaaattccacattttgtctatgaacttaatcaggtcatccgccttgccggttctgatacctttcttaatgacatggcgatgtattttgcagtagggccactgggtggagttcccctcgctgggatcctgtacttgtactgtaagatagttttctccatacgtgcaatctcatcagctcaggggaagtacaaggcattttccacctgtgcatctcatctctcagttgtctccttattttatggtaggagcctaggggtgtactttagttctgctcctacccaaaactctcactcaggtgctgcagcttcagtgatgtacactgtggtcacccccatgctgaaccccttcatctgcagtctgaggaataaagacataaagagagctctgaatcaattcatcagggtagtgccattcttcaggaagtgacagtgatcccagagctctaagccttggactgagaaattgtgatttgtgaaccagattctggaagtaggacttgtctcttctatttattagctggagtttcaatttctttgattgccactattctatagaatttacacttttctgtggaaaactgctccttgatatccaacagtgttttgttttgtttgttttgttttgtt

SEQ ID NO: 458 - protein, 271 aa, Homo sapiens
MYFFLSNLSFADICFISTTIPKMLVNIQTQSRVITYAGCITQMCFFVLLEALDSLLLTVMAYDQFVAICHPLHYMVIMSPWFCGLLVLASWIIMSPWLCGLLVLAFWIISDLDSSLHSLMVLSLPFCTDFQIPHFVYELNQVIRLAGSDTFLNDMAMYFAVGPLGGVPLAGILYLYCKIVFSIRAISSAQGKYKAFSTCASHLSVVSLFYGRSLGVYFSSAPTQNSHSGAAASVMYTVVTPMLNPFICSLRNKDIKRALNQFIRVVPFFRK

SEQ ID NO: 459 - DNA, 1381 bp, Homo sapiens
  source (1)..(1381)
  CDS (201)..(1181)
aggagagatttagaagatggcagaagtttgtttttgttcaatcagctacctacgaagcccaaaactcatatactgtatagccgagaaaaagtaaactacattctcttcctaattattcttttgaaaaatgacttcatgttcattatcttctcttcattcttaaaaaaggaacacattttataaaagagtcctgactgataatgtgtcccttgaccttgcaggtcactggcctaatgaatgtctctgagccaaattccagctttgcttttgtaaatgaatttatactccaaggtttctcttgtgagtggacaattcagatcttcctcttctcactctttactacaacatatgcactgactataacagggaatggagccattgcttttgtcctgtggtgtgaccggcgacttcacactcccatgtacatgttcctgggaaatttctcctttttagagatatggtatgtctcttctacagttcccaagatgttggtcaacttcctttcagagaaaaaaaacatctcctttgctggatgttttctccagttttatttcttcttctctttgggtacatcagaatgcttgcttttgactgtgatggcctttgatcagtaccttgctatctgccgtcccttgctctatcctaatatcatgactgggcatctctatgccaaactggtcatactgtgctgggtttgtggatttctgtggttcctgatccccattgttctcatctctcagatgcccttctgtggcccaaacattattgaccatgttgtgtgtgacccagggccacgatttgcattggattgtgtttctgccccaagaatccaactgttttgctacactctaagctcattagttatttttggtaacttcctctttattattggatcctatactcttgtcctgaaagctatgttgggtatgccttcaagcactgggagacataaggccttctctacctgtgggtctcatttggctgtggtatcactgtgctatagctctcttatggtcatgtatgtgagcccaggactcggacattctacagggatgcagaaaattgaaactttgttctatgctatggtgaccccactcttcaatccccttatctatagcctccagaataaggagataaaggcagccctgaggaaagttctggggagttccaacataatctaaggcatattagattattcctccatgatcagatcagtacagtctaacaaagagaaatcagaattatatagttatttaaatctaaaaaatatggacctagtgatattgactatatcagcctatgaaattaaacacctgttggaccccttacaaattaaagttgccaaatcatatagataaatggaagcgtgtggtttcccttt

SEQ ID NO: 460 - protein, 326 aa, Homo sapiens
MCPLTLQVTGLMNVSEPNSSFAFVNEFILQGFSCEWTIQIFLFSLFTTTYALTITGNGAIAFVLWCDRRLHTPMYMFLGNFSFLEIWYVSSTVPKMLVNFLSEKKNISFAGCFLQFYFFFSLGTSECLLLTVMAFDQYLAICRPLLYPNIMTGHLYAKLVILCWVCGFLWFLIPIVLISQMPFCGPNIIDHVVCDPGPRFALDCVSAPRIQLFCYTLSSLVIFGNFLFIIGSYTLVLKAMLGMPSSTGRHKAFSTCGSHLAVVSLCYSSLMVMYVSPGLGHSTGMQKIETLFYAMVTPLFNPLIYSLQNKEIKAALRKVLGSSNII

SEQ ID NO: 461 - DNA, 1012 bp, Homo sapiens
  source (1)..(1012)
  CDS (201)..(812)
  modified_base (64)..(65): a, t, c, g, unknown or other
  modified_base (95)..(194): a, t, c, g, unknown or other
  modified_base (242): a, t, c, g, unknown or other
  modified_base (245): a, t, c, g, unknown or other
  modified_base (913): a, t, c, g, unknown or other
  modified_base (934): a, t, c, g, unknown or other
  modified_base (936): a, t, c, g, unknown or other
  modified_base (946)..(1012): a, t, c, g, unknown or other
atgctctcggtatacttctctgtaatctgagccaaacaaatgggagttaggtatgttttttccnncccccgagcgcagactaagaaccagttgcnnnnnnnnnnnnnnnnnnnnnnnnnnnnnnnnnnnnnnnnnnnnnnnnnnnnnnnnnnnnnnnnnnnnnnnnnnnnnnnnnnnnnnnnnnnnnnnnnnnngactgaatgtttctcctgggagcgatggcttatgaccgatttgctgcnatntgccatcctctgaactacccagtgattatgaacagaggggtttttatgaaattagtaatattctcatggatctcagggatcatggtggctactgtgcagaccacttgggtatttagttttccattttgtggccccaatgaaattaatcatctcttctgtgagactcccccggtactagagcttgtgtgtgcagacaccttcttatttgaaatctatgccttcacaggcaccattttgattgttatggttcctttcttgttgatcctcttgtcttacattcgagttctgtttgccatcctgaagatgccatcaactactgggagacaaaaggccttttccacctgtgcctctcacctcacatctgtgaccctgttctatggcacagccaatatgacttatttacaacccaaatctggctactcacccgaaaccaagaaactgatctcattggcttacacgttgcttacccctctgctcaatccgctcatctatagcttacgaaacagtgagatgaagaggactttgataaaactatggcgaagaaaagtgattttacacacattctgattgtgttgagaagctgagtaagatttggccactgcctgagtgaactctatttaaatttaataaagggtgaaaacagattgcttttttgtaggtttttaatnccccccgaggggaggataaanancccgatgctnnnnnnnnnnnnnnnnnnnnnnnnnnnnnnnnnnnnnnnnnnnnnnnnnnnnnnnnnnnnnnnnnnn

SEQ ID NO: 462 - protein, 203 aa, Homo sapiens
  MOD_RES (14)..(15): Variable
MFLLGAMAYDRFAXXCHPLNYPVIMNRGVFMKLVIFSWISGIMVATVQTTWVFSFPFCGPNEINHLFCETPPVLELVCADTFLFEIYAFTGTILIVMVPFLLILLSYIRVLFAILKMPSTTGRQKAFSTCASHLTSVTLFYGTANMTYLQPKSGYSPETKKLISLAYTLLTPLLNPLIYSLRNSEMKRTLIKLWRRKVILHTF

SEQ ID NO: 463 - DNA, 1333 bp, Homo sapiens
  source (1)..(1333)
  CDS (201)..(1133)
ttttttttaatacagtaataatgcctctttgaaagtgacactcacctgggatactttttgagggtaaagaagataatttacataaacaaatcttgttctactttacagataattttttttttgatatcttggaaagtcaagttctagactgtcattctcgtaatgatttctgtagcagtttgaaacaagaacaaggaagaatggactgggaaaattgctcctcattaactgatttttttctcttgggaattaccaataacccagagatgaaagtgaccctatttgctgtattcttggctgtttatatcattaatttctcagcaaatcttggaatgatagttttaatcagaatggattaccaacttcacacaccaatgtatttcttcctcagtcatctgtctttctgtgatctctgctattctactgcaactgggcccaagatgctggtagatctacttgccaagaacaagtcaatacccttctatggctgtgctctgcaattcttggtcttctgtatctttgcagattctgagtgtctactgctgtcagtgatggcctttgatcggtacaaggccatcatcaaccccctgctctatacagtcaacatgtctagcagagtgtgctatctactcttgactggggtttatctggtgggaatagcagatgctttgatacatatgacactggccttccgcctatgcttctgtgggtctaatgagattaatcatttcttctgtgatatccctcctctcttattactctctcgctcagatacacaggtcaatgagttagtgttattcaccgtctttggttttattgaactgagtaccatttcaggagttttcatttcttattgttatatcatcctatcagtcttggagatacactctgctgaggggaggttcaaagctctctctacatgcacttcccacttatctgcggttgcaattttccagggaactctgctctttatgtatttccggccaagttcttcctattctctagatcaagataaaatgacctcattgttttacacccttgtggttcccatgttgaaccccctgatttatagcctgaggaacaaggatgtgaaagaggccctgaaaaaactgaaaaataaaattttattttaaggaaatagtaaaaatacatgtttatacacacaaaaatgcatattcatactggtgttttcttcaaattatatattataacataaagttgtctcaaataccctaatttaatataatacatattttactcagccacaatctagcaattctctggaattgtctaaatatgctatttttttaatgtgttttcaatttaggtaagg

SEQ ID NO: 464 - protein, 310 aa, Homo sapiens
MDWENCSSLTDFFLLGITNNPEMKVTLFAVFLAVYIINFSANLGMIVLIRMDYQLHTPMYFFLSHLSFCDLCYSTATGPKMLVDLLAKNKSIPFYGCALQFLVFCIFADSECLLLSVMAFDRYKAIINPLLYTVNMSSRVCYLLLTGVYLVGIADALIHMTLAFRLCFCGSNEINHFFCDIPPLLLLSRSDTQVNELVLFTVFGFIELSTISGVFISYCYIILSVLEIHSAEGRFKALSTCTSHLSAVAIFQGTLLFMYFRPSSSYSLDQDKMTSLFYTLVVPMLNPLIYSLRNKDVKEALKKLKNKILF

SEQ ID NO: 465 - DNA, 1315 bp, Homo sapiens
  source (1)..(1315)
  CDS (201)..(1115)
aattatggctgaaatattttatataaaaaacaactatttgatattaagctataaaatatttaattaataaaaatattacttagctaatttacccagagttaaattattatatataaaccaaaggtcatctaaatcatgaatcctcagcatgggataccctcctccaaaagtagaatagcaactcaatccctacaaacaccatggtttttctttcctccgtagaaactgaccaaaggaaaatgtcagcaggaaaccattcctcagtgactgagttcattctggctgggctctcagaacagccagagctccagctgcgcctcttcctcctgttcttaggaatctatgtggtcacagtggtgggcaacttgagcatgatcacactgattgggctcagttctcacctgcatacccccatgtactatttcctcagtggtctgtccttcattgatatctgccattccactatcattacccccaaaatgctggtgaactttgtgacagagaagaacatcatctcctaccctgaatgcatgactcagctttacttcttcctcatttttgctattgcagagtgtcacatgttggctgtaacggcatatgaccgctatgttgccatctgcagccccttgctgtacaatgtcatcatgtcctatcaccactgcttctggctcacagtgggagtttacattttaggcatccttggatctacaattcacaccggctttatgttgagactctttttgtgcaagactaatgtgattaaccattatttttgtgatctcttccctctcttggggctctcctgctccagcacctacatcaatgaattactggttctggtcttgagtgcatttaacatcctgacgcctgccttaaccatccttgcttcttacatctttatcattgccagcatcctccgcattcgctccactgagggcaggtccaaagccttcagcacttgcagctcccacatcttggctgttgctgttttctttgggtctgcagcattcatgtacctgcagccatcatctgtcagctccatggaccaggggaaagtgtcctctgtgttttatactattgttgtgcccatgctgaacccccaatctatagcctaagaaataaggatgtcaaatttgccctgaagaaaaatctggacagcaaagcatgttcatgaatccaattattgccatgttgtcatatcaaaacaggctttcagtttgattagatatgtaatatgttagatttattgtgcaaatttatcaaaatatagtgatgctcttttatgtaacacacctccaaaatattccttcagtct

SEQ ID NO: 466 - protein, 304 aa, Homo sapiens
MVFLSSVETDQRKMSAGNHSSVTEFILAGLSEQPELQLRLFLLFLGIYVVTVVGNLSMITLIGLSSHLHTPMYYFLSGLSFIDICHSTIITPKMLVNFVTEKNIISYPECMTQLYFFLIFAIAECHMLAVTAYDRYVAICSPLLYNVIMSYHHCFWLTVGVYILGILGSTIHTGFMLRLFLCKTNVINHYFCDLFPLLGLSCSSTYINELLVLVLSAFNILTPALTILASYIFIIASILRIRSTEGRSKAFSTCSSHILAVAVFFGSAAFMYLQPSSVSSMDQGKVSSVFYTIVVPMLNPQSIA

SEQ ID NO: 467 - DNA, 1318 bp, Homo sapiens
  source (1)..(1318)
  CDS (201)..(1118)
agatagaattatgatcttgttgaattctgaatgtctttaagtaatagattatagaaagtcactgtaagagtgagcagaatgatataaaatgaggctttgaatttgaatataataattctgacttccttctccttctcttcttcaaggtaactgcagaggctatttcctggaatgaatcaacgagtgaaacgaataactctatggtgactgaattcatttttctgggtctctctgattctcaggaactccagaccttcctatttatgttgttttttgtattctatggaggaatcgtgtttggaaaccttcttattgtcataacagtggtatctgactcccaccttcactctcccatgtacttcctgctagccaacctctcactcattgatctgtctctgtcttcagtcacagcccccaagatgattactgactttttcagccagcgcaaagtcatctctttcaagggctgccttgttcagatatttctccttcacttctttggtgggagtgagatggtgatcctcatagccatgggctttgacagatatatagcaatatgcaagcccctacactacactacaattatgtgtggcaacgcatgtgtcggcattatggctgtcacatggggaattggctttctccattcggtgagccagttggcgtttgccgtgcacttactcttctgtggtcccaatgaggtcgatagtttttattgtgaccttcctagggtaatcaaacttgcctgtacagatacctacaggctagatattatggtcattgctaacagtggtgtgctcactgtgtgttcttttgttcttctaatcatctcatacactatcatcctaatgaccatccagcatcgccctttagataagtcgtccaaagctctgtccactttgactgctcacattacagtagttcttttgttctttggaccatgtgtctttatttatgcctggccattccccatcaagtcattagataaattccttgctgtattttattctgtgatcacccctctcttgaacccaattatatacacactgaggaacaaagacatgaagacggcaataagacagctgagaaaatgggatgcacattctagtgtaaagttttagatcttatataactgtgagattaatctcagataatgacacaaaatatagtgaagttggtaagttatttagtaaagctcatgaaaattgtgccctccattcccatataatttagtaattgtctaggaacttccacatacattgcctcaatttatctttcaacaacttgtgtgttatattttggaatacagatacaaagttat

SEQ ID NO: 468 - protein, 305 aa, Homo sapiens
MVTEFIFLGLSDSQELQTFLFMLFFVFYGGIVFGNLLIVITVVSDSHLHSPMYFLLANLSLIDLSLSSVTAPKMITDFFSQRKVISFKGCLVQIFLLHFFGGSEMVILIAMGFDRYIAICKPLHYTTIMCGNACVGIMAVTWGIGFLHSVSQLAFAVHLLFCGPNEVDSFYCDLPRVIKLACTDTYRLDIMVIANSGVLTVCSFVLLIISYTIILMTIQHRPLDKSSKALSTLTAHITVVLLFFGPCVFIYAWPFPIKSLDKFLAVFYSVITPLLNPIIYTLRNKDMKTAIRQLRKWDAHSSVKF

SEQ ID NO: 469 - DNA, 1339 bp, Homo sapiens
  source (1)..(1339)
  CDS (201)..(1139)
aaaaatttgaatcactatacatagattgtctagcacatatatgagccacttctaaagtaaatgttctttctttatttaagtacagggtaaccctaaatgtcccatgctgttctggatactggatcatgaaggaatcattccttttccatcagagtaatatcttgttctgcaactaaggaattatatatacctgagtaaaaatgagaggctggaatcatacaggtgcaaaggaattcctcctggtagggttaactgaaaatcctaatttgcagatcccactctttttgcttgtcactctgatttatttcatcactttgttggataatttgggtataattattttaatctggttaaatgcccaacttcatactccaatgtacttcttccttggcaacctctccttttgtgatatctgctactctactgtctttgctcctaagatgctagtcaatttcctatcaaaacataagtccagtacattttctggctgtgttctacagagtttcccttttgcagtatatgtaaccacaaaggacattctcctgtccatgatggcttatgaccattacgtggccatagctaatcccttgttgtatacagtcattatggcccaaaaagtttgtattcagatggtccttgcttcttacttaggtgggctcattaattccctgacacacacaataggtttgctcaaattagacttctgtggtcctaatattgtgaatcattatttctgtgatgttcctcctcttctgaggctttcttgctctgatgctcatatcaatgaaatgctgcccttggtcttctctgggctcattgcaatgttcactttcattgtcattatggtgtcttatatctgcatcatcattgccatccagagaatccatgcagctgagggaaggtacaaagccttctccacttgtgtctcccacctaaccacggtgaccttattctatgggtctgtttcttttagttatatccagccaagttctcagtattccttggaacaggagaaggtcttggctgtgttttatacactggtgatccccatgctaaacccacttatttatagcctgagaaataaggatgtaaaagatgcagccaaaaggttgatatggtgggggaaaaaccccacttgactcagtcctgcatatagctttgttaacctaacatttacctgcaaatatatggcctatctttaaaatgatatcaaacaattataaataaaactatactccagatgctcttgtacagtttggatcaggaatgatgagtttgacttgaagactgaaaatcactttatttcacaatttattgtgttgatgacttaataaaatca

SEQ ID NO: 470 - protein, 312 aa, Homo sapiens
MRGWNHTGAKEFLLVGLTENPNLQIPLFLLVTLIYFITLLDNLGIIILIWLNAQLHTPMYFFLGNLSFCDICYSTVFAPKMLVNFLSKHKSSTFSGCVLQSFPFAVYVTTKDILLSMMAYDHYVAIANPLLYTVIMAQKVCIQMVLASYLGGLINSLTHTIGLLKLDFCGPNIVNHYFCDVPPLLRLSCSDAHINEMLPLVFSGLIAMFTFIVIMVSYICIIIAIQRIHAAEGRYKAFSTCVSHLTTVTLFYGSVSFSYIQPSSQYSLEQEKVLAVFYTLVIPMLNPLIYSLRNKDVKDAAKRLIWWGKNPT

SEQ ID NO: 471 - DNA, 1306 bp, Homo sapiens
  source (1)..(1306)
  CDS (201)..(1106)
taaatcagtttattatctagaaacagagcaagtactggtgaaaatgacttaagagcttaagtaagtatattcctgtatctcatttagttaacccaagaggaaaatattgttcaaaatatggatgaattaactgtcttgaatttgctatatctgcagatggagagcaaactaaaagagaaaaatcaaatgtgactacaataatggaatttgttcttttggggttttctgatattcccaatctccactggatgctttttagtatatttttacttatgtatttgatgatcctgatgtgcaatggcatcataatactactaataaaaattcaccccgctctccagactcccatgtatttttttcttagcaatttttcccttttggaaatctgttatgtaacaatcattatcccaagaatgctcatggacatttggactcagaaaggaaatatttctttgtttgcttgtgctacacaaatgtgtttttttcttatgcttggaggcacggagtgtctccttctgacagtgatggcctatgaccgctacgtggctatttgtaagcctttgcagtatcctctagtgatgaaccacaaagtctgcattcagctgataatagcttcctggaccatcacaattcctgtagtaattggggaaacatgccaaattttccttttgcccttttgcggaactaacacaattaatcatttcttttgtgacatcccgccaatactcaagcttgcttgtggaaacatatttgtgaatgagataacagtccatgtagtagcggtggtgtttatcacggtgccatttctgttgattgttgtctcttatggcaaaattatctccaacattttgaaattgtcatcagccagaggaaaggctaaagccttctccacctgctcatctcacctaatagttgtaatcttattctttggagcaggtactatcacttatttacagcccaaaccacatcagtttcaaaggatggggaaactgatttctcttttctacaccattctgattccaactttgaatcctattatatataccctgaggaacaaagatatcatggtggcattgagaaaattactagctaagttattaacatgagatgaagacttgaaattacagaaataatttctttataggtttgtcatgtggcttcagtgaatttttttttaactttgtccctatggtattcaataatgagtactgaaatttaaatacaaacttacattatgtcaaggggtgttttattcacagaatatagttatgtgctactgtgcagttggagcacaatttaactaagg

SEQ ID NO: 472 - protein, 301 aa, Homo sapiens
MEFVLLGFSDIPNLHWMLFSIFLLMYLMILMCNGIIILLIKIHPALQTPMYFFLSNFSLLEICYVTIIIPRMLMDIWTQKGNISLFACATQMCFFLMLGGTECLLLTVMAYDRYVAICKPLQYPLVMNHKVCIQLIIASWTITIPVVIGETCQIFLLPFCGTNTINHFFCDIPPILKLACGNIFVNEITVHVVAVVFITVPFLLIVVSYGKIISNILKLSSARGKAKAFSTCSSHLIVVILFFGAGTITYLQPKPHQFQRMGKLISLFYTILIPTLNPIIYTLRNKDIMVALRKLLAKLLT

SEQ ID NO: 473 - DNA, 1333 bp, Homo sapiens
  source (1)..(1333)
  CDS (201)..(1133)
ttttttttaatacagtaataatgcctctttgaaagtgacactcacctgggatactttttgagggtaaagaagataatttacataaaccaatcttgttctactttacagataattttttttttgatatcttggaaagtcaagttctagcctgtcattctcgtaatgatttctgtagcagtttgaaacaagaacaaggaagaatggactgggaaaattgctcctcattaactgatttttttctcttgggaattaccaataacccagagatgaaagtgaccctatttgctgtattcttggctgtttatatcattaatttctcagcaaatcttggaatgatagttttaatcagaatggattaccaacttcacacaccaatgtatttcttcctcagtcatctgtctttctgtgatctctgctattctactgcaactgggcccaagatgctggtagatctacttgccaagaacaagtcaatacccttctatggctgtgctctgcaattcttggtcttctgtatctttgcagattctgagtgtctactgctgtcagtgatggcctttgatcggtacaaggccatcatcaaccccctgctctatacagtcaacatgtctagcagagtgtgctatctactcttgactggggtttatctggtgggaatagcagatgctttgatacatatgacactggccttccgcctatgcttctgtgggtctaatgagattaatcatttcttctgtgatatccctcctctcttattactctcttgctcagatacacaggtcaatgagttagtgttattcaccgtctttggttttattgaactgagtaccatttcaggagttttcatttcttattgttatatcatcctatcagtcttggagatacactctgctgaggggaggttcaaagctctctctacatgcacttcccacttatctgcggttgcaattttccagggaactctgctctttatgtatttccggccaagttcttcctattctctagatcaagataaaatgacctcattgttttacacccttgtggttcccatgttgaaccccctgatttatagcctgaggaacaaggatgtgaaagaggccctgaaaaaactgaaaaatgaaattttattttaaggaaatagtaaaaatacatgtttatacacacaaaaatgcatattcatactggtgttttcttcaaattatatattataacataaagttgtctcaaataccctaatttaatataatacatattttactcagccacaatctagcaattctctggaattgtctaaatatgctatttttttaatgtgttttcaatttaggtaagg

SEQ ID NO: 474 - protein, 310 aa, Homo sapiens
MDWENCSSLTDFFLLGITNNPEMKVTLFAVFLAVYIINFSANLGMIVLIRMDYQLHTPMYFFLSHLSFCDLCYSTATGPKMLVDLLAKNKSIPFYGCALQFLVFCIFADSECLLLSVMAFDRYKAIINPLLYTVNMSSRVCYLLLTGVYLVGIADALIHMTLAFRLCFCGSNEINHFFCDIPPLLLLSCSDTQVNELVLFTVFGFIELSTISGVFISYCYIILSVLEIHSAEGRFKALSTCTSHLSAVAIFQGTLLFMYFRPSSSYSLDQDKMTSLFYTLVVPMLNPLIYSLRNKDVKEALKKLKNEILF

SEQ ID NO: 475 - DNA, 1339 bp, Homo sapiens
  source (1)..(1339)
  CDS (201)..(1139)
ctcagaattcaagaaagaagattatttacctgaagaacaacatcagtagttgtctgtattttatccttgtgcatgtgtatgtgtataaaatatgtatcaatttaaatactttatatatgtaatatatatgtattttccccctgacaaattatgagtctatctttttttcacagtagattttgtgaaaaagaaagaaacatatggctgatgataattttacagttgtcactgagtttattcttttgggattgacagatcatgctgaactaaaagctgtgctttttgtggtgttcctggtgatttacgccattaccttgttgaggaatctgggcatgatcctcttaatccaaatcacctccaaactccacacacccatgtactttttactcagctgtctttcatttgtggatgcctgctattcatctgcaattgcacccaaaatgctggtgaacctcctggttgtgaaggcaacaatttctttctctgcttgcatggtacagcatttgtgtttcggagtgttcatcaccacagaaggcttcttactgtcagtgatggcctatgaccgctatgtggccattgtgagtcccttgctttacactgtagccatgtctgatagaaagtgtgtggagcttgtcacaggatcatggataggtggaatagttaacacattaatccacacaatcagcttgaggagactgtccttttgtaggctaaatgctgtcagccacttcttctgtgacattccttcactgctaaagctgtcatgttctgacacctccatgaatgagttgttgctgttaaccttctccggagtcattgccatggccaccttcttgactgtgatcatttcctacatcttcattgcttttgctagcctaaggatccactcagcatcaggcagacagcaagccttctccacctgtgcctctcacctgactgctgtgaccatattctatggtaccttaatctttagctacattcagccaagctcccagtattttgtggaacaagagaaagtggtttctatgttctatacgctagggattcccatgttaaacctgttgatacacagtttgagaaacaaggacgtaaaggaggcagtgaaaagggccatagaaatgaaacatttcctctgttaatttcaagtcactattaatcctacaacattctgtcattcagttctcacttccaagaattccgtgaatgccaaagcttctcaagactttacagatattctcattctatatacttttgttgcatttcaggaggcagccagaagagaaaacttaattcacatacctgcaacacaaaaacaacaatctatcacttagttatgctg

SEQ ID NO: 476 - protein, 312 aa, Homo sapiens
MADDNFTVVTEFILLGLTDHAELKAVLFVVFLVIYAITLLRNLGMILLIQITSKLHTPMYFLLSCLSFVDACYSSAIAPKMLVNLLVVKATISFSACMVQHLCFGVFITTEGFLLSVMAYDRYVAIVSPLLYTVAMSDRKCVELVTGSWIGGIVNTLIHTISLRRLSFCRLNAVSHFFCDIPSLLKLSCSDTSMNELLLLTFSGVIAMATFLTVIISYIFIAFASLRIHSASGRQQAFSTCASHLTAVTIFYGTLIFSYIQPSSQYFVEQEKVVSMFYTLGIPMLNLLIHSLRNKDVKEAVKRAIEMKHFLC

SEQ ID NO: 477 - DNA, 1336 bp, Homo sapiens
  source (1)..(1336)
  CDS (201)..(1136)
tttacatgaaacacatttattatatttgaaaataagattaaataaatattatttgaggtaaactttacttactcaaaggggatacctaaagcatgaatatctgggaaccttttctcaatgaagaataataaagtccctcccacaaccatggggtttttttgttttgttttttctcttcctgcagaaactgactggaggagatgtcaggagaaaataattcctcagtgactgagttcattctggctgggctctcagaacagccagagctccagctgcccctcttcctcctgttcttaggaatctatgtggtcacagtggtgggcaacctgggcatgaccacactgatttggctcagttctcacctgcacacccctatgtactatttcctcagcagtctgtccttcattgacttctgccattccactgtcattacccctaagatgctggtgaactttgtgacagagaagaacatcatctcctaccctgaatgcatgactcagctctacttcttcctcgtttttgctattgcagagtgtcacatgttggctgcaatggcgtatgaccgttacatggccatctgtagccccttgctgtacagtgtcatcatatccaataaggcttgcttttctctgattttaggggtgtatataataggcctggtttgtgcatcagttcatacaggctgtatgtttagggttcaattctgcaaatttgatttgattaaccattatttctgtgatcttcttcccctcctaaagctctcttgctctagtatctatgtcaacaaactacttattctatgtgttggtgcatttaacatccttgtccccagcctgaccatcctttgctcttacatctttattattgccagcatcctccacattcgctccactgagggcaggtccaaagccttcagcacttgtagctcccacatgttggcggttgtaatcttttttggatctgcagcattcatgtacttgcagccatcttcaatcagctccatggaccaggggaaagtatcctctgtgttttatactattattgtgcccatgttgaaccctctgatttatagcctgaggaataaagatgtccatgtttccctgaagaaaatgctacagagaagaacattattgtaaacagtaataataagaagatgatatattaatcctaagtagtggactgttacattgtatgaatggatgtctttcactttaatgcatctgtcaataatttttaccatttggtgagattatattaccattattttttcatttcatgaccctttgatgtcatttcccatgtggggttttaactcatatgtatcaatgagacacaa

SEQ ID NO: 478 - protein, 311 aa, Homo sapiens
MSGENNSSVTEFILAGLSEQPELQLPLFLLFLGIYVVTVVGNLGMTTLIWLSSHLHTPMYYFLSSLSFIDFCHSTVITPKMLVNFVTEKNIISYPECMTQLYFFLVFAIAECHMLAAMAYDRYMAICSPLLYSVIISNKACFSLILGVYIIGLVCASVHTGCMFRVQFCKFDLINHYFCDLLPLLKLSCSSIYVNKLLILCVGAFNILVPSLTILCSYIFIIASILHIRSTEGRSKAFSTCSSHMLAVVIFFGSAAFMYLQPSSISSMDQGKVSSVFYTIIVPMLNPLIYSLRNKDVHVSLKKMLQRRTLL

SEQ ID NO: 479 - DNA, 1315 bp, Homo sapiens
  source (1)..(1315)
  CDS (201)..(1115)
taattatggctgaaatattttatataaaaaacaactatttgatattaagctataaaatatttaattaataaaaatattacttagctaatttacccagagttaaattattatatataaaccaaagtcatctaaatcatgaatcctcagcatgggataccctcctccaaaagtagaatagcaactcaatccctacaaacaccatggtttttctttcctccgtagaaactgaccaaaggaaaatgtcagcaggaaaccattcctcagtgactgagttcattctggctgggctctcagaacagccagagctccagctgcgcctcttcctcctgttcttaggaatctatgtggtcacagtggtgggcaacttgagcatgatcacactgattgggctcagttctcacctgcatacccccatgtactatttcctcagtggtctgtccttcattgatctctgccattccactatcattacccccaaaatgctggtgaactttgtgacagagaagaacatcatctcctaccctgaatgcatgactcagctttacttcttcctcatttttgctattgcagagtgtcacatgttggctgtaacggcatatgaccgctatgttgccatctgcagccccttgctgtacaatgtcatcatgtcctatcaccactgcttctggctcacagtgggagtttacgttttaggcatccttggatctacaattcacaccggctttatgttgagactctttttgtgcaagactaatgtgattaaccattatttttgtgatctcttccctctcttggggctctcctgctccagcacctacatcaatgaattactggttctggtcttgagtgcatttaacatcctgacgcctgccttaaccatccttgcttcttacatctttatcattgccagcatcctccgcattcgctccactgagggcaggtccaaagccttcagcacttgcagctcccacatcttggctgttgctgttttctttgggtctgcagcattcatgtacctgcagccatcatctgtcagctccatggaccagaggaaagtgtcctctgtgttttatactactattgtgcccatgctgaacccccaatctatagcctaagaaataaggatgtcaaatttgccctgaagaaaaatctggacagcaaagcatgttcatgaatccaattattgccatgttgtcatatcaaaacaggctttcagtttgattagatatgtaatatgttagatttattgtgcaaatttatcaaaatatagtgatgctcttttatgtaacacacctccaaaatattccttcagtct

SEQ ID NO: 480 - protein, 304 aa, Homo sapiens
MVFLSSVETDQRKMSAGNHSSVTEFILAGLSEQPELQLRLFLLFLGIYVVTVVGNLSMITLIGLSSHLHTPMYYFLSGLSFIDLCHSTIITPKMLVNFVTEKNIISYPECMTQLYFFLIFAIAECHMLAVTAYDRYVAICSPLLYNVIMSYHHCFWLTVGVYVLGILGSTIHTGFMLRLFLCKTNVINHYFCDLFPLLGLSCSSTYINELLVLVLSAFNILTPALTILASYIFIIASILRIRSTEGRSKAFSTCSSHILAVAVFFGSAAFMYLQPSSVSSMDQRKVSSVFYTTIVPMLNPQSIA

SEQ ID NO: 481 - DNA, 1579 bp, Homo sapiens
  source (1)..(1579)
  CDS (201)..(1379)
ctcatcccctggaggacaccggacaccctgtggatgcccttcatggttattgggtcccttggagaagtccaggtggtgaaaaataggacacagctttgagagatgagggagactggtggtgacaggctcaggagggcattccagacccagtgttacaggctgagacctagaatctatatcatcagaggttagtgcttaacatgtatctgggtggggagctgcttttgctccccactggtgctctggggagccacgtggcctctctttacaccaaaactccctatccaggtccagctccactctccctctgccccagcttccctgcagccctttcctcttgctctttgatgttttgtaggcctgcagctcccaagcacagaggcatgagtggggagaatgtcaccagggtcggcaccttcatcctggtgggcttccccacggccccagggctgcagtacctgctcttcctcctcttcctgctcacctacctctttgtcctggtggagaacctggccatcatcctcaccgtctggagcagcacctccctccacaggcccatgtactactttctgagctccatgtctttcctagagatctggtacgtgtctgacatcacccccaagatgctggagggcttcctcctccagcagaaacgcatctctttcgtcgggtgcatgacgcagctctacttcttcagctccctggtgtgcaccgagtgtgtgcttctggcctccatggcctacgaccgctacgtggccatctgccacccgctgcgctaccacgtccttgtgaccccggggctgtgcctccagctggtgggcttctcctttgtgagtggcttcaccatctccatgatcaaggtctgttttatctccagcgtcacgttctgtggctccaacgtcttgaaccacttcttctgtgacatttcccccatcctcaagctggcctgcacggacttctccactgcagagctggtggatttcattctggccttcatcatcctggtgtttccactcctggccaccatgctgtcatatgcgcacatcaccctggctgtcctgcgcatcccctcggccaccggctgctggagagccttcttcacctgcgcctctcacctcaccgtggtcaccgtcttctatacagccttgcttttcatgtatgtccggccccaggccattgattcccggagctccaacaagctcatctctgttttgtacacagttatcacccccatcttgaaccccttgatatactgcctgaggaataaggaatttaagaatgccttgaaaaaagccttcggcttgacgagctgcgccgtagaggggaggctttctagtcttctggaacttcatctccaaatacacagccagcctctctgaggaggccatttgactgtttgcattattgtagtaccgcatttatttaaaaattacttccaaatctatttttctccttcaggaaaaaaactgaggttgaggttaatagcataggtattgttgttggtgttgtaataccagtactttcttgtttttgtagatgagcaaagctgtagttagtaaagcttaatgaattttcctcg

SEQ ID NO: 482 - protein, 392 aa, Homo sapiens
MYLGGELLLLPTGALGSHVASLYTKTPYPGPAPLSLCPSFPAALSSCSLMFCRPAAPKHRGMSGENVTRVGTFILVGFPTAPGLQYLLFLLFLLTYLFVLVENLAIILTVWSSTSLHRPMYYFLSSMSFLEIWYVSDITPKMLEGFLLQQKRISFVGCMTQLYFFSSLVCTECVLLASMAYDRYVAICHPLRYHVLVTPGLCLQLVGFSFVSGFTISMIKVCFISSVTFCGSNVLNHFFCDISPILKLACTDFSTAELVDFILAFIILVFPLLATMLSYAHITLAVLRIPSATGCWRAFFTCASHLTVVTVFYTALLFMYVRPQAIDSRSSNKLISVLYTVITPILNPLIYCLRNKEFKNALKKAFGLTSCAVEGRLSSLLELHLQIHSQPL

SEQ ID NO: 483 - DNA, 1345 bp, Homo sapiens
  source (1)..(1345)
  CDS (201)..(1145)
caacacacatgtgtttcagtttccttttctataagttgggagctaataataatagtgcaactccatataactgttggggttgaatgaataaaataaatataaaaagcatagaagaatgcttagcttctagtaagttctcccttaatatcagctgttattattattattaggattgatatttctgttcagcagcagtagagatggatggaaccaatggcagcacccaaacccatttcatcctactgggattctctgaccgaccccatctggagaggatcctctttgtggtcatcctgatcgcgtacctcctgaccctcgtaggcaacaccaccatcatcctggtgtcccggctggacccccacctccacacccccatgtacttcttcctcgcccacctttccttcctggacctcagtttcaccaccagctccatcccccagctgctctacaaccttaatggatgtgacaagaccatcagctacatgggctgtgccatccagctcttcctgttcctgggtctgggtggtgtggagtgcctgcttctggctgtcatggcctatgaccggtgtgtggctatctgcaagcccctgcactacatggtgatcatgaaccccaggctctgccggggcttggtgtcagtgacctggggctgtggggtggccaactccttggccatgtctcctgtgaccctgcgcttaccccgctgtgggcaccacgaggtggaccacttcctgcgtgagatgcccgccctgatccggatggcctgcgtcagcactgtggccatcgaaggcaccgtctttgtcctgaaaaaaggtgttgtgctgtcccccttggtgtttatcctgctctcttacagctacattgtgagggctgtgttacaaattcggtcagcatcaggaaggcagaaggccttcggcacctgcggctcccatctcactgtggtctcccttttctatggaaacatcatctacatgtacatgcagccaggagccagttcttcccaggaccagggcatgttcctcatgctcttctacaacattgtcacccccctcctcaatcctctcatctacaccctcagaaacagagaggtgaagggggcactgggaaggttgcttctggggaagagagagctaggaaaggagtaaaggcatctccacctgacttcacttccatccagggccactggcagcatctggaacggctgaattccagctgatattagcccacgactcccaacttgcctttttctggacttttgtgaggctgtttcagttctgacattatgtgtttttgttgttgctcttaaaattgagacggggtctcactctgtcacctagggtagagt

SEQ ID NO: 484 - protein, 314 aa, Homo sapiens [sequence omitted]

SEQ ID NO: 485 - DNA, 1408 bp, Homo sapiens
  source (1)..(1408)
  CDS (201)..(1208)
tgtctatacattaggtaattcttccaaaaagttataaaaatttgcatcccagtaacagtatgcgagaatgtgtttgccattttgtaccagaaagcactttgtgctctaaacatgtagatagttgccaaacatgtaagtgaatatttatttctgaatgccatgtcattttactttctcttaagggaagtcaacattattacatgaacatttcagatgtcatctcctttgatattttggtttcagccatgaaaacaggaaatcaaagttttgggacagattttctacttgttggtcttttccaatatggctggataaactctcttctctttgtcgtcattgccaccctctttacagttgctctgacaggaaatatcatgctgatccacctcattcgactgaacaccagactccacactccaatgtactttctgctcagtcagctctccatcgttgacctcatgtacatctccaccacagtgcccaagatggcagtcagcttcctctcacagagtaagaccattagatttttgggctgtgagattcaaacgtatgtgttcttggcccttggtggaactgaagcccttctccttggttttatgtcttatgatcgctatgtagctatctgtcaccctttacattatcctatgcttatgagcaagaagatctgctgcctcatggttgcatgtgcatgggccagtggttctatcaatgctttcatacatacattgtatgtgtttcagcttccattctgtaggtctcggctcattaaccactttttctgtgaagttccagctctactatcattggtgtgtcaggacacctcccagtatgagtatacagtcctcctgagtggacttattatcttgctactaccattcctagccattctggcttcctatgctcgtgtgcttattgtggtattccagatgagctcaggaaaaggacaggcaaaagctgtttccacttgttcctcccacctgattgtggcaagcctgttctatgcaaccactctctttacctacacaaggccacactccttgcgttccccttcacgggataaggcggtggcagtattttacaccattgtcacacctctactgaacccatttatctacagcctgagaaataaggaagtgacgggggcagtgaggagactgttgggatattggatatgctgtagaaaatatgacttcagatctctgtattgattgagcattaacaacataaaaagctgttcctgaaaactatctggaaagatataaatatgtgttttctgtatagaagtcacaaaaacagtgtttatcaatcttgtttaacttgtaaagcaatagaattcaggcttcttaaatctgtgttcccctggcattttaatgcttttacttgccctcttgaatactctgaaatgtga

SEQ ID NO: 486 - protein, 335 aa, Homo sapiens
MNISDVISFDILVSAMKTGNQSFGTDFLLVGLFQYGWINSLLFVVIATLFTVALTGNIMLIHLIRLNTRLHTPMYFLLSQLSIVDLMYISTTVPKMAVSFLSQSKTIRFLGCEIQTYVFLALGGTEALLLGFMSYDRYVAICHPLHYPMLMSKKICCLMVACAWASGSINAFIHTLYVFQLPFCRSRLINHFFCEVPALLSLVCQDTSQYEYTVLLSGLIILLLPFLAILASYARVLIVVFQMSSGKGQAKAVSTCSSHLIVASLFYATTLFTYTRPHSLRSPSRDKAVAVFYTIVTPLLNPFIYSLRNKEVTGAVRRLLGYWICCRKYDFRSLY

SEQ ID NO: 487 - DNA, 1234 bp, Homo sapiens
  source (1)..(1234)
  CDS (201)..(1034)
gggagtcttgtaatgcagccactgtggataaaagtgaattactgttcttaatttacccttttgtctcccttcaggatggattgtaggaattccttttttataattacaatcaaacatcaactgatttcatcttattggggctgttcccacaatcaagaattggccttttcgtattcaccctcatttttctcattttcctaatggctctaattggaaatctatccatgattcttctcatctttttggacatccatctccacacacctatgtatttcctacttagtcagctctccctcattgacctaaattacatctccaccattgttccaaagatggtttatgattttctgtatggaaacaagtctatctccttcactggatgtgggattcagagtttcttcttcttgactttagcagttgcagaagggctgctcctgacatcaatggcctatgatcgttatgtggccatttgctttcctctccactatcccatccgtataagcaaaagagtgtgtgtgatgatgataacaggatcttggatgataagctctatcaactcttgtgctcacacagtatatgcactctgtatcccatattgcaagtccagagccatcaatcattttttctgtgatgttccagctatgttgacgctagcctgcacagacacttgggtctatgagagcacagtgtttttgagcagcaccatctttcttgtgcttcctttcactggtattgcatgttcctatggccgggttctccttgctgtctaccgcatgcactctgcagaagggaggaagaaggcctattcaacctgtagcacccacctcactgtagtgtccttctactatgcaccctttgcttatacctatgtacgtccaagatccctgcgatctccaacagaggacaagattctggctgttttctacaccatcctcaccccaatgctcaaccccatcatctacagcctgagaaacaaggaggtgatgggggccctgacacaagtgattcagaaaatcttctcagtgaaaatgtagacatacgttctgtgttagagtcaaagcgctaggttcatatcaacttagtagtgtacagcagtgaagaaaaacattattacatgcccagtgtgtcaaacagaagttaatctagaagaaatttgtcttttaatttagtcttgacaatattataatacatattaatacatattctaagacatctattttgattttgtttgtgt

SEQ ID NO: 488 - protein, 277 aa, Homo sapiens
MALIGNLSMILLIFLDIHLHTPMYFLLSQLSLIDLNYISTIVPKMVYDFLYGNKSISFTGCGIQSFFFLTLAVAEGLLLTSMAYDRYVAICFPLHYPIRISKRVCVMMITGSWMISSINSCAHTVYALCIPYCKSRAINHFFCDVPAMLTLACTDTWVYESTVFLSSTIFLVLPFTGIACSYGRVLLAVYRMHSAEGRKKAYSTCSTHLTVVSFYYAPFAYTYVRPRSLRSPTEDKILAVFYTILTPMLNPIIYSLRNKEVMGALTQVIQKIFSVKM

SEQ ID NO: 489 - DNA, 1372 bp, Homo sapiens
  source (1)..(1372)
  CDS (201)..(1172)
agagattaattttctgtccaatatcatacagatcattaatactgaaacccaggatttcaaatgatcctgaagtaggtgatcttttcttgatctcacgctgcttctgacatactattcctggtgggctcttcctacatatcaggtcgttaaataagctgccagatttctgcctttacagcccaaggagcttgtcatggaccatgggcatggagggtcttctccagaactccactaacttcgtcctcacaggcctcatcacccatcctgccttccccgggcttctctttgcagtagtcttctccatctttgtggtggctataacagccaacttggtcatgattctgctcatccacatggactcccgcctccacacacccatgtacttcttgctcagccagctctccatcatggataccatctacatctgtatcactgtccccaagatgctccaggacctcctgtccaaggacaagaccatttccttcctgggctgtgcagttcaaatcttctacctgaccctgattggaggggaattcttcctgctgggtctcatggcctatgaccgctatgtggctgtgtgcaaccctctacggtaccctctcctcatgaaccgcagggtttgcttattcatggtggtcggctcctgggttggtggttccttggatgggttcatgctgactcctgtcactatgagtttccccttctgtagatcccgagagatcaatcactttttctgtgagatcccagccgtgctgaagttgtcttgcacagacacgtcactctatgagaccctgatgtatgcctgctgcgtgctgatgctgcttatccctctatctgtcatctctgtgtcctacacgcacatcctcctgactgtccacaggatgaactctgctgagggccggcgcaaagcctttgctacgtgttcctcccacattatggtggtgagcgttttctacggggcagccttctacaccaacgtgctgccccactcctaccacactccagagaaagataaagtggtgtctgccttctacaccatcctcacccccatgctcaacccactcatctacagcttgaggaataaagatgtggctgcagctctgaggaaagtactagggagatgtggttcctcccagagcatcagggtggcgactgtgatcaggaagggctagcagggactcccagagtatcagagtggtgactgtgatcgggaaggattagcggggactcccagagcatcaggggtggtgactgatcaggaaggactagcagggactagtgcaaacatctgcggtgctgcggccaataacgcagctattacagaaaatatggtattggttctgaagaatgttcagtgtcactttcagcaatt

SEQ ID NO: 490 - protein, 323 aa, Homo sapiens
MGMEGLLQNSTNFVLTGLITHPAFPGLLFAVVFSIFVVAITANLVMILLIHMDSRLHTPMYFLLSQLSIMDTIYICITVPKMLQDLLSKDKTISFLGCAVQIFYLTLIGGEFFLLGLMAYDRYVAVCNPLRYPLLMNRRVCLFMVVGSWVGGSLDGFMLTPVTMSFPFCRSREINHFFCEIPAVLKLSCTDTSLYETLMYACCVLMLLIPLSVISVSYTHILLTVHRMNSAEGRRKAFATCSSHIMVVSVFYGAAFYTNVLPHSYHTPEKDKVVSAFYTILTPMLNPLIYSLRNKDVAAALRKVLGRCGSSQSIRVATVIRKG

SEQ ID NO: 491 - DNA, 1339 bp, Homo sapiens
  source (1)..(1339)
  CDS (201)..(1139)
atttcgtgagacagtgttgaaagaacatatttcgttcagattctatatttcttgaccttttagtttcctacttctattcatgctgtattgatcacccaactacagaagttaccacaatcacatgatttataaggcactgagtaaagttttaccaaattaatacgctggttttgtggtactaggtaaaaagcatacacatcatggcaagggagaattcgaccttcaactccgacttcatcctcctgggaatcttcaatcacagccccacccacaccttcctcttctttctggtcctggccatcttttcagtggccttcatgggaaactctgtcatggttctcctcatctacctggacacccagctccacacccccatgtacctcctcctcagccaactgtccctcatggacctcatgctcatctgcaccaccgtacccaagatggccttcaactacctgtctggcagcaagtccatttctatggctggttgtgccacacaaattttcttctatacatcactgcttggctctgagtgctttcttttggctgttatggcttatgaccgctacactgccatttgccaccctctaagatacaccaatctcatgagccctaaaatttgtggacttatgactgccttttcctggatcctgggctctacggatggaattattgatgttgtagcaacattttccttctcctactgtgggtctcgggaaatagcccacttcttctgtgacttcccctccctactaatcctctcatgcagtgacacatcaatatttgaaaagattcttttcatctgctgtatagtaatgattgttttccctgttgcaatcatcattgcttcctatgctcgagttatcctggctgtcattcacatgggatctggagagggtcgtcgcaaagcttttactacttgttcctctcacctcttggtggtgggaatgtactatggagcagctttgttcatgtacatacggcccacatctgatcgctccccaacacaggacaagatggtgtctgtattctacaccatcctcactcccatgttgaatcccctcatctacagcctccgcaacaaggaggtgaccagagcattcatgaagatcttaggaaagggcaagtctggagagtgagttacctaataaacttcatgttttgctgtgtgctaaatcctttttttaaatggtcctatttttccattaagccttgaaaatgggattcattgtgtacataaatctgcaatgacatatttatgtgcacctatataatttatttcagataaactattataactatttattattttatattcatttctgctatgaccacaatg

SEQ ID NO: 492 - protein, 312 aa, Homo sapiens
MARENSTFNSDFILLGIFNHSPTHTFLFFLVLAIFSVAFMGNSVMVLLIYLDTQLHTPMYLLLSQLSLMDLMLICTTVPKMAFNYLSGSKSISMAGCATQIFFYTSLLGSECFLLAVMAYDRYTAICHPLRYTNLMSPKICGLMTAFSWILGSTDGIIDVVATFSFSYCGSREIAHFFCDFPSLLILSCSDTSIFEKILFICCIVMIVFPVAIIIASYARVILAVIHMGSGEGRRKAFTTCSSHLLVVGMYYGAALFMYIRPTSDRSPTQDKMVSVFYTILTPMLNPLIYSLRNKEVTRAFMKILGKGKSGE

SEQ ID NO: 493 - DNA, 1336 bp, Homo sapiens
  source (1)..(1336)
  CDS (201)..(1136)
tgaggaaataattgtaaaagcaatggactaatccacacaatttaccatgactaaaggaaggtaactgaaggttggtgagaaggccttatgcatgcatataaactgcccagtagagtatgtcacagtatgtgtttgaaaactgaattgataaataagcttgtaccttctttggaattctcagataaggcaaattatccaggatggtgtgggaaaaccagaccttcaactccatcttcatcctgctgggaatcttcaatcacagtcccacccacaccttccttttttctctggtcctgggcatcttctcactggcattgatggaaaatatttccatggttctcctcatctacatagagaaacagctccacacccccatgtacttcctcctcagtcaactgtcccttatggacctcatgctcatctgcaccactctacccaagatgatcttcagctacttgtctgggaagaaatctatctctctggcaggttgtggaactcagatattcttctatgtgtccctgcttggagctgaatgtttcttgttggctgtcatggcttatgaccgctatgtggctatatgtcaccctcttcagtacaccatcctcatgaatccgaaactctgtgtcttcatgactgttgcttcctggaccttggggtctcttgatgggatcatagtgcttgcagctgtcctgtcattttcttactgcagctctctggaaattcatcactttttctgtgatgttgctgcccttttacctctatcctgcacagaaacatctgcatttgaaagactacttgtcatttgttgtgtggtaatgctaatctttccagtttcagttatcatactttcctattcccatgtccttcgagccgtcatccacatgggctctggggaaagtcgtcgcaaggccttcactacctgctcctcccacctgtctgtggtcggactctactacggtgctgctatgttcatgtacatgagaccagcttctaaacatacgccagaccaggacaagatggtgtcggccttctacactattctcacccctatgctgaaccctctcatttatagcctccgcaacaaagaagtgttcagggcactacagaaggtactgaagaaaagaaagttaatatgaccttatcaaaatctttttgagtgcctactgtggtcaacactcattcaaaaaaactggaatctcttaaattattctatttctatttctggtaatttgtattaatattttccacttcttttcaaaattatctattcagtatattattacatatacatcgtttgtatactaagctagatttggatgttagtataagtggttta

SEQ ID NO: 494 - protein, 311 aa, Homo sapiens
MVWENQTFNSIFILLGIFNHSPTHTFLFSLVLGIFSLALMENISMVLLIYIEKQLHTPMYFLLSQLSLMDLMLICTTLPKMIFSYLSGKKSISLAGCGTQIFFYVSLLGAECFLLAVMAYDRYVAICHPLQYTILMNPKLCVFMTVASWTLGSLDGIIVLAAVLSFSYCSSLEIHHFFCDVAALLPLSCTETSAFERLLVICCVVMLIFPVSVIILSYSHVLRAVIHMGSGESRRKAFTTCSSHLSVVGLYYGAAMFMYMRPASKHTPDQDKMVSAFYTILTPMLNPLIYSLRNKEVFRALQKVLKKRKLI

SEQ ID NO: 495 - DNA, 1339 bp, Homo sapiens
  source (1)..(1339)
  CDS (201)..(1139)
tataagtgagacactgctgagagaacatatttctttatgattccataattcttaaactttgagttttataattctggccatcctgtattgatcaccaaactacagaatttaccataatcacatgctttataaggcactgggtaaatgtttatcaaattaatgaactgtttttgcggtgctaggtaacaggcatattcatcatggcatgggagaatcagaccttcaactctgacttcctcctcctgggaatcttcaatcatagccccacccacaccttcctcttctttctggtcctggccatcttttcagtggccttcatgggaaactccatcatggttctcctcatctacctggatacccagctccacacccccatgtacttcctcctcagccaactgtccctcatggacctcatgctcatctgcaccactgtacccaagatggccttcaactacttgtctggcagcaagtccatttctatggctggctgtgccacacaaattttcttctatatatcattgcttggctccgaatgctttctgttggctgttatgtcttatgaccgctacactgccatttgccaccctctaagatacaccaatctcatgagacccaaaatttgtggacttatgactgccttctcctggatcctgggctctacagatggaatcattgatgctgtagcgacattttccttctcctactgtgggtctcgggaaatagcccacttctgctgtgacttcccttccctactaatcctctcatgcaatgacacatcaatatttgaagaggttattttcatctgctgtatagtaatgcttgttttccctgttgcaatcatcatcacttcctatgctcgagttattctggctgtcattcacatgggatctggagagggacgtcgcaaagcttttactacttgttcctctcacctcatggtggtgggaatgtactatggagcaggtttgttcatgtgcattcagcccacatctcatcattctcctatgcaggacaagatggtgtctgtattctacaccatcgtcactcccatgctgaatcctctcatttatagcctccgcaacaaggaagtgaccagagcattaatgaaaatcttaggaaagggcaagtctggagattgagttacctcataaatttcatgttttgctgtctgctaacgtcttctttttattgtctctctttttctattaagtcctaaaaatatcactaattgtgtgcattgctcaacatattgatgggtaccagtataatttatttcagataaactattttagattttttaatattcaattcagttatgactacaatataaggcattttc

SEQ ID NO: 496 - protein, 312 aa, Homo sapiens
MAWENQTFNSDFLLLGIFNHSPTHTFLFFLVLAIFSVAFMGNSIMVLLIYLDTQLHTPMYFLLSQLSLMDLMLICTTVPKMAFNYLSGSKSISMAGCATQIFFYISLLGSECFLLAVMSYDRYTAICHPLRYTNLMRPKICGLMTAFSWILGSTDGIIDAVATFSFSYCGSREIAHFCCDFPSLLILSCNDTSIFEEVIFICCIVMLVFPVAIIITSYARVILAVIHMGSGEGRRKAFTTCSSHLMVVGMYYGAGLFMCIQPTSHHSPMQDKMVSVFYTIVTPMLNPLIYSLRNKEVTRALMKILGKGKSGD

SEQ ID NO: 497 - DNA, 1339 bp, Homo sapiens
  source (1)..(1339)
  CDS (201)..(1139)
gaggctgttgacaggaagggcagggagggatggaattgaaatgttgacctctcaaagcatttacttagagggctttactctggaggtgagagaagggagggcaatagtaatttgagggttgccttcttgttagaaccctatagttcaactttctttcctatccttccacacttcacatctagggacatgaatggtgagcaatggacacagggaactggagccaggtagcagaattcatcatcttgggcttcccccatctccagggtgtccagatttatctcttcctcttgttgcttctcatttacctcatgactgtgttgggaaacctgctgatattcctggtggtctgcctggactcccggcttcacacacccatgtaccactttgtcagcattctctccttctcagagcttggctatacagctgccaccatccctaagatgctggcaaacttgctcagtgagaaaaagaccatttcattctctgggtgtctcctgcagatctatttctttcactcccttggagcgactgagtgctatctcctgacagctatggcctacgataggtatttagccatctgccggcccctccactacccaaccctcatgaccccaacactttgtgcagagattgccattggctgttggttgggaggcttggctgggccagtagttgaaatttccttgatttcacgcctcccattctgtggccccaatcgcattcagcacgtcttttgtgacttccctcctgtgctgagtttggcttgcactgatacgtctataaatgtcctagtagattttgttataaattcctgcaagatcctagccaccttcctgctgatcctctgctcctatgtgcagatcatctgcacagtgctcagaattccctcagctgccggcaagaggaaggccatctccacgtgtgcctcccacttcactgtggttctcatcttctatgggagcatcctttccatgtatgtgcagctgaagaagagctactcactggactatgaccaggccctggcagtggtctactcagtgctcacacccttcctcaaccccttcatctacagcttgcgcaacaaggagatcaaggaggctgtgaggaggcagctaaagagaattgggatattggcatgagttggggctgagagtaggccaaggccgggcctgaggatatggtggccccagggatcaacagtggccagagacgagaaactaaaaattcagtgcttttctatgtggggtggtggagctgcagcaagtgctgactgacttccagtgttatagcgaccttcatactgtctgctggagccacatttggcttgagaccagagact

SEQ ID NO: 498 - protein, 312 aa, Homo sapiens
MDTGNWSQVAEFIILGFPHLQGVQIYLFLLLLLIYLMTVLGNLLIFLVVCLDSRLHTPMYHFVSILSFSELGYTAATIPKMLANLLSEKKTISFSGCLLQIYFFHSLGATECYLLTAMAYDRYLAICRPLHYPTLMTPTLCAEIAIGCWLGGLAGPVVEISLISRLPFCGPNRIQHVFCDFPPVLSLACTDTSINVLVDFVINSCKILATFLLILCSYVQIICTVLRIPSAAGKRKAISTCASHFTVVLIFYGSILSMYVQLKKSYSLDYDQALAVVYSVLTPFLNPFIYSLRNKEIKEAVRRQLKRIGILA

SEQ ID NO: 499 - DNA, 1156 bp, Homo sapiens
  source (1)..(1156)
  CDS (201)..(956)
gggatgtacaacttctgagatattgggagtgatgtcatcctctcccctctggaagttagggacaatatcacaggggtagtgtacaccctctgggatgttgggactaatatctcacagatgtctgagaattcctcctcctgggactctcagaggatccagaactgcagccggtcctcgctttgctgtccctgtccttgtccatgtatctggtcacggtgctgaggaacctgctcagcatcctggctgtcagctctgactcccccctccacacccccatgtacttcttcctctccaacctgtgctgggctgacatcggtttcacctcggccatggttcccaagatgattgtggacacgcagtcgcatagcagagtcatctctcatgcgggctgcctgacacagatgtctttcctgctccttgttgcatgtatagaaggcatgctcctgactgtgatggcctatgactgctttgtagccatctgtcgccctctgcactacccaatcatcgtgaatcctcacctctgtgtcttcttcgttttggtgtcctttttccttagcctgttggattcccagctgcacagttggattgtgttacaattaaccatcatcaagaatgtggaaatctctaatttggtctgtgacccctctcaacttctcaaacttgcctgttctgacagcgtcatcaataacatattcatatatttcgatagtactatgtttggttttcttcccatttcagggatctttttgtcttactataaaattgtcccctccattctaaggatttcatcgtcagatgggaagtataaagccttctccacctgtggctgtcatctagcagttgtttgctggttttatggaacaggcattggcttgtacctgacttcagctgggtcaccaccccccaggaatggtgtggtggcttcagtgatgtacgctgtggtcaccgcatgctgaaccttttcatctgcagcctgagaaacagggacatacaaagtgccctgcggaggctgcgcagcagagcagtcgaatatcatgatctgttccatcctttttcttgtgtgggtgagaaagggcaaccacattaaatctctacatctgcaaatcctgcccctcagtcacattctttttgtggcttgatggcttttattcctttc

SEQ ID NO: 500 - protein, 251 aa, Homo sapiens
MYLVTVLRNLLSILAVSSDSPLHTPMYFFLSNLCWADIGFTSAMVPKMIVDTQSHSRVISHAGCLTQMSFLLLVACIEGMLLTVMAYDCFVAICRPLHYPIIVNPHLCVFFVLVSFFLSLLDSQLHSWIVLQLTIIKNVEISNLVCDPSQLLKLACSDSVINNIFIYFDSTMFGFLPISGIFLSYYKIVPSILRISSSDGKYKAFSTCGCHLAVVCWFYGTGIGLYLTSAGSPPPRNGVVASVMYAVVTAC

SEQ ID NO: 501 - DNA, 1381 bp, Homo sapiens
  source (1)..(1381)
  CDS (201)..(1181)
tagtgcatgattgaataaaataatttatttaatttatttaattacagtaatgtatccacttggacccaattttatcaccacctgtgcatttgctgacaaggatttcatcttgcttttccaagaaacgaacatgaggatataattggataaacttaattttcacaggctgttgcatttagtacatataaacaatagctaaaatgtcagggttgccttcagatatggatctatacaagcttcaattaaacaattttactgaagtcaccatgtttatattaataagcttcacagaagaatttgatgtgcaagtcttcctatttttattatttttagcaatctatctattcactctaataggcaatttagggctggttgtaccgatcattggggatttctggcttcacagcccaatgtactattttcttggtgttttatcattcttggatgtctgctattctacagttgtcactccaaaaatgttggtcaatttcctggcaaaaaataaatctatttcatttcttggatgtgcaacacagatgtttcttgcttgtacttttggaaccacagaatgctttctcttggctgcaatggcttatgatcgctatgtagccatctacaaccctctcctgtattcagtgagcatgtcacccagagtctatgtgccactcatcactgcttcctatgttgctagcattttacatgctactatacatacagtggctacatttagcctgtccttctgtggatccaatgaaattaggcatgtcttttgtaatatgcctcctctgcttgctatttcttgttctgacactcacgtaatccagcttctattcttctactttgtgggctctattgagatagtcactatcctgattgtcctgatctcctatggttttattctgttggccattctgaagatgcagtctgctgaagggaggagaaaagtcttctctacatgtggagctcacctaactggagtgacaatttatcatgggacaatcctcttcatgtatgtgagaccaagttccagctacacttcggacaatgacatgatagtgtcaatattttataccattgtgattcccatgctgaatcccatcatctacagtttgcggaacaaagatgtaaaggaggcaatcaaaagattgcttgtgagaaattggttcataaataagttatagttttaaaattgagtaaagttgcaaataatattgggtgtcagtccacatctctatggtcagaaagtagagaagaaaatgtgtttcttttagttaacagtgcttgtaacttctagaatattttcaaataaagcatcaatcagcctactaattcaccattttagaaatatcaatatattgtatcatgtataaaatatggcttg

SEQ ID NO: 502 - protein, 326 aa, Homo sapiens
MSGLPSDMDLYKLQLNNFTEVTMFILISFTEEFDVQVFLFLLFLAIYLFTLIGNLGLVVPIIGDFWLHSPMYYFLGVLSFLDVCYSTVVTPKMLVNFLAKNKSISFLGCATQMFLACTFGTTECFLLAAMAYDRYVAIYNPLLYSVSMSPRVYVPLITASYVASILHATIHTVATFSLSFCGSNEIRHVFCNMPPLLAISCSDTHVIQLLFFYFVGSIEIVTILIVLISYGFILLAILKMQSAEGRRKVFSTCGAHLTGVTIYHGTILFMYVRPSSSYTSDNDMIVSIFYTIVIPMLNPIIYSLRNKDVKEAIKRLLVRNWFINKL

SEQ ID NO: 503 - DNA, 1279 bp, Homo sapiens
  source (1)..(1279)
  CDS (201)..(1079)
tttctctaccatatttaacatcatgtaggtattttcacaagactcttactgatagactttatcgtgcttataatggtttataacatgtgtttatttttgcggaggaccagagtcactgcaccagtcctgcctggggacccacgaaagtggccaacaatgtcactgagtttatattcctgggactttcccaagattctggaatgcgatggatattctttgtcttatttctcctcttctacatcgtgatcatggtgggaaatttgctcatttttcttatggtcttttctgacccccaactacacacacccatgtatttcttcctcagtaacctgtcttttgtggacattgcctattcctcggccacagcacccaagatgattgcagactttgtttctgagaaaaagactatttcctactggggctgtataactcagatgtttaccttccacttttttggttgtgctgagatttttgttttgactgtcatggcttttgatcgctatgctgctatctgccaacccctccgttacactgtcatcatgagtgctaatgcttgtactgtgctggcatcactgtcctggttgggggccctgggtcattcctttgttcagaccctcctgaccttccagctgcccttctgtaatgctcaggttatagaccattacttttgtgatgtccacccagtcctaaaacttgcctgtgctgatacaactctgataaatatgttggtagttgccaacagtggtctcatctccctgggttgtttcctcattcttttggcctcctacaaagtcattctgcttagtcttcaaaaacagtctgcagagagccgacgcaaagctctctctacctgtggatctcatctgactgtagtaactttcttctttgttccgtgtatctttatttatctccgtccatccactactttcccattggataaagctgtgtctgtgttctataccaccatcaccccaatgttgaacccactcatctatactctgaggaatgaggatgtaaagaatgccatgaggcagctatggagtagcaagatctccttgaaggaaaaacagagaggatagtttgtcagaattgcaaaatcagagaattagtggataccttcaatgatccctaatttattaataattaaaaaaatagttcctaaaaatgcagcttttataggttgtctaaacaggaaataatttgaggctattttagacaggctaaacttaaaactttccatacttggcaaggtttatcctctcttacttctagagtaaac

SEQ ID NO: 504 - protein, 292 aa, Homo sapiens
MRWIFFVLFLLFYIVIMVGNLLIFLMVFSDPQLHTPMYFFLSNLSFVDIAYSSATAPKMIADFVSEKKTISYWGCITQMFTFHFFGCAEIFVLTVMAFDRYAAICQPLRYTVIMSANACTVLASLSWLGALGHSFVQTLLTFQLPFCNAQVIDHYFCDVHPVLKLACADTTLINMLVVANSGLISLGCFLILLASYKVILLSLQKQSAESRRKALSTCGSHLTVVTFFFVPCIFIYLRPSTTFPLDKAVSVFYTTITPMLNPLIYTLRNEDVKNAMRQLWSSKISLKEKQRG

SEQ ID NO: 505 - DNA, 1381 bp, Homo sapiens
  source (1)..(1381)
  CDS (201)..(1181)
tgggactacaggcgcccgccaccgcgcccggctaattttttgtatttttagtagagacggggtttcaccttgttagccaggatggtctcgatctcctgacctcatgatccacccgcctcggcctcccaaagtgctgggattacaggcgtgagccaccgcgcccggccggaacacattttataaaagagtcctgactgataatgtgtcccttgaccttgcatgtcactggcctaatgaatgtctctgagccaaattccagctttgcttttgtaaatgaatttatactccaaggtttctcttgtgagtggacaattcagatcttcctcttctcactctttactacaatatatgcactgactataacagggaatggagccattgcttttgtcctgtggtgtgaccggcgacttcacactcccatgtacatgttcctgggaaatttctcctttttagagatatggtatgtctcttctacagttcccaagatgttggtcaacttcctttcagagaaaaaaaacatctcctttgctggatgttttctccagttttatttcttcttctctttgggtacatcagaatgcttgcttttgactgtgatggcctttgatcagtaccttgctatctgccgtcccttgctctatcctaatatcatgactgggcatctctatgccaaactggtcatactgtgctgggtttgtggatttctgtggttcctgatccccattgttctcatctctcagaagcccttctgtggcccaaacattattgaccatgttgtgtgtgacccagggccactatttgcattggattgtgtttctgccccaagaatccaactgttttgctacactctaagctcattagttatttttggtaacttcctctttattattggatcctatactcttgtcctgaaagctgtgttgggtatgccttcaagcactgggagacataaggccttctctacctgtgggtctcatttggctgtggtatcactgtgctatagccctcttatggtcatgtatgtgagcccaggactcggacattctacagggatgcagaaaattgaaactttgttctatgctatggtgaccccactcttcaatccccttatctatagcctccagaataaggagataaaggcagccctgaggaaagttctggggagttccaacataatctaaggcatattagattattcctccatgatcagatcagtacagtctaacaaagagaaatcagaattatatagttattgaaatctaaaaaatatggacctagtgatattgactatatcagcctatgaaattaaacacctgttggaccccttacaaattaaagttgccaaatcatatagataaatggaagcgtgtggtttcccttt

SEQ ID NO: 506 - protein, 326 aa, Homo sapiens
MCPLTLHVTGLMNVSEPNSSFAFVNEFILQGFSCEWTIQIFLFSLFTTIYALTITGNGAIAFVLWCDRRLHTPMYMFLGNFSFLEIWYVSSTVPKMLVNFLSEKKNISFAGCFLQFYFFFSLGTSECLLLTVMAFDQYLAICRPLLYPNIMTGHLYAKLVILCWVCGFLWFLIPIVLISQKPFCGPNIIDHVVCDPGPLFALDCVSAPRIQLFCYTLSSLVIFGNFLFIIGSYTLVLKAVLGMPSSTGRHKAFSTCGSHLAVVSLCYSPLMVMYVSPGLGHSTGMQKIETLFYAMVTPLFNPLIYSLQNKEIKAALRKVLGSSNII

SEQ ID NO: 507 - DNA, 1339 bp, Homo sapiens
  source (1)..(1339)
  CDS (201)..(1139)
gtttgaccaggaagaacagggaatgagaaggagctgctggatggtgatgagccttggaaagggaggctgggcgagcagagacagaagagaaacacctacctgctgtgacctcacaaacacccaggctgagttttgataagacaggttgaatcacactggggtgacagcctcatccctccaggtacaaacaagaacaggccatggttaaccaaagctccacaccgggcttcctccttctgggcttctctgaacacccagggctggaaaggactctcttcgtggttgtcttcacttcctacctcctaaccctagtgggcaacacactcatcatcctgctgtctgcgctggaccccaagctccactctccaatgtactttttcctctccaacctctccttcttggacctctgtttcaccacgagttgtgttccccaaatgctggtcaacctctggggcccaaagaagaccatcagcttcctggactgctctgtccagatcttcatcttcctgtccctggggacaactgagtgcatcctcttgacagtgatggcttttgatcgctacgtggctgtctgccagcccctccactatgccaccatcatccacccccgcctgtgctggcagctggcatctgtggcctgggtcattgggctagtggagtcagtggtccagacaccatccaccctgcacctgcccttctgccccgatcggcaggtggatgattttgtctgtgaggtcccagctctaattcgactctcctgtgaagacacctcctacaatgagatccaggtggctgttgccagtgtcttcatcttggttgtgcctctcagcctcatccttgtctcttacggagccattacctgggcagtgctgaggattaactctgcaaaagggcggaggaaagcttttgggacctgctcctcccatctcactgtggtcaccctcttctacagctcagtcattgctgtctacctccagcccaaaaatccctatgcccaagagaggggcaagttctttggtctcttctatgcagtgggcactccttcacttaaccctctcatatacaccctgaggaacaaggaggtaaccagggcattcaggagattgctggggaaggaaatggggctcacacaaagctgagggagagctgcttaatgtgctttaaaagagaggagattctatgtgcttttatcagaaagtttgagttccctgcccctctgccttcttcacacccattacattgtgggaatggatgaaagccacatgtctgtgtgtgtgcatgtatgtgtgcaagagacagcgactgaaatgtagtaaagggaggtatctttatgcgaaaa

SEQ ID NO: 508 - protein, 312 aa, Homo sapiens
MVNQSSTPGFLLLGFSEHPGLERTLFVVVFTSYLLTLVGNTLIILLSALDPKLHSPMYFFLSNLSFLDLCFTTSCVPQMLVNLWGPKKTISFLDCSVQIFIFLSLGTTECILLTVMAFDRYVAVCQPLHYATIIHPRLCWQLASVAWVIGLVESVVQTPSTLHLPFCPDRQVDDFVCEVPALIRLSCEDTSYNEIQVAVASVFILVVPLSLILVSYGAITWAVLRINSAKGRRKAFGTCSSHLTVVTLFYSSVIAVYLQPKNPYAQERGKFFGLFYAVGTPSLNPLIYTLRNKEVTRAFRRLLGKEMGLTQS

SEQ ID NO: 509 - DNA, 1498 bp, Homo sapiens
  source (1)..(1498)
  CDS (201)..(1298)
agtaagaaagaagcttgttactggaaaaggccaatgcagaaaagcctgaaactgagaagcgagactgactttccaaaactgaaaataattctcaatctgtaacattatctgtacactctaaggtcattttatcactatttcttttgagatattatatattctatacaaagggattttcaacaagtccccactctagaactatgagggctctgggatattcacagtggaaggggacaattggatttctttacagtcaattctctgttcttcgttcaataggtgaaagggagtgtgaacaatgtggtgaagactattggtcaaatgcacaaaagagcgagtgtgtgctgaaagaggtggaataccttgcttatgatgaggccctgggattcacacttgtcattctttctgtctttggggcatttgtggtcttggcagtcacagctgtgtatgtgatacacaggcacactcccctggtgaacgccagtgactggcagctgggctttctcattcaggtttctctgatcatcatgctgctgtcgtccatgcttttcattgacaagccacacaactggtcctgcatggctggccaggtcactctggcactgggcttttctctttgcctgtcttgccttcttggaaagactagttcactgtttttagcctacagaatttccaaatccaaaactcaacttacatccatgcaccccctttatcggaaaatcattgtgctaatctctgttctagcggagattggcatatgtacagcctacttgatattggaacctcccatggtatacaagaacatggaatctcaaaatacaaagatcattctgggatgcaatgaaatttccatagagtttttgtactcgatgtttggaattgatgccttcttagccttgctatgctttcttacaacttttgtggctcgccagttaccagataattactatgaaggaaaatgcatcacctttgggatgcttgtctttttcatcatttggatgtcttttgtccctgtttatttgagcaccaaaggcaagttcaaaatggctgtggaaatatttgcaatcttggcatccagccatggcttgttgggttgtatatttgctcctaagtgcctcattattttgctgaggccagagaggaacaccagtgaaattgtttgtggaagagtctccaccacagataattgcatccaactgacctcagcttttgtgagcagtgagcttaacaataccacagtgtcaactgttctggatgacagagttttgatttacatgtgtcctttgaagctgcaatgatgatgtggttcaacattccctttcaggatgctcctacagcagctgcctaatactctcaggtaacattgaggatttgggttctggtggtgtagtcttagcatggtatatcaaatcttgtactgtaagatagcatttagcatgaatcagaataccttttactattgaaattaaaactattttattcaagcatttcacaaata

SEQ ID NO: 510 - protein, 365 aa, Homo sapiens
MRALGYSQWKGTIGFLYSQFSVLRSIGERECEQCGEDYWSNAQKSECVLKEVEYLAYDEALGFTLVILSVFGAFVVLAVTAVYVIHRHTPLVNASDWQLGFLIQVSLIIMLLSSMLFIDKPHNWSCMAGQVTLALGFSLCLSCLLGKTSSLFLAYRISKSKTQLTSMHPLYRKIIVLISVLAEIGICTAYLILEPPMVYKNMESQNTKIILGCNEISIEFLYSMFGIDAFLALLCFLTTFVARQLPDNYYEGKCITFGMLVFFIIWMSFVPVYLSTKGKFKMAVEIFAILASSHGLLGCIFAPKCLIILLRPERNTSEIVCGRVSTTDNCIQLTSAFVSSELNNTTVSTVLDDRVLIYMCPLKLQ

SEQ ID NO: 511 - DNA, 1192 bp, Homo sapiens
  source (1)..(1192)
  CDS (201)..(992)
  modified_base (826)..(925): a, t, c, g, unknown or other
agagccttgctggctttttttttttttttttttttttttagagatttcgtagtttcctggtaaccattcagtcatctatttcaacaccctgacatgacataaaggcaggcgtggaaccacacgttcaccacacagacacacacctccttgctggagcattcactaggcgaggcgctccatcggactcactagccgcactcatgaatcggcaccatctgcaggatcactttctggaaatagacaagaagaactgctgtgtgttccgagatgacttcattgtcaaggtgttgccgccggtgttggggctggagtttatcttcgggcttctgggcaatggccttgccctgtggattttctgtttccacctcaagtcctggaaatccagccggattttcctgttcaacctggcagtggctgactttctactgatcatctgcctgcccttcctgatggacaactatgtgaggcgttgggactggaagtttggggacatcccttgccggctgatgctcttcatgttggctatgaaccgccagggcagcatcatcttcctcacggtggtggcggtagacaggtatttccgggtggtccatccccaccacgccctgaacaagatctccaatcggacagcagccatcatctcttgccttctgtggggcatcactattggcctgacagtccacctcctgaagaagaagatgccgatcccagatggcggtgcaaatttgtgcagcagcttcagcatctgccatacccttcagtggcacgaagccatgttcctcctggagttcttcctgcccctgggcatcatcctgttctgctcaannnnnnnnnnnnnnnnnnnnnnnnnnnnnnnnnnnnnnnnnnnnnnnnnnnnnnnnnnnnnnnnnnnnnnnnnnnnnnnnnnnnnnnnnnnnnnnnnnnnccaggtgcattggttcatgcctgtaatcccagcactttgggggagccaaggcaggcagatcacctgacgtaaggagtttgagaccagcctggacaaaatggtgaaaccccacttctactaaaaatacaagaaaaattagccaggcatggtggcgcgccgattgtagtcccagctactgggaaggctgggagaagaagaattgcttgaacccggtatgcggaggttgcagtgaaccaggatcacaccactgcactccagcctagatga

SEQ ID NO: 512 - protein, 263 aa, Homo sapiens
  MOD_RES (209)..(242): Variable amino acid
MNRHHLQDHFLEIDKKNCCVFRDDFIVKVLPPVLGLEFIFGLLGNGLALWIFCFHLKSWKSSRIFLFNLAVADFLLIICLPFLMDNYVRRWDWKFGDIPCRLMLFMLAMNRQGSIIFLTVVAVDRYFRVVHPHHALNKISNRTAAIISCLLWGITIGLTVHLLKKKMPIPDGGANLCSSFSICHTLQWHEAMFLLEFFLPLGIILFCSXXXXXXXXXXXXXXXXXXXXXXXXXXXXXXXXXXQVHWFMPVIPALWGSQGRQIT

SEQ ID NO: 513 - DNA, 1507 bp, Homo sapiens
  source (1)..(1507)
  CDS (201)..(1307)
ttttcctcacttttaccctttctctctcactttctttgagttttagcatgttttattttaataagtaaccaatgtaacaatcatctatatctattctctagtcagaactattaaagaagacgaatctcatttgtagtattgtggactatcacctagtttaaatgttgacaatgtaactgcgtctcctctgtcttttagatatgcctcactgccttttatgcaacaacaaaactcactgggcccctgttaggagcactatgtgctttgaaaaggaagtggaatatctcaactggaatgactccttggccatcctactcctgattctctccctactgggaatcatatttgttctggttgttggcataatatttacaagaaacctgaacacacctgttgtgaaatcatccgggggattaagagtctgctatgtgatccttctctgtcatttcctcaattttgccagcacgagctttttcattggagaaccacaagacttcacatgtaaaaccaggcagacaatgtttggagtgagctttactctttgcatctcctgcattttgacgaagtctctgaaaattttgctagccttcagctttgatcccaaattacagaaatttctgaagtgcctctatagaccgatccttattatcttcacttgcacgggcatccaggttgtcatttgcacactctggctaatctttgcagcacctactgtagaggtgaatgtctccttgcccagagtcatcatcctggagtgtgaggagggatccatacttgcatttggcaccatgctgggctacattgccatcctggccttcatttgcttcatatttgctttcaaaggcaaatatgagaattacaatgaagccaaattcattacatttggcatgctcatttacttcatagcttggatcacattcatccctatctatgctaccacatttggcaaatatgtaccagctgtggagattattgtcatattaatatctaactatggaatcctgtattgcacattcatccccaaatgctatgttattatttgtaagcaagagattaacacaaagtctgcctttctcaagatgatctacagttattcttcccatagtgtgagcagcattgccctgagtcctgcttcactggactccatgagcggcaatgtcacaatgaccaatcccagctctagtggcaagtctgcaacctggcagaaaagcaaagatcttcaggcacaagcatttgcacacatatgcagggaaaatgccacaagtgtatctaaaactttgcctcgaaaaagaatgtcaagtatatgaataagccttaggagatgccacattccagaataaaatgtttccagggtctttgcatctaagatataaatttactttcccagcaaatatgtcatatatatttccttgccaccatctttaccaagttttagttgaacagtcactctgttcaatcacctatttaacaaatagaattgagccttcagcctgaagctcccttcatt

SEQ ID NO: 514 - protein, 368 aa, Homo sapiens
MPHCLLCNNKTHWAPVRSTMCFEKEVEYLNWNDSLAILLLILSLLGIIFVLVVGIIFTRNLNTPVVKSSGGLRVCYVILLCHFLNFASTSFFIGEPQDFTCKTRQTMFGVSFTLCISCILTKSLKILLAFSFDPKLQKFLKCLYRPILIIFTCTGIQVVICTLWLIFAAPTVEVNVSLPRVIILECEEGSILAFGTMLGYIAILAFICFIFAFKGKYENYNEAKFITFGMLIYFIAWITFIPIYATTFGKYVPAVEIIVILISNYGILYCTFIPKCYVIICKQEINTKSAFLKMIYSYSSHSVSSIALSPASLDSMSGNVTMTNPSSSGKSATWQKSKDLQAQAFAHICRENATSVSKTLPRKRMSSI

SEQ ID NO: 515 - DNA, 1321 bp, Homo sapiens
  source (1)..(1321)
  CDS (201)..(1121)
ataatctttacagattacaatactgtgatgagactgttcctgtaacttttgatccacacacagaatttcttggtcctcagaagaaaacagaacaagtccaaagagacattggattttggtgtccaaggcatcttaagacttctgggggacaaggatataagtttctgggaattgaccagtgtgcgcctccatgccccaacatgtattttaaaagtgatgagctagagtttgcaaaaagttttattggaacagtttcaatattttgtctttgtgcaactctgttcacattccttacttttttaattgatgttagaagattcagatacccagagagaccaattatatattactctgtctgttacagcattgtatctcttatgtacttcattggatttttgctaggcgatagcacagcctgcaataaggcagatgagaagctagaacttggtgacactgttgtcctaggctctcaaaataaggcttgcaccgttttgttcatgcttttgtattttttcacaatggctggcactgtgtggtgggtgattcttaccattacttggttcttagctgcaggaagaaaatggagttgtgaagccatcgagcaaaaagcagtgtggtttcatgctgttgcatggggaacaccaggtttcctgactgttatgcttcttgctatgaacaaagttgaaggagacaacattagtggagtttgctttgttggcctttatgacctggatgcttctcgctactttgtactcttgccactgtgcctttgtgtgtttgttgggctctctcttcttttagctggcattatttccttaaatcatgttcgacaagtcatacaacatgatggccggaaccaagaaaaactaaagaaatttatgattcgaattggagtcttcagcggcttgtatcttgtgccattagtgacacttctcggatgttacgtctatgagcaagtgaacaggattacctgggagataacttgggtctctgatcattgtcgtcagtaccatatcccatgtccttatcaggtaaaagctatcacttggattatgtctctatttacatttaatgtagaaaatgtttcatggaaatatacttgtcatggatgtaaaagttgatttcaggtgagaaaatacaagagccataggtaaggatttcctatacatcaactgaaactgggatgaatgtttcatgacttccttcctcaagctttagcttcagttgtatagtaaagcacttcctttattctctgaaaaattaaattgagctgcaaaggcagattaatagcaataaagagcagagtcagaagaacagacct

SEQ ID NO: 516 - protein, 306 aa, Homo sapiens
MYFKSDELEFAKSFIGTVSIFCLCATLFTFLTFLIDVRRFRYPERPIIYYSVCYSIVSLMYFIGFLLGDSTACNKADEKLELGDTVVLGSQNKACTVLFMLLYFFTMAGTVWWVILTITWFLAAGRKWSCEAIEQKAVWFHAVAWGTPGFLTVMLLAMNKVEGDNISGVCFVGLYDLDASRYFVLLPLCLCVFVGLSLLLAGIISLNHVRQVIQHDGRNQEKLKKFMIRIGVFSGLYLVPLVTLLGCYVYEQVNRITWEITWVSDHCRQYHIPCPYQVKAITWIMSLFTFNVENVSWKYTCHGCKS

SEQ ID NO: 517 - DNA, 1339 bp, Homo sapiens
  source (1)..(1339)
  CDS (201)..(1139)
atgctcatttttcacatggataaactgaggcctagagaggataaagggattgcccgacgtcacagacagtgagtgtggcagtgctggaaaagatcctgacagtccacctcgtcccagaaagggctctgtgagcttccccgcaccctgtaccctctctccttccatcccagctgtggaccatctcttcagaactctgcagcatggagccgctcaacagaacagaggtgtccgagttctttctgaaaggattttctggctacccagccctggagcatctgctcttccctctgtgctcagccatgtacctggtgaccctcctggggaacacagccatcatggcggtgagcgtgctagatatccacctgcacacgcccgtgtacttcttcctgggcaacctctctaccctggacatctgctacacgcccacctttgtgcctctgatgctggtccacctcctgtcatcccggaagaccatctcctttgctgtctgtgccatccagatgtgtctgagcctgtccacgggctccacggagtgcctgctactggccatcacggcctatgaccgctacctggccatctgccagccactcaggtaccacgtgctcatgagccaccggctctgcgtgctgctgatgggagctgcctgggtcctctgcctcctcaagtcggtgactgagatggtcatctccatgaggctgcccttctgtggccaccacgtggtcagtcacttcacctgcaagatcctggcagtgctgaagctggcatgcggcaacacgtcggtcagcgaagacttcctgctggcgggctccatcctgctgctgcctgtacccctggcattcatctgcctgtcctacttgctcatcctggccaccatcctgagggtgccctcggccgccaggtgctgcaaagccttctccacctgcttggcacacctggctgtagtgctgcttttctacggcaccatcatcttcatgtacttgaagcccaagagtaaggaagcccacatctctgatgaggtcttcacagtcctctatgccatggtcacgaccatgctgaaccccaccatctacagcctgaggaacaaggaggtgaaggaggccgccaggaaggtgtggggcaggagtcgggcctccaggtgagggagggcggggctctgtacagacgcaggtctcaggttagtagctgaggccatcgtatgccaatgccagtgaagacatggcagggctggggctacaggtctggtatcttcatcccagcaaggcagcaccaagtcccgctgatcctgccacagaacagcccccaaatcaccctctgctctcagcatcaccctggccttcac

SEQ ID NO: 518 - protein, 312 aa, Homo sapiens
MEPLNRTEVSEFFLKGFSGYPALEHLLFPLCSAMYLVTLLGNTAIMAVSVLDIHLHTPVYFFLGNLSTLDICYTPTFVPLMLVHLLSSRKTISFAVCAIQMCLSLSTGSTECLLLAITAYDRYLAICQPLRYHVLMSHRLCVLLMGAAWVLCLLKSVTEMVISMRLPFCGHHVVSHFTCKILAVLKLACGNTSVSEDFLLAGSILLLPVPLAFICLSYLLILATILRVPSAARCCKAFSTCLAHLAVVLLFYGTIIFMYLKPKSKEAHISDEVFTVLYAMVTTMLNPTIYSLRNKEVKEAARKVWGRSRASR

SEQ ID NO: 519 - DNA, 1201 bp, Homo sapiens
  source (1)..(1201)
  CDS (201)..(1001)
  modified_base (1)..(66): a, t, c, g, unknown or other
nnnnnnnnnnnnnnnnnnnnnnnnnnnnnnnnnnnnnnnnnnnnnnnnnnnnnnnnnnnnnnnnnnctgaaagaattaccaaccggccagagcttcaggccccgtgctttggggtgtttttagttatctatctggtcacagtgctgggcaatcttgggttgattactttaatcaagattgatactcgactccacacacctatgtactatttcctcagccacctggcctttgttgacctttgttactcctctgctattacaccgaagatgatggtgaattttgttgtggaacgcaacaccattcctttccatgcttgtgcaacccaactgggttgttttctcaccttcatgatcactgagtgtttccttctagcctccatggcctacgattgctatgtcgccatctgtagtcccctgcattattcaacactgatgtcaagaagagtctgcattcaactggtggcagttccatatatatacagcttcctggttgccctcttccacaccgttatcactttccgtctgacttactgtggcccaaacttaattaaccatttctattgtgatgacctccccttcttagctctgtcctgctcagacacacacatgaaggaaattctgatatttgcctttgctggctttgatatgatctcttcctcttccattgtcctcacctcctacatctttattattgccgctatcctaaggatccgctctactcaggggcaacacaaagccatttccacctgtggctcccatatggtgactgtcactattttctatggcacactgatctttatgtacctacagcccaaatcaaatcactccttggacacagacaagatggcttctgtattttacacagtggtgatccccatgttaaaccccctaatctatagtctaaggaacaaagaagtgaaagatgcctcaaagaaagccttggataaaggttgtgaaaacttacagatattaacatttttaaaaataagaaaactttattaaacaagcaggaaataaatcaaactttttcttgtaattatttcccaatgaactgaaaatgtagctgttactttaatggaccttgacattttctgcaagaaccaggcagatcatgaaaaatcagtacgaattaaagcattcaattcaggccatcacagtcttggcagaccactgaaaccacgttcaaatacaaacagagacac

SEQ ID NO: 520 - protein, 266 aa, Homo sapiens [sequence omitted]

SEQ ID NO: 521 - DNA, 1243 bp, Homo sapiens
  source (1)..(1243)
  CDS (201)..(1043)
aggggtgtttccctgcccggtcctctggcctctggctcacagccgggcccccttctccgtattcagccctggaactacccataagagtgggggcgggtcacaagggcccgcggtggctgggaaacctcagggcctgtggtgtcgccgcgcaggtccagggtggcgcgtggctgctgagcccccgcctgtgcgacgccctcatggccatggacgtcatgctgtgcaccgcctccatcttcaacctgtgcgccatcagcgtggacaggtgcgccgccctccccgcccgcgccccggcgcccccgcgccccgcccgccgccctcaccgcggcctgtgcgctgtccggcgccccctcggcgctccccgcaggttcgtggccgtggccgtgccgctgcgctacaaccggcagggtgggagccgccggcagctgctgctcatcggcgccacgtggctgctgtccgcggcggtggcggcgcccgtactgtgcggcctcaacgacgtgcgcggccgcgaccccgccgtgtgccgcctggaggaccgcgactacgtggtctactcgtccgtgtgctccttcttcctaccctgcccgctcatgctgctgctctactgggccacgttccgcggcctgcagcgctgggaggtggcacgtcgcgccaagctgcacggccgcgcgccccgttttcccagcggccctggcccgccttcccccacgccacccgcgccccgcctcccccaggacccctgcggccccgactgtgcgccccccgcgcccggccttccccggggtccctgcggccccgactgtgcgcccgccgcgcccagcctcccccaggacccctgcggccccgactgtgcgccccccgcgcccggcctccccccggacccctgcggctccaactgtgctccccccgacgccgtcagagccgccgcgctcccaccccagactccaccgcagacccgcaggaggcggcgtgccaagatcaccggccgggagcgcaaggccatgagggtcctgccggtggtggtcggtgggttcctgtcctgaggggcggggaggagaggagggggggggtacgaggccggctgggcggggggcgctaacgcggctctcggcgcccccaggggccttcctgctgtgctggacgcccttcttcgtggtgcacatcacgcaggcgctgtgtcctgcctgctccgtgcccccgcggctggtcagcgccgtcacctggctgggctacgtcaacagcg

SEQ ID NO: 522 - protein, 280 aa, Homo sapiens
MAMDVMLCTASIFNLCAISVDRCAALPARAPAPPRPARRPHRGLCAVRRPLGAPRRFVAVAVPLRYNRQGGSRRQLLLIGATWLLSAAVAAPVLCGLNDVRGRDPAVCRLEDRDYVVYSSVCSFFLPCPLMLLLYWATFRGLQRWEVARRAKLHGRAPRFPSGPGPPSPTPPAPRLPQDPCGPDCAPPAPGLPRGPCGPDCAPAAPSLPQDPCGPDCAPPAPGLPPDPCGSNCAPPDAVRAAALPPQTPPQTRRRRRAKITGRERKAMRVLPVVVGGFLS

SEQ ID NO: 523 - DNA, 1279 bp, Homo sapiens
  source (1)..(1279)
  CDS (201)..(1079)
  modified_base (99)..(198): a, t, c, g, unknown or other
aaaaaaaaaaatttaaaaaaaaaaaaaaaaaaaaaaaaaaaaagggaaaaaaaaaaaaaaaaaaaaaaaaaaaaaactccaaaaaaaacccaacacaannnnnnnnnnnnnnnnnnnnnnnnnnnnnnnnnnnnnnnnnnnnnnnnnnnnnnnnnnnnnnnnnnnnnnnnnnnnnnnnnnnnnnnnnnnnnnnnnnnncaatggtgggaaacctcctcatttgggtgactactattggcagcccctccttgggctccctaatgtacttcttccttgcctacttgtcacttatggatgccatatattccactgccatgtcacccaaattgatgatagacttactctgtgataaaatcgctatttccttgtcagcttgcatgggtcagctcttcatagaacacttacttggtggtgcagaggtcttccttttggtggtgatggcctatgatcgctatgtggctatctctaagccgctgcactatttgaacatcatgaatcgactggtttgcatccttctgttggtggtggccatgattggaggttttgtgcactctgtggttcaaattgtctttctgtacagtctaccaatctgtggccccaatgttattgaccactctgtctgtgacatgtacccattgttggaactgttgtgccttgacacctactttataggactcactgtggttgccaatggtggaataatttgtatggtcatctttacctttctgctaatctcctgtggagtcatcctaaacttccttaaaacttacagtcaggaagagaggcataaagccctgcctacctgcatctcccacatcattgtggttgccctcgtttttgttccctgtatttttatgtatgttagacccgtttccaactttccctttgataaattaatgactgtgttttattcaattatcacactcatgttgaatcctttaatatactcgttgagacaatcagagatgaaaaatgctatgaaaaatctctggtgtgaaaagttaagtatagttagaaaaagagtatctcccacactgaacatatttattcctagttctaaggcaacaaataggcggtaaaatactgcagtcaattcaacagattctgtagggatgcttctctctatctacataaagccatcagaaaagtagtataaattatccactgagactagaataaatctaaagagaaatttggagaatgaataaaatcacaggtactgaataaaaggtcttggtacaagtaaaaataaaaccaagctcaccttgtaactttattt

SEQ ID NO: 524 - protein, 292 aa, Homo sapiens
MVGNLLIWVTTIGSPSLGSLMYFFLAYLSLMDAIYSTAMSPKLMIDLLCDKIAISLSACMGQLFIEHLLGGAEVFLLVVMAYDRYVAISKPLHYLNIMNRLVCILLLVVAMIGGFVHSVVQIVFLYSLPICGPNVIDHSVCDMYPLLELLCLDTYFIGLTVVANGGIICMVIFTFLLISCGVILNFLKTYSQEERHKALPTCISHIIVVALVFVPCIFMYVRPVSNFPFDKLMTVFYSIITLMLNPLIYSLRQSEMKNAMKNLWCEKLSIVRKRVSPTLNIFIPSSKATNRR

SEQ ID NO: 525 - DNA, 1414 bp, Homo sapiens
  source (1)..(1414)
  CDS (201)..(1214)
acagggtctcttttgagattaaagagagagaagtggcaaatttaggatgttagaataattttcatttaaaagtagatccttgtttttattaccctatcattaatgttttctgttttcctttatcagcgagttactgctcatttgattcatattgccaaactgaactctcttgttttcttgcaagatgaaaggagacaaccatgaatgagccactagactatttagcaaatgcttctgatttccccgattatgcagctgcttttggaaattgcactgatgaaaacatcccactcaagatgcactacctccctgttatttatggcattatcttcctcgtgggatttccaggcaatgcagtagtgatatccacttacattttcaaaatgagaccttggaagagcagcaccatcattatgctgaacctggcctgcacagatctgctgtatctgaccagcctccccttcctgattcactactatgccagtggcgaaaactggatctttggagatttcatgtgtaagtttatccgcttcagcttccatttcaacctgtatagcagcatcctcttcctcacctgtttcagcatcttccgctactgtgtgatcattcacccaatgagctgcttttccattcacaaaactcgatgtgcagttgtagcctgtgctgtggtgtggatcatttcactggtagctgtcattccgatgaccttcttgatcacatcaaccaacaggaccaacagatcagcctgtctcgacctcaccagttcggatgaactcaatactattaagtggtacaacctgattttgactgcaactactttctgcctccccttggtgatagtgacactttgctataccacgattatccacactctgacccatggactgcaaactgacagctgccttaagcagaaagcacgaaggctaaccattctgctactccttgcattttacgtatgttttttacccttccatatcttgagggtcattcggatcgaatctcgcctgctttcaatcagttgttccattgagaatcagatccatgaagcttacatcgtttctagaccattagctgctctgaacacctttggtaacctgttactatatgtggtggtcagcgacaactttcagcaggctgtctgctcaacagtgagatgcaaagtaagcgggaaccttgagcaagcaaagaaaattagttactcaaacaacccttgaaatatttcatttacttaaccaaaaacaaatacttgctgatactttacctagcatcctaagatgttcaggatgtctccctcaatggaactcctggtaaatactgtgtattcaagtaatcatgtgccaaagccagggcagagcttctagttctttgcaatccctttattgagctcctccactggggagatataagaatggga

SEQ ID NO: 526 - protein, 337 aa, Homo sapiens
MNEPLDYLANASDFPDYAAAFGNCTDENIPLKMHYLPVIYGIIFLVGFPGNAVVISTYIFKMRPWKSSTIIMLNLACTDLLYLTSLPFLIHYYASGENWIFGDFMCKFIRFSFHFNLYSSILFLTCFSIFRYCVIIHPMSCFSIHKTRCAVVACAVVWIISLVAVIPMTFLITSTNRTNRSACLDLTSSDELNTIKWYNLILTATTFCLPLVIVTLCYTTIIHTLTHGLQTDSCLKQKARRLTILLLLAFYVCFLPFHILRVIRIESRLLSISCSIENQIHEAYIVSRPLAALNTFGNLLLYVVVSDNFQQAVCSTVRCKVSGNLEQAKKISYSNNP

SEQ ID NO: 527 - DNA, 907 bp, Homo sapiens
  source (1)..(907)
  CDS (201)..(707)
cacgtgtagttcccacctcactgtggtgggcatcttctatgggacgggcgtcttcagctacacaaggctgggttcagtggagtcttcggacaaggacaagggcattggcatcctcaacactgtcatcagccccatgctgaacccactcatctactggacatctctgctggacgtcgggtgcatcagtcactgttcctccgatgctggcgtgtctccaggcccaccagtgcagagttccctatgctgcctgcagttcacagctcttctttccccacctcctggctggggtggactgtcacctcttaatagccatggcctatgaccgctacctggctatctgtcagcttctcaccaacagcactcgcatgagctgtgaagtccagggtgccctggtgggaatttgctgcactgtctccttcatcaatgctctgactcacacagtggctgtgtctgcgcttgacttctgtggccctaatgtggtcaaccacttctactgtgacctcccacctcttttccagctctcttgctccagcatccacctcaatgggcagctgctgcttgtgggggccaccttcataggagtgatccccatgatctttatctcagtgtcctatgcccacgtcacagctgcaatattacaaatccgctcagctgaggggaggaagaaggctttctccacatgtggctcccacctcactgtggtctgaatcttttatggaactggcttcttcagttacatgtgtctgggctcagtctcagcctcagacaaagataaggggattgggatcctcaacactatcctcagtcccatgctgaacccagtcatttacagcctccagaaccctgatgtgcagggcaccctgaaaagggtgctgacagggaagaggcccccagcttgagaagatgg

SEQ ID NO: 528 - protein, 168 aa, Homo sapiens [sequence omitted]

SEQ ID NO: 529 - DNA, 1297 bp, Homo sapiens
  source (1)..(1297)
  CDS (201)..(1097)
ctttaagcgagtgtggctggtttttattttctagtgtactttgcaactaatatttctgtatactcccttttaggtgattgggagatttaacttagatctccagcaagtgctacaaggaagaaaagatcctgaagaatcaatcaagttttccgtgaagtcaagtccaagtaacatccccgccttaaccacaagcaggagaaatgaagcacattatcaactcgtatgaaaacatcaacaacacagcaagaaataattccgactgtcctcgtgtggttttgccggaggagatatttttcacaatttccattgttggagttttggagaatctgatcgtcctgctggctgtgttcaagaataagaatctccaggcacccatgtactttttcatctgtagcttggccatatctgatatgctgggcagcctatataagatcttggaaaatatcctgatcatattgagaaacatgggctatctcaagccacgtggcagttttgaaaccacagccgatgacatcatcgactccctgtttgtcctctccctgcttggctccatcttcagcctgtctgtgattgctgcggaacgatacaatcaccatcttccatgcagctgcggtaccacagcatcgttgaccatgcgccgcgctgtggtggtgcttacggtcatctggacgttctgcacggggactggcatcaccatggtgatcttctcccatcatgtgcccacagtgatcaccttcacgtcgctgttcccgctgatgctggtcttcatcctgtgcctctatgtgcacatgttcctgctggctcgatcccacaccaggaagatctccaccctccccagagccaacatgaaaggggccatcacactgaccatcctgctcggggtcttcatcttctgctgggccccctttgtgcttcatgtcctcttgatgacattctgcccaagtaacccctactgcgcctgctacatgtctctcttccaggtgaacggcatgttgatcatgtgcaatgccgtcattgaccccttcatatatgccttccggagcccagagctcagggacgcattcaaaaagatgatcttctgcagcaggtactggtagaatggctgatccctggttttagaatccatgggaataacgttgccaagtgccagaatagtgtaacattccaacaaatgccagtgctcctcactggccttccttccctaatggatgcaaggatgatcccaccagctagtgtttctaatagctaggttctatgtgaacagtcttattgtaggggcaacctcttaactttgtga

SEQ ID NO: 530 - protein, 298 aa, Homo sapiens
MKHIINSYENINNTARNNSDCPRVVLPEEIFFTISIVGVLENLIVLLAVFKNKNLQAPMYFFICSLAISDMLGSLYKILENILIILRNMGYLKPRGSFETTADDIIDSLFVLSLLGSIFSLSVIAAERYNHHLPCSCGTTASLTMRRAVVVLTVIWTFCTGTGITMVIFSHHVPTVITFTSLFPLMLVFILCLYVHMFLLARSHTRKISTLPRANMKGAITLTILLGVFIFCWAPFVLHVLLMTFCPSNPYCACYMSLFQVNGMLIMCNAVIDPFIYAFRSPELRDAFKKMIFCSRYW

SEQ ID NO: 531 - DNA, 1414 bp, Homo sapiens
  source (1)..(1414)
  CDS (201)..(1214)
  modified_base (641)..(740): a, t, c, g, unknown or other
ctcgcgccttaactcccaacatacatgagaaacttcctgataggctcctgtcatccgtgatgcccgtaacaccacaacacccaacagccagtgctcaaaacattttgctgaacatgtgatcattgataaataaatagagaatccctaatagacggatccagccagtgagctgcagtttgagtttgtgtcctgttgaccccatggctgtaggctcagggtctccaggagacaaagctctgggctcccctgctccccactggaccctgccctatacccggtcctgcccaacccagagagcctggaccttgtctcacagagcactcaccgtgcagccttcagggaagcggtcaggagtgcagcgcaggaagtcaggccagccccgctccctctccacgatggcacaggggcctcgggtggcctggcagagggtacggctgggcagctccacccggtcattctcacacttgggcatgtatacggcacacagcaggggctggatcactgcccagcagcggggggcattccggaggcctgggggtggcaacagcattgcagtgaaggcccctcctcactctgacccacagacgcagcttcacccctgtcctccaggcctttgccacactgcagcccatcactggtcnnnnnnnnnnnnnnnnnnnnnnnnnnnnnnnnnnnnnnnnnnnnnnnnnnnnnnnnnnnnnnnnnnnnnnnnnnnnnnnnnnnnnnnnnnnnnnnnnnnncagagccagggcccccaggctcgtgtgtctctcctccctgtcagtgcccccagaggaacaagccaaccctgtggctggttgaggcagagatctcccccagagctgcagaagcgcctgggccggaagaagaagaggaggaagaggaagaaggaggtgtgcccgctggcgccgccccctgagcttcacccccctgcccctgcccccagtaccattcctcgactgcctcagctgccccggcagaaatgcctggtggctgcaggtgcctggggagctggggactcttgccgacagggagcgtggaccctggtctccaacccattctgcccagagcccagtccccctcaggatccatttctgcccagtgcaccggcccccgtggcatgggctcatggccgccgacagggcctggggcctattcactcccgcaccaacctgatggacacagaactcatggatgcagactcggacttctgagcctgcagagcaggacctgggacaggaaagagaggaaccaataccttcaaggctcttcttcctcaccgagcatgcttccctaggatcccgtcttccagagaacctgtgggctgactgccctccgaagagagttctggatgtctggctcaaagcagcaggactgtgggaaagagcctaacatctccatggggaggcctcac

SEQ ID NO: 532 - protein, 337 aa, Homo sapiens
  MOD_RES (147)..(180): Variable amino acid
MAVGSGSPGDKALGSPAPHWTLPYTRSCPTQRAWTLSHRALTVQPSGKRSGVQRRKSGQPRSLSTMAQGPRVAWQRVRLGSSTRSFSHLGMYTAHSRGWITAQQRGAFRRPGGGNSIAVKAPPHSDPQTQLHPCPPGLCHTAAHHWXXXXXXXXXXXXXXXXXXXXXXXXXXXXXXXXXXQSQGPQARVSLLPVSAPRGTSQPCGWLRQRSPPELQKRLGRKKKRRKRKKEVCPLAPPPELHPPAPAPSTIPRLPQLPRQKCLVAAGAWGAGDSCRQGAWTLVSNPFCPEPSPPQDPFLPSAPAPVAWAHGRRQGLGPIHSRTNLMDTELMDADSDF

SEQ ID NO: 533 - DNA, 1135 bp, Homo sapiens
  source (1)..(1135)
  CDS (201)..(935)
cagtgatctatgattgtaccattgcactccagcctgggtgacagaatgtgaccctgtctcaaaaagaataataataataatcattccataaaaagtatcaaatggagaaataaatcatcagtggggtctcggaggggaccaggggctgcagtgacaggcaacctggggccctgacacagggtcattcctgttccaggaagatgaatgcttccagatgcctgtctgaggaagtggggtccctccgccctctaaccatggctgtcctgtctgcctcctttgtcgtcggagtgctgggcaatgggctggtgccgtgggtgactgtcttccgcatggcccgcacagtctccaccgtctgcttcttccacctggcccttgccgatttcatgctctcactgtctctgcccatcctcgtgtactatattgtctccaggcagtggctccttggagagtgggcctgcaaactctacaccggttttgtgttcctcaccttctccaccagtaactgcctcctggtcctcatctctgtggaccgttgcatctctgtcctctaccccgtctgggccctgaaccaccgcactgagcagagggcgagctggctggccttcggggtgtggctcctggccgccgccttgtgctctgcgcacctgaaattccggacaaccagaaaatggaatggctgtatgcagtgctacttacagttcaacttggagaatgagactgcccagatgtggactcaggaggtctttgggagacaaatggcggtgatcatggcccacttcctgctgggcttcctggggcccttagcaatcataggcacctgcgcccacctcatccgggccaagctcttgcgggagggctgggtccatgccaaccggcccaagaggctgctgctggtgctggtgagcgctttatctgctggttcccatttaacgtgatgctgttggtccatctgtggcgacgggtgatgctcaaggaattctaccacccccagatgctgctcatcctccaggctagctttgccttgggctgtgtcaacaactgcctcaacccgttcctctacgtcttcgttggcagagatttccaagaaaagtttttccagtctttgacttctgccctggcgaggggcgtttggaga

SEQ ID NO: 534 - protein, 244 aa, Homo sapiens
MNASRCLSEEVGSLRPLTMAVLSASFVVGVLGNGLVPWVTVFRMARTVSTVCFFHLALADFMLSLSLPILVYYIVSRQWLLGEWACKLYTGFVFLTFSTSNCLLVLISVDRCISVLYPVWALNHRTEQRASWLAFGVWLLAAALCSAHLKFRTTRKWNGCMQCYLQFNLENETAQMWTQEVFGRQMAVIMAHFLLGFLGPLAIIGTCAHLIRAKLLREGWVHANRPKRLLLVLVSALSAGSHLT

SEQ ID NO: 535 - DNA, 1336 bp, Homo sapiens
  source (1)..(1336)
  CDS (201)..(1136)
attattgatgctgtgctgtattagcttcaagttttgtaaaagcagtaaagtaatatcaatacaaaaggcaacacttatttattttcttcccttagaatctaccccttttcaagatggtgtttgcctctgttgacgttgctcccgcagtctagaaaacacatttgattgtctaattatcccattttttgatcatcaaaaacatgggacccagaaaccaaacagctgtttcagaatttcttctcatgaaagtgacagaggacccagaactgaagttaatccctttcagcctgttcctgtccatgtacctggtcaccatcctggggaacctgctcattctcctggctgtcatctctgactcccacctccacacccccatgtacttccttctctttaatctctcctttactgacatctgtttaaccacaaccacagtcccaaagatcctagtgaacatccaagctcagaatcagagtatcacttacacaggctgcctcacccagatctgtcttgtcttggtttttgctggcttggaaagttgctttcttgcagtcatggcctacgaccgctatgtggccatttgccacccactgaggtacacagtcctcatgaatgtccatttctggggcttgctgattcttctctccatgttcatgagcactatggatgccctggttcagagtctgatggtattgcagctgtccttctgcaaaaacgttgaaatccctttgttcttctgtgaagtcgttcaggtcatcaagctcgcctgttctgacaccctcatcaacaacatcctcatatattttgcaagtagtgtatttggtgcaattcctctctctggaataattttctcttattctcaaatagtcacctctgttctgagaatgccatcagcaagaggaaagtataaagcgttttccacctgtggctgtcacctctctgttttttccttgttctatgggacagcttttggggtgtacattagttctgctgttgctgagtcttcccgaattactgctgtggcttcagtgatgtacactgtggtccctcaaatgatgaaccccttcatctacagcctgagaaataaggagatgaagaaagctttgaggaaacttattggtaggctgtttcctttttagcgatctttgtcctctgctttgaattggagcttctaaaataaatcatcataacaggattccttggtaagccagagtgcctgactcttgcatcgagatttacttttttttttttttttcgaggcagaatctcgctctgtcgcccaggctggagtacagtggcacgatctcggctcactgcaaactccgcctcccgggttcat

SEQ ID NO: 536 - protein, 311 aa, Homo sapiens
MGPRNQTAVSEFLLMKVTEDPELKLIPFSLFLSMYLVTILGNLLILLAVISDSHLHTPMYFLLFNLSFTDICLTTTTVPKILVNIQAQNQSITYTGCLTQICLVLVFAGLESCFLAVMAYDRYVAICHPLRYTVLMNVHFWGLLILLSMFMSTMDALVQSLMVLQLSFCKNVEIPLFFCEVVQVIKLACSDTLINNILIYFASSVFGAIPLSGIIFSYSQIVTSVLRMPSARGKYKAFSTCGCHLSVFSLFYGTAFGVYISSAVAESSRITAVASVMYTVVPQMMNPFIYSLRNKEMKKALRKLIGRLFPF

SEQ ID NO: 537 - DNA, 1072 bp, Homo sapiens
  source (1)..(1072)
  CDS (201)..(872)
cagtttctgggtttggcccctccccccatcgccatatcttcatcctacttcgcttgtgccttccccagcctcgtgggttgaaagtgtccctcaaatacctaggtagtcctccaggcaggactccaggggtgttccttaggaaactgaggaactctcaccccttgaacaccacgagcttgctcacacagtgacactcagcgatgactttggctctgctctcccctcctccatctcccacgagcttccagcccagaacacctggccagacccaggtcgggggagttagatcccggggtcaagcaaccagaactgggggctcttgcctgaggattccagcttctcttcccaggtgcccgtctgatggggagatggctgatgcccagaacatttcactggacagcccagggagtgtgggggccgtggcagtgcctgtggtctttgccctaatcttcctgctgggcacagtgggcaatgggctggtgctggcagtgctcctgcagcctggcccgagtgcctggcaggagcctggcagcaccacggacctgttcatcctcaacctggcggtggctgacctctgcttcatcctgtgctgcgtgcccttccaggccaccatctacacgctggatgcctggctctttggggccctcgtctgcaaggccgtgcacctgctcatctacctcaccatgtacgccagcagctttacgctggctgctgtctccgtggacaggtgcgctgtgcctggggcctggctgggcagggctgtgggggcgggggttgggggaggagtcctgaacagatcctcactggccttaggaaggagagagtgggggaccagaaagggaggtgggtgggaggaaacaaaagctccctgacccctcgcaagcagcctctgggcacctgcagggcgtgcttgaggggactgtcctgcccttcccctcctccactgtgaacttccagaggacgcctctgagtctcaagtggcagcacagggtctggcacatagtaagtgctctgtaagcgcgaaatgaatcgcaaaagaagctcacgaatgcgttcatcagtttttttgttt

SEQ ID NO: 538 - protein, 223 aa, Homo sapiens [sequence omitted]

SEQ ID NO: 539 - DNA, 961 bp, Homo sapiens
  source (1)..(961)
  CDS (201)..(761)
  modified_base (8): a, t, c, g, unknown or other
  modified_base (22): a, t, c, g, unknown or other
  modified_base (38): a, t, c, g, unknown or other
  modified_base (55): a, t, c, g, unknown or other
  modified_base (61): a, t, c, g, unknown or other
  modified_base (74)..(173): a, t, c, g, unknown or other
  modified_base (184): a, t, c, g, unknown or other
  modified_base (191): a, t, c, g, unknown or other
  modified_base (211): a, t, c, g, unknown or other
  modified_base (218): a, t, c, g, unknown or other
  modified_base (287): a, t, c, g, unknown or other
  modified_base (300): a, t, c, g, unknown or other
  modified_base (305): a, t, c, g, unknown or other
  modified_base (332): a, t, c, g, unknown or other
  modified_base (647): a, t, c, g, unknown or other
  modified_base (674): a, t, c, g, unknown or other
  modified_base (677): a, t, c, g, unknown or other
  modified_base (878): a, t, c, g, unknown or other
  modified_base (914)..(961): a, t, c, g, unknown or other
cagattcnccaggtgatgctgntggtctggggattctnccagagccgaaccggcnggtttngcaaatcaagtcnnnnnnnnnnnnnnnnnnnnnnnnnnnnnnnnnnnnnnnnnnnnnnnnnnnnnnnnnnnnnnnnnnnnnnnnnnnnnnnnnnnnnnnnnnnnnnnnnnnngcgcccgtggngataagnacacttccaatgagtccagntcaggcnagtgccaccccagaccacctaaggaacgcccagccacagagctgtccaccacagaggccaccagcgccngcatgcccgcccntcccngcagccgcgggccttcaacccagctcncagatggtccaagatccagattgtacgaagcagacaggcaatgagtgtgtgacagccattgagattgtgcctgccacgccggctggcatgcgccttgcggccaacgtggcccgcaagttcgccagcatcgctcgcaaccaggtgcgcaagaagcggcagatggcggcccgggagcgcaaagtgacacgaacgatctttgccattctgctagccttcatcctcacctggacgccctacaacgtcatggtcctggtgaacaccttctgccagagctgcatccctgacacggtgtggtccattggctactggttctgntacgtcaacagcaccatcaaccctgcntgntatgttttgtgcaacgccacctttaaaaagaccttccggcacctgctgctgtgccagtatcggaacatcggcactgccaggtaggcaggcaggagtgccctaggaggtgctggtgttgcgtgcgtgtgctggggggaccacacggctcacttgctgtggggaagagttgcaggcaccttctgcgtcacgttggggattctnccacagccaagacccagggtatccaaacacaggacnnnnnnnnnnnnnnnnnnnnnnnnnnnnnnnnnnnnnnnnnnnnnnnn

SEQ ID NO: 540 - protein, 186 aa, Homo sapiens
  MOD_RES (4): Variable amino acid
  MOD_RES (6): Variable amino acid
  MOD_RES (29): Variable amino acid
  MOD_RES (34)..(35): Variable amino acid
  MOD_RES (44): Variable amino acid
  MOD_RES (149): Variable amino acid
  MOD_RES (158)..(159): Variable amino acid
MSPXQXSATPDHLRNAQPQSCPPQRPPAXACPPXXAAAGLQPSXQMVQDPDCTKQTGNECVTAIEIVPATPAGMRLAANVARKFASIARNQVRKKRQMAARERKVTRTIFAILLAFILTWTPYNVMVLVNTFCQSCIPDTVWSIGYWFXYVNSTINPXXYVLCNATFKKTFRHLLLCQYRNIGTAR

SEQ ID NO: 541 - DNA, 1438 bp, Homo sapiens
  source (1)..(1438)
  CDS (201)..(1238)
  modified_base (151): a, t, c, g, unknown or other
  modified_base (180): a, t, c, g, unknown or other
  modified_base (211)..(310): a, t, c, g, unknown or other
  modified_base (345): a, t, c, g, unknown or other
  modified_base (1011): a, t, c, g, unknown or other
  modified_base (1026): a, t, c, g, unknown or other
  modified_base (1053)..(1152): a, t, c, g, unknown or other
  modified_base (1188): a, t, c, g, unknown or other
agataaactgtagttcagggattcagaatgggtgctccaggacatggggaaggaagcagtagcctctgcctgtctcaatagctctgacatccatctctacctgggagctggctttgcccgccttccgtgtctctgtgggttcagccctcanaccctgattgcagaaaagctctgctccangaagaatctcccttggacatatgtacagagnnnnnnnnnnnnnnnnnnnnnnnnnnnnnnnnnnnnnnnnnnnnnnnnnnnnnnnnnnnnnnnnnnnnnnnnnnnnnnnnnnnnnnnnnnnnnnnnnnnngaccttgcgttgcatacctgcagtttgggctctanagaatcccctgtccatcaaggtcaacaggcagctgcagacagtcaacaactacttcctcttcagcctggcgtgtgctgatctcatcataggcgccttctccatgaacctctacaccgtgtacatcatcaagggctactggcccctgggcgccgtggtctgcgacctgtggctggccctggactacgtggtgagcaacgcctccgtcatgaaccttctcatcatcagctttgaccgctacttctgcgtcaccaagcctctcacctaccctgcccggcgcaccaccaagatggcaggcctcatgattgctgctgcctgggtactgtccttcgtgctctgggcgcctgccatcttgttctggcagtttgtggtgggtaagcggacggtgcccgacaaccagtgcttcatccagttcctgtccaacccagcagtgacctttggcacagccattgctgccttctacctgcctgtggtcatcatgacggtgctgtacatccacatctccctggccagtcgcagccgagtccacaagcaccggcccgagggcccgaaggagaagaaagccaagacgctggccttcctcaagagcccactaatgaagcagagcgtcaagaagcccccgcccgggagaggcccgcccgggaggagctgcgcaatggcaagctggnaaggaggccccccgncagcgctgccaccgccaccgcgccccnnnnnnnnnnnnnnnnnnnnnnnnnnnnnnnnnnnnnnnnnnnnnnnnnnnnnnnnnnnnnnnnnnnnnnnnnnnnnnnnnnnnnnnnnnnnnnnnnnnngtaccttgcttgcgaaacctgcgttttggactctanagaatcccctctgcccattcatccaaagccatcttaccggcctgtgttgagaagcgaggcgaggttagtccccatgaataagccacctgttaacatgccacctcctcagtgccatgtgtcatcgtcccaagggggcccaaccccagtgtgtccccagcaatggagctgcagtccccacgctctattgtcagcccttggcagcctgctttgccacgcacatatgatggcttttgcggtggcagtcatcctg

SEQ ID NO: 542 - protein, 345 aa, Homo sapiens
  MOD_RES (4)..(37): Variable amino acid
  MOD_RES (49): Variable amino acid
  MOD_RES (271): Variable amino acid
  MOD_RES (276): Variable amino acid
  MOD_RES (285)..(318): Variable amino acid
  MOD_RES (330): Variable amino acid
MYRXXXXXXXXXXXXXXXXXXXXXXXXXXXXXXXXXXTLRCIPAVWALXNPLSIKVNRQLQTVNNYFLFSLACADLIIGAFSMNLYTVYIIKGYWPLGAVVCDLWLALDYVVSNASVMNLLIISFDRYFCVTKPLTYPARRTTKMAGLMIAAAWVLSFVLWAPAILFWQFVVGKRTVPDNQCFIQFLSNPAVTFGTAIAAFYLPVVIMTVLYIHISLASRSRVHKHRPEGPKEKKAKTLAFLKSPLMKQSVKKPPPGRGPPGRSCAMASWXGGPPXALPPPPRPXXXXXXXXXXXXXXXXXXXXXXXXXXXXXXXXXXTLLAKPAFWTLXNPLCPFIQSHLTGLC

SEQ ID NO: 543 - DNA, 1057 bp, Homo sapiens
  source (1)..(1057)
  CDS (201)..(857)
  modified_base (3)..(102): a, t, c, g, unknown or other
ctnnnnnnnnnnnnnnnnnnnnnnnnnnnnnnnnnnnnnnnnnnnnnnnnnnnnnnnnnnnnnnnnnnnnnnnnnnnnnnnnnnnnnnnnnnnnnnnnnnnntcttcagcaaggcggtgttctccatcctgaacacggggggcttcctgggcacgtttgccgactacatccgcagcgtgtgccgggtcctggggctctgcatgttccttaccggcgtgagcctcctgccggccgtcagcgccgagcgctgcgcctcggtcatcttccccgcctggtactggcgccggcggcccaagcgcctgtcggccgtggtgtgcgccctgctgtgggtcctgtccctcctggtcacctgcctgcacaactacttctgcgtgttcctgggccgcggggcccccggcgcggcctgcaggcacatggacatcttcctgggcatcctcctgttcctgctctgctgcccgctcatggtgctgccctgcctggccctcatcctgcacgtggagtgccgggcccgacggcgccagcgctctgccaagctcaaccacgtcatcctggccatggtctccgtcttcctggtgtcctccatctacttagggatcgactggttcctcttctgggtcttccagatcccggcccccttccccgagtacgtcactgacctgtgcatctgcatcaacagcagcgccaagcccatcgtctacttcctggccgggagggacaagtcgcagcggctgtgggagccgctcagggtggtcttccagcgggccctgcgggacggcgctgagctgggggaggccgggggcagcacgcccaacacagtcaccatggagatgcagtgtcccccggggaacgcctcctgagactccagcgcctggaggaggcaggggcaggaagcggcctccaagacccttcgccttgggacaggaatgggcacctgcttctgagtccatacaggagaagaaagatctgtttcctctcctcgggcctccttctccctgggctggggactccaggggtggctgggagactgggcagccaccagcaaacagaccctgtggcc

SEQ ID NO: 544 - protein, 218 aa, Homo sapiens [sequence omitted]

SEQ ID NO: 545 - DNA, 1333 bp, Homo sapiens
  source (1)..(1333)
  CDS (201)..(1133)
gtttttgatgtctgcagttcctcctctggtcgaccagactattgtctattaaacagtagcaagagaggctcaggagaccactgcattctgtttctcctctgataaggtatagaatatgcaatgatttacaaataatttctctctcacacacaaacacattcaatttctctttttaaaacttagagactgttgacaagatcatggaccctggaaaccattcctcagtgactgagtccattctggctgggctctcagaacagccagagctccagctgcgcctcttcctcctgttcttaggaatctgtgtggtcacagtggtgggcaacttgggcatgatcacactgattgggctcagttctcacctgcacacacctatgtactatttcctcagcagtctgtccttcattgacttctgccattccactgtcattacccctaagatgctggtgaactttgcgacagagaagaacatcatctcctaccctgaatgcatggctcagctctatttattcagtatttttgctattgcagagtgtcacatgttggctgcaatggcgtatgactgttatgttgccatctgcagccccttgctgtacaatgtcatcatgtcctatcaccactgcttctggctcacagtgggagtttacattttaggcatccttggatctacaattcataccagttttatgttgagactctttttgtgcaagactaatgtgattaaccattatttttgtgatcttttccctctcttggggctctcctgctccagcacctacatcaatgaattactggttctggtcttgagtgcatttaacatcctgatgcctgccttaaccatccttgcttcttacatctttatcattgccagcatcctccgcattcactccactgagggcaggtccaaagccttcagcacttgcagctcccacatcttggctgttgctgttttctttggatctgcagcattcatgtacctgcagccatcatctgtcagctccatggaccagaggaaagtgtcgtctgtgttttatactactattgtgcccatgctgaaccccctgatctacagcctgaggaataaagatgtcaaacttgccgtgaagaaaattctgcatcagacagcatgttaatgaatagaatcaatgttatgttgttacatcaagataggtctttggtttgattagatatctaacttattggatttattgttgagatttatgaaaatttagtgatgctcttttatgtaacacctctccaaaatattcctccggtctgcttccatcgaacttatattccaatgagcatatgtaaagaaatacaaagaataaaa

SEQ ID NO: 546 - protein, 310 aa, Homo sapiens
MDPGNHSSVTESILAGLSEQPELQLRLFLLFLGICVVTVVGNLGMITLIGLSSHLHTPMYYFLSSLSFIDFCHSTVITPKMLVNFATEKNIISYPECMAQLYLFSIFAIAECHMLAAMAYDCYVAICSPLLYNVIMSYHHCFWLTVGVYILGILGSTIHTSFMLRLFLCKTNVINHYFCDLFPLLGLSCSSTYINELLVLVLSAFNILMPALTILASYIFIIASILRIHSTEGRSKAFSTCSSHILAVAVFFGSAAFMYLQPSSVSSMDQRKVSSVFYTTIVPMLNPLIYSLRNKDVKLAVKKILHQTAC

SEQ ID NO: 547 - DNA, 1234 bp, Homo sapiens
  source (1)..(1234)
  CDS (201)..(1034)
  modified_base (1)..(95): a, t, c, g, unknown or other
  modified_base (100): a, t, c, g, unknown or other
nnnnnnnnnnnnnnnnnnnnnnnnnnnnnnnnnnnnnnnnnnnnnnnnnnnnnnnnnnnnnnnnnnnnnnnnnnnnnnnnnnnnnnnnnnnnnnnctggnaaattacaatcaatcatcaactgatttcatcttattaggattcttcccaccatcaagaattggccttttcctcttcatcctcattgttttcattttcctaatggctctaattggaaacctatccatgattcttctcatcttcttggacacccatctccacacacccatgtatttcctacttagtcagctctccctcattgacctaaattacatctccaccattgttcctaagatggcatctgattttctgtctggtaacaagtctatctccttcactgggtgtgggattcagagtttcttcttctcggcattaggaggtgcagaagcactacttttggcatctatggcctatgatcgttacattgctatttgctttcctcttcactatcccatccgcatgagcaaaagaatgtgtgtgctgatgataacagggtcttggatcataggctcgatcaatgcttgtgctcacactgtatatgtactccatattccttattgccaatccagggccatcaatcatttcttctgtgatgtcccagcaatggtgactctggcctgcatggacacctgggtctatgagggcacagtgtttttgagcaccaccatctttctcgtgtttcccttcattgctatttcatgttcctatggccgggttctccttgctgtctaccacatgaaatctgcagaagggaggaagaaagcctacctgacctgcagcacccacctcactgtagtaactttctactatgcaccttttgtctacacttatctacgtccaagatccctgcgatctccaacagaggacaaggttctggctgtcttctacaccaccctcactccaatgctcaaccccatcatctatagcctgaggaacaaggaggtgatgggggccctgacacgagtgagtcagagaatctgctctgggaaaatgtagaaacattttctacctaaggtctcaggactcagatacacatccatccagcagtgtatagtaattaaaatattatttcaatcctagagttcaggagctaaaagtaatcaaggtaagagaaaaaaatcactgatttctggacaaaattgttttacatatatatgtatatataactccaaacaaccttttttcttcatggcatt

SEQ ID NO: 548 - protein, 277 aa, Homo sapiens
MALIGNLSMILLIFLDTHLHTPMYFLLSQLSLIDLNYISTIVPKMASDFLSGNKSISFTGCGIQSFFFSALGGAEALLLASMAYDRYIAICFPLHYPIRMSKRMCVLMITGSWIIGSINACAHTVYVLHIPYCQSRAINHFFCDVPAMVTLACMDTWVYEGTVFLSTTIFLVFPFIAISCSYGRVLLAVYHMKSAEGRKKAYLTCSTHLTVVTFYYAPFVYTYLRPRSLRSPTEDKVLAVFYTTLTPMLNPIIYSLRNKEVMGALTRVSQRICSGKM

SEQ ID NO: 549 - DNA, 985 bp, Homo sapiens; identical to SEQ ID NO: 123
  source (1)..(985)
  CDS (201)..(785)

SEQ ID NO: 550 - protein, 194 aa, Homo sapiens; identical to SEQ ID NO: 124

SEQ ID NO: 551 - DNA, 1513 bp, Homo sapiens; identical to SEQ ID NO: 263
  source (1)..(1513)
  CDS (201)..(1313)

SEQ ID NO: 552 - protein, 370 aa, Homo sapiens; identical to SEQ ID NO: 264

SEQ ID NO: 553 - DNA, 1315 bp, Homo sapiens
  source (1)..(1315)
  CDS (201)..(1115)
gactatttgggatacttctctgggccattagtaaaatcactgactgacaaaattccacaaaagtaagggtccttgtaagttcaagtgccttgactgagtaccaaatgtggacatcaacatgaacatttctttccaatatgcatcatttccctaccccttattctcacttattttgatcattatgggataaagttgatgatatggaaagagcaaaccattcagtggtatcggaatttattttgttgggactttccaaatctcaaaatcttcagattttattcttcttgggattctctgtggtcttcgtggggattgtgttaggaaacctgctcatcttggtgactgtgacctttgattcgctccttcacacaccaatgtattttctgcttagcaacctctcctgcattgatatgatcctggcttcttttgctacccctaagatgattgtagatttcctccgagaacgtaagaccatctcatggtggggatgttattcccagatgttctttatgcacctcctgggtgggagtgagatgatgttgcttgtagccatggcaatagacaggtatgttgccatatgcaaacccctccattacatgaccatcatgagcccacgggtgctcactgggctactgttatcctcctatgcagttggatttgtgcactcatctagtcaaatggctttcatgttgactttgcccttctgtggtcccaatgttatagacagctttttctgtgaccttccccttgtgattaaacttgcctgcaaggacacctacatcctacagctcctggtcattgctgacagtgggctcctgtcactggtctgcttcctcctcttgcttgtctcctatggagtcataatattctcagttaggtaccgtgctgctagtcgatcctctaaggctttctccactctctcagctcacatcacagttgtgactctgttctttgctccgtgtgtctttatctacgtctggcccttcagcagatactcggtagataaaattctttctgtgttttacacaattttcacacctctcttaaatcctattatttatacattaagaaatcaagaggtaaaagcagccattaaaaaaagactctgcatataaatttaaagcatactttttagatgagacttttgaagagacagtctcttgtttgtttgaacatttaagaaactcgtttttaatgtatcaggttcgtgcaaaagtcattgcggtttttgccattaaagtaaatgacaaaattaaagtaatggcaaaaaccactataacttgtgtaccagctaacagttcaagttccatatgag

SEQ ID NO: 554 - protein, 304 aa, Homo sapiens; identical to SEQ ID NO: 394

SEQ ID NO: 555 - DNA, 1171 bp, Homo sapiens
  source (1)..(1171)
  CDS (201)..(971)
gggaacacactttacatatggggatggtgagacataccaatgagagcaacctagcaggtttcatccttttagggttttctgattatcctcagttacagaaggttctatttgtgctcatattgattctgtatttactaactattttggggaataccaccatcattctggtttctcgtctggaacccaagcttcatatgccgatgtatttcttcctttctcatctctccttcctgtaccgctgcttcaccagcagtgttattccccagctcctggtaaacctgtgggaacccatgaaaactatcgcctatggtggctgtttggttcacctttacaactcccatgccctgggatccactgagtgcgtcctcccggctgtgatgtcctgtgaccgctatgtggctgtctgccgtcctctccattacactgtcttaatgcatatccatctctgcatggccttggcatctatggcatggctcagtggaatagccaccaccctggtacagtccaccctcaccctgcagctgcccttctgtgggcatcgccaagtggatcatttcatctgcgaggtccctgtgctcatcaagctggcttgtgtgggcaccacgtttaacgaggctgagctttttgtggctagtatccttttccttatagtgcctgtctcattcatcctggtctcctctggctacattgcccacgcagtgttgaggattaagtcagctaccaggagacagaaagcattcgggacctgcttctcccacctgacagtggtcaccatcttttatggaaccatcatcttcatgtatctgcagccagccaagagtagatccagggaccagggcaagtttgtttctctcttctacactgtggtaacccgcatgcttaaccctcttatttataccttgaggatcaaggaggtgaaaggggcattaaagaaagttctagcaaaggctctgggagtaaatattttatgattattaaaaaaaaatttaagtgacactgtgatgaattttttttttggtaaaaagtagcatcttttaataagaggattttttatgggctcttctcacattttcttttgattaaatatttgtacgacattttgcattatgtaaaatactatggaatatatgtctacatacatacatgaaacatatgtctataaagtcgcaac

SEQ ID NO: 556 - protein, 256 aa, Homo sapiens
MYFFLSHLSFLYRCFTSSVIPQLLVNLWEPMKTIAYGGCLVHLYNSHALGSTECVLPAVMSCDRYVAVCRPLHYTVLMHIHLCMALASMAWLSGIATTLVQSTLTLQLPFCGHRQVDHFICEVPVLIKLACVGTTFNEAELFVASILFLIVPVSFILVSSGYIAHAVLRIKSATRRQKAFGTCFSHLTVVTIFYGTIIFMYLQPAKSRSRDQGKFVSLFYTVVTRMLNPLIYTLRIKEVKGALKKVLAKALGVNIL

SEQ ID NO: 557 - DNA, 1039 bp, Homo sapiens
  source (1)..(1039)
  CDS (201)..(839)
attattgcattaaataatttttgcgttggcttataagtgttttccttcttcctcctcctcctctcccatctctctctctctttttctctttctctctccctccctctctctctcattctctttctctcagcacttacacaatggtgaattttacacatgtctcagaatttgttctacttgggttccaagggggtcccgggatgcaggctatgctatttctgatttttctgatcctgtatggcatagctgtggtgggaaaccttggcatgattgtaattatctgggtagatgcacacctccacaccccaatgtatgccttcctgcaaagcctttcattgttggacatctgctattcctccacaattgcacccagggctctggcgaactccatgcaagaggaccacacaatttcctttggcggatgtgctgctcagttctttttcttgtctctctttggtatcacagaggctttcctcctggctgccatggcctatgaccgcttcatcgccatctgcaaccctcttctgtactctgtgagcatgtctcaccaggtctgtgtgctgttaatatcaggatcctacttgtggggtgtagtcaatgccattgctcaaacaaccatgaccttcaggttgcctttctgtgggtccaatgagatcaacgactttttctgtgatgttcccccactcttgtccctctcatgttcagatacctttataaaccaactggttcttcttggtttatgtggctccattattgtcagtacctttttgattgtcctggtctcatacatttacatcatctcaacaattctgaggatcccgaccatgcagggacgctagaaagccttctccacgtgcgcttcccacctaacaggagtgtgcttgttttttggtactgttttcttcatgtatgcacaacccagtgccatcttcttcatggagcaaagtaaaatagtgtccatattctacactatggtcatccccatgctgaatcccctgatatacagcctgaggaacaaagaggtcaagcaggctctgag

SEQ ID NO: 558 - protein, 212 aa, Homo sapiens
MQAMLFLIFLILYGIAVVGNLGMIVIIWVDAHLHTPMYAFLQSLSLLDICYSSTIAPRALANSMQEDHTISFGGCAAQFFFLSLFGITEAFLLAAMAYDRFIAICNPLLYSVSMSHQVCVLLISGSYLWGVVNAIAQTTMTFRLPFCGSNEINDFFCDVPPLLSLSCSDTFINQLVLLGLCGSIIVSTFLIVLVSYIYIISTILRIPTMQGR

SEQ ID NO: 559 - DNA, 1355 bp, Homo sapiens
  source (1)..(1355)
  CDS (201)..(227)
  CDS (265)..(1155)
aacaaacccacagctgtgtttggtacatagtaggcactaaatgaatatctgtttaattcataaataaagagaagtacatgatccacctaaagcatatttttcatttgacttttatataagctaacacatctgactttgtcaatttcttctaggaaatgagctgtgtctttctatccatagctgttaaggttgctgagaccatggtgagtattaaccaaactgctacagtaagtaacagagtttctcttctctggattcccacagtttgaagatggtagcctcctcttcttcattccattgtttgttatctacatattcattgtcattgggaatcttattgtattttttgcagtcagggtggatacccgtctccacaaccccatgtataattttatcagcattttctcatttctggagatctggtacacaactgccacaattcccaagatgctctccatcctcatcagcaggcagaggaccatctccatggttggttgcctcttgcagatgtacttcttccattcactgggaaattcagaggggattttgttgaccaccatggccattgataggtacgttgccatctgtaaccctctccgctacccaaccatcatgacccccgggctctgtgttcagctctctgtggggtcctgcatctttggctttcttgtgttgctcccagagattgcatggatttccacactgcccttctgtggacccaaccaaatccaccagatcttctgtgattttgaacctgtgctgcgcttggcctgtacagacacgtccatgattctgattgaggatgtgatccatgctgtggccattgtattctctgtcctgattattgccttttcttatatcagaatcatcactgtaatcctgaggattccctctgttgaaggccgccagaaggccttttctacctgtgccgcccatcttagtgtctttctgatgttctatggcagtgtatccctcatgtacctgcgtttctctgccactttcccaccgattttggacacagctgttgcactgatgtttgcagttcttgctccctttttcaaccctatcatctatagctttagaaataaggacatgaagattgcaattaaaaagcttttctgccctcagaagatggttaatttatctgtagattaatgctagctcataggcacctttcactgtggatgttactctaacacaataaaccatataattaacatataattcattcattgtcacatggatattttgtgtctctttataccggttcttcccatgtacatgtatatcctgcttacacatgccaaattaagatagcatggactacctgtctagacttatacaggtgggtaaaa

SEQ ID NO: 560 - protein, 305 aa, Homo sapiens
MVSINQTATFEDGSLLFFIPLFVIYIFIVIGNLIVFFAVRVDTRLHNPMYNFISIFSFLEIWYTTATIPKMLSILISRQRTISMVGCLLQMYFFHSLGNSEGILLTTMAIDRYVAICNPLRYPTIMTPGLCVQLSVGSCIFGFLVLLPEIAWISTLPFCGPNQIHQIFCDFEPVLRLACTDTSMILIEDVIHAVAIVFSVLIIAFSYIRIITVILRIPSVEGRQKAFSTCAAHLSVFLMFYGSVSLMYLRFSATFPPILDTAVALMFAVLAPFFNPIIYSFRNKDMKIAIKKLFCPQKMVNLSVD

SEQ ID NO: 561 - DNA, 1180 bp, Homo sapiens
  source (1)..(1180)
  CDS (201)..(980)
ttaggcactcaagtggacagagagccatgagaaatttgagtggaggccatgtcgaggagtttgtcttggtgggtttccctaccacgcctcccctccagctgctcctctttgtccttttttttgcaatttaccttctgacattgttggagaatgcacttattgtcttcacaatatggcttgctccaagccttcatcgtcccatgtactttttccttggccatctctctttcctggagctatggtacatcaatgtcaccattcctcggctcttggcagcctttcttacccaggatggtagagtctcctacgtaggttgcatgacccaactgtacttctttattgccttagcctgtactgaatgtgtgctgttggcagttatggcctatgatcgctacctggccatctgtggacccctcctttaccctagtctcatgccttccagtctggccactcgccttgctgctgcctcttggggcagtggcttcttcagctccatgatgaagcttctttttatttcccaattgtcctactgtggacccaacattatcaaccactttttctgtgatatttccccactactcaacctcacctgctctgacaaggagcaagcagagctagtagacttccttctggccctggtgatgattctactccctctattggctgtggtttcatcatacactgccatcattgcagccatcctgaggatccctacgtccaggggacgccacaaagccttttccacttgtgccgctcatctggcagtggttgttatctactactcctccactctcttcacctatgcacggccccgggccatgtacaccttcaaccacaacaagattatctctgtgctctacactatcattgtaccattcttcaacccagccatctactgcctgaggaacaaggaggtgaaggaggccttcaggaagacagtgatgggcagatgtcactatcctagggatgttcaggactgatatacaacaggtcttgggagaggtgaaaatagcagaatcttaatagggcctcctcaaggaatcagaataggctttaagggaacataaatataatttgccaacattttctctaaatattgtctgggaccttctgatacaaatgaaactttatgaatcatttattttttacaggggttttcaaactaaggttggactagcta

SEQ ID NO: 562 - protein, 259 aa, Homo sapiens [sequence omitted]

SEQ ID NO: 563 - DNA, 5142 bp, Homo sapiens
  source (1)..(5142)
  CDS (201)..(1146)
  CDS (4875)..(4942)
taatattcacattcagcttaagatttcaaaatgtattcttacgaaagagatatggaattatgcatttatccttctaaaaagctgtgcatacagatctaaactatttaaaaattaatctctgaagttccaagcatcaccagtgataaatttgcgccttgcatcctgtgcttttccagaatgtttttcatcccccacaggcaatggagccccaaaatacctccactgtgactaactttcagctgttaggattccagaaccttcttgaatggcaggccctgctctttgtcattttcctgctcatctactgcctgaccattatagggaatgttgtcatcatcaccgtggtgagccagggcctgcgactgcactcccctatgtacatgttcctccagcatctctcctttctggaggtctggtacacgtccaccactgtgccccttctcctagccaacctgctgtcctggggccaagccatctccttctctgcctgcatggcacagctctacttcttcgtattcctcggcgccaccgagtgctttctcctggccttcatggcctatgaccgttacctggccatctgcagcccactccgctacccctttctcatgcatcgtgggctatgtgccaggttggtggtggtctcatggtgcacaggggtcagcacaggctttctgcattccatgatgatttccaggttggacttctgtgggcgcaatcagattaaccatttcttctgcgacctcccgccactcatgcagctctcctgttccagagtttatatcaccgaggtgaccatcttcatcctgtcaattgccgtgctgtgcatttgtttttttctgacactggggccctatgttttcattgtgtcctccatattgagaatcccttccacctctggccggagaaagaccttttccacatgtggctcccacctggctgttgtcactctctactacgggaccatgatctccatgtatgtgtgtcccagtccccacctgttgcctgaaatcaacaagatcatttctgtcttctacactgtggtcacaccactgctgaacccagttatctacagcttgaggaacaaagacttcaaagaagctgttagaaaggtcatgagaaggaaatgtggtattctatggagtacaagtaaaaggaagttcctttattaggtaaagaaaattgcacagaacatgcagtggattaaattcagggttaagtgaatggtagattcagacctttaaacctgaagatcattgtcagaactgcattgaattctgtaggccacaaaacaacagctttttgagggttcctcactagcaactggtcagaagataaactgcctccatcaaaccattttgaggtcagttttgtcctagacactttctaacatcttgttaggaaaatctgattgaattccagtggatggtgattacacacacattactttcacattctacaataagatttccctttgtttacataaccttatgtacagaaagctctgcatcttttaagtactcttagtagactggccttgtggacctaaaacctggtgggtgccattggtgcttattaaatagcagtagaaagaataaataaaaaaaagaagacatttaaaatgtttgttgacctacattatctcctaaagataagaaagaagtaaggcctttgaagtgccaaatattcatctacaagaccttagatgttttagtgttttttgtttaatgaaattgtgggaaggaagggagggagggagggagggaggaaaggagggaagggagggagggaggaaggagaagatcctcagtattctgtgctactgtgagtcctgagagtcagaggatgtcactaaaatgtttaaatcactttttattttcttgagacagagtctcactctgtcgcccaggctggagtgcaatggcacgattttggctcactgcaacctccacctcccaggttcaagcgattctcctgcttcagcctcctgagtagctgggaatacaggcatgcaccaccaggcccagctaatttttgtattttttttttttttagtagagatagagtttcaccctgttggtcaggcaggtcttgaactcctgacctcaagctccacccgcctcggcctctcaaagtgctgggattacaggggtgagccaccgcgcccaggctcttaaatcacttttatagtttattttattcagccagtttagaagatctctacaaatcctgcccattgtttgattcattaattctacaaatatttttaatctcatgaagcatgccacgtcctgtgccacagtctgaatttcccggaaagacaatgacatagaaaggaccaagcaagccaggcacagtggctcacgcctgtaattccagcactttgggaggccaaggtgggcggtcacctgaggtcgggagttcgagaccagcctggccaacatggaaaaaccccgtctctactaaaaatacaaaattagccgggcaaggggcatgcctgttatcccagctactagggaggctgaggcagcagaatcacttgaacccaggaggcagaggttgctgtgagctgagatcatgccattgcactccagcctgggcaacaagaatgaaactccatctcaaaaaaaaaaaaaaaaagaaaaaagaaagaaagggccaagcaagactttaccttaatagaccttccaatgcagaagggaggagaaaaatgtaacaaatcataaagcaatgattgatttatttctacttgtgatgatcactatgaaataataaagtgaggccgggcgcagtagctcacccctgtaatcccagaactttgggaggccgaggcgggcggatcatgaggtcaggagatcgagaccatcctggctaacacagtgaaaccccatctctactaaaaatacaaaaaattagccaggtgtggtggcgggtgcctgtagtcccagctactcgggaggctgaggcaggagaatggcgtgaacccgggaggcgcagcttgcagtgagccgagattgcaccactgcactccagcctgggtgacagagcgagactccatcccaaagaaaagaaataataaagtgcaagctggagcatgaacacaggacgacaagtctgagtcaacatacatgattagggaagctttctatgttatgtagcacttcacctacgcttcaagagtgaggagaacaagagtggagagtagtccagctagggcatggcagaagaaggctgaggaactggggagatagaggaaggagctcagtctggagagaatggtaggggctaatccatctctgtcattaaaaacctcatagggttttcagatcttgcactaagggaaatgattatcaaaacatactaattagggaatgacatgatatattttgcatgtgtgaattccattgctgtgtagagaaaagactaaaagagagcaagagctgttggggtcattgcagtagcccatgcaggagcggaagttggtttgattttaggtttcatgatgtaatccatcacaggaagtacctcatggatggtgaggttgggagtacctgttccggtctcactcgttccagtgcagtggtccctgagcctcagggttcaatgcactttcaccctctagctcatgtaatttcccccaccacgtgtccttgggttctttcacctgcctttttctagccctcacattttctctcctttctgggatttgacctgtgagaaatgtcctcagtccttttttgattcatctggttcaaatattgggtagaaggaaagtgatgcattagaatctcagatcaggaaatgggtgcagtagggagagaagtctcattggtttcagcttttcggtagagtacccaaacgatcaatatcttaccttgcagatggtcatctctgattagtatattagctgtgccttatgtttaactggacttatgttactctaccaaaagctttttctaacgtgttaaatttggtggtgcagggctctgcatacggagagtaaaaaattattgatccacatattagggacagtaagaaattacaccaaaagaacatttggatgtatggatctggagctcagaggaggggcctggccgaaagttaaaaatttggaagtttttaacatatagatgatatttgaaaatatggaaacaaattcgattttttcaggaagagtgcaaaccaatataataagagagtgaagaacagagcacaaaagaattttaaaacattaaatttaattgaaggaaaagaaaccccaaaaggagctggcaggaatgaccacagaagctgggggcacttgtgaggtggctgcatttctctaagaggtgagagtgttgtgagaaggaagaggcacagaggttggggggcacttatgaggtggctgcatttctctaaggggtgagagtgttgggggaaggaagaggcagtcaacatggaagatgaggattaaagggttatcatcaaacttctcatcacagacttcagtgttgttcccgggaagggcagcatgattggcatcggggtagtgcacatcagactagtggcaatggggcaggaatgacttgtaaaacaatggaagcaattgtgtgtgaaacagttatcctgagacatgtaattcttcttcttcttcttttttttttttttttttttttttgagaaggagttttgctcttgttgtccaggctggagtacaatggtgtgatctcggctcaccataacctccgcttaccgggttcaagcgattctcctgcctcagtctccccagtagctgggattacaggggggcgccaatacgcctggctaatttgttgtatttttagtagagacagggtttctccatgttggtcaggctggtctcgaactcccgacctcaggtgatcagcccgcctcggcctcccaaagtgccgagattacaggggtgagccaccgtgcccggccatgagacacataattttgaaaggttgaaagaaaaaattgtgttggaggggcagttgtacttttgtaagatgttagcatctaagtaagtttgaacacttatgggaaaggtccatagtgataaaaaataaatcagaggaatcaatatagaaagtgatgactgatagcctgagataaaacaagaaggcatcttgttcaaatgtggaa

SEQ ID NO: 564 - protein, 337 aa, Homo sapiens
MEPQNTSTVTNFQLLGFQNLLEWQALLFVIFLLIYCLTIIGNVVIITVVSQGLRLHSPMYMFLQHLSFLEVWYTSTTVPLLLANLLSWGQAISFSACMAQLYFFVFLGATECFLLAFMAYDRYLAICSPLRYPFLMHRGLCARLVVVSWCTGVSTGFLHSMMISRLDFCGRNQINHFFCDLPPLMQLSCSRVYITEVTIFILSIAVLCICFFLTLGPYVFIVSSILRIPSTSGRRKTFSTCGSHLAVVTLYYGTMISMYVCPSPHLLPEINKIISVFYTVVTPLLNPVIYSLRNKDFKEAVRKVMRRKCGILWSTSDQPASASQSAEITGVSHRARP

SEQ ID NO: 565 - DNA, 1363 bp, Homo sapiens
  source (1)..(1363)
  CDS (201)..(1163)
ggtgggaggattgcttgatcccaagagtttgaagttagcccgggcaacacagtgaaattgtgtctctaaaaaagaataacataaaatgaactaaaatacacttttaatgtttgctaactgatgtaattgcttcatgtctcatgccctgtatgccctgtgctcttcccacaggtggccttttgccccacccccagcatacaatgatggaaatagccaatgtgagttctccagaagtctttgtcctcctgggcttctccacacgaccctcactagaaactgtcctcttcatagttgtcttgagtttttacatggtatcgatcttgggcaatggcatcatcattctggtctcccatacagatgtgcacctccacacacctatgtacttctttcttgccaacctccccttcctggacatgagcttcaccacgagcattgtcccacagctcctggctaacctctggggaccacagaaaaccataagctatggagggtgtgtggtccagttctatatctcccattggctgggggcaaccgagtgtgtcctgctggccaccatgtcctatgaccgctacgctgccatctgcaggccactccattacactgtcattatgcatccacagctttgccttgggctagctttggcctcctggctggggggtctgaccaccagcatggtgggctccacgctcaccatgctcctaccgctgtgtgggaacaattgcatcgaccacttcttttgcgagatgcccctcattatgcaactggcttgtgtggataccagcctcaatgagatggagatgtacctggccagctttgtctttgttgtcctgcctctggggctcatcctggtctcttacggccacattgcccgggccgtgttgaagatcaggtcagcagaagggcggagaaaggcattcaacacctgttcttcccacgtggctgtggtgtctctgttttacgggagcatcatcttcatgtatctccagccagccaagagcacctcccatgagcagggcaagttcatagctctgttctacaccgtagtcactcctgcgctgaacccacttatttacaccctgaggaacacggaggtgaagagcgccctccggcacatggtattagagaactgctgtggctctgcaggcaagctggcgcaaatttagagactccagtgccttctgagaaggaagatcaagtttacatcgagcaaagtgaccttggaagacagggcacttgggatgtcgtttttcttctaatattgtttgagctcaaggtagatggaaatctgaaaggagtgtgctcatgccatttccagaccaagaaaatacatttattatttgctaattatcatagttttgttcaa

SEQ ID NO: 566 - protein, 320 aa, Homo sapiens
MMEIANVSSPEVFVLLGFSTRPSLETVLFIVVLSFYMVSILGNGIIILVSHTDVHLHTPMYFFLANLPFLDMSFTTSIVPQLLANLWGPQKTISYGGCVVQFYISHWLGATECVLLATMSYDRYAAICRPLHYTVIMHPQLCLGLALASWLGGLTTSMVGSTLTMLLPLCGNNCIDHFFCEMPLIMQLACVDTSLNEMEMYLASFVFVVLPLGLILVSYGHIARAVLKIRSAEGRRKAFNTCSSHVAVVSLFYGSIIFMYLQPAKSTSHEQGKFIALFYTVVTPALNPLIYTLRNTEVKSALRHMVLENCCGSAGKLAQI

SEQ ID NO: 567 - DNA, 3999 bp, Homo sapiens
  source (1)..(3999)
  CDS (201)..(646)
  CDS (694)..(939)
  CDS (3307)..(3799)
  modified_base (3805)..(3904): a, t, c, g, unknown or other
cagaggttagtgcttaacatgtatctgggtggggagctgcttttgctccccactggtgctctggggagccacgtgcctctctttacaccaaaactccctatccaggtccagctccactctccctctgccccagcttccctgcagccctttcctcttgctctttgatgttttgtaggcctgcagctcccaagcacagaggcatgagtggggagaatgtcaccagggtcggcaccttcatcctggtgggcttccccacggccccagggctgcagtacctgctcttcctcctcttcctgctcacctacctctttgtcctggtggagaacctggccatcatcctcaccgtctggagcagcacctccctccacaggcccatgtactactttctgagctccatgtctttcctagagatctggtacgtgtctgacatcacccccaagatgctggagggcttcctcctccagcagaaacgcatctctttcgtcgggtgcatgacgcagctctacttcttcagctccctggtgtgcaccgagtgtgtgcttctggcctccatggcctacgaccgctacgtggccatctgccacccgctgcgctaccacgtccttgtgaccccgggctgtgcctccagctggtgggcttctcctttgtgagtggcttcaccatctccatgatcaaggtctgttttatctccagcgtcacgttctgtggctccaacgtcttgaaccacttcttctgtgacatttcccccatcctcaagctggcctgcacggacttctccactgcagagctggtggatttcattctggccttcatcatcctggtgtttccactcctggccaccatgctgtcatatgcgcacatcaccctggctgtcctgcgcatcccctcgccaccggctgctggagagccttcttcacctgcgcctctcacctcaccgtggtcaccgtcttctatacagccttgcttttcatgtatgtccgccccaggccattgattcccggagctccaacaagctcatctctgttttgtacacagttatcacccccatcttgaaccccttgatatactgcctgaggaataaggaatttaagaatgccttgaaaaacagtcggcttgacgactgcgccgtagaggggaggctttctagtcttctggaacttcatctccaaatacacagccagcctctctgaggaggccatttgactgtttgcattattgtagtaccgcatttatttaaaaattacttccaaatctatttttctccttcaggaaaaaaactgaggttgaggttaatagcataggtattgttgttggtgttgtaataccagtactttcttgtttttgtagatgagcaaagctgtagttagtaaagcttaatgaattttcctcgcctttaaaattaccatgcacatttcagaaagcagcaaaacatgccagatcatctgagattttaaagtccccaataaattgcggtgtgttaaagtactaaatatttaaccatgtggcaaaatgagctccaggtgtccctgaagcaaaatgtgtctgggaaaagtaagggcatgtagccttctgttttatacccaacgaatgttctctgattgtcttgggtggatgccccctctgcctttttcctaaataaacccctactgcatgcccagtcagctgctgagaaaataaaaattgttttattattgcatgagtcgattctgattgaacctaaatatacgcagatgcccaggcaggcagggccacctctgtcctattcactgttggacctggcagcccagcacctaaatacacacagatgcccaggcaggcagggccacctctgtcctattcactgttggacctggcagcccagcacctaaatacacacagatgcccaggcaggcagggccacctctgtcctattcactgttggacctggcagcccagcagagcatctggtgcccgatgggcatgcaggagaaagaggctgggtatgggctgggtgggacgtgtaggggatcaacagtgcaagaagagagaaagcaaacccaggtgggggctgcagggaggagtggaagagggccacctggatggcatgatatctacaccttaaaacaggaatagaggttattcaatttaaagggtggaaaaggaagggtgttccaggcaatttcaatgatagcaaagcctcagaggcaggaagcagcatggagctgtgcagagctcaaagacgcagcctcataggagcctggtgttcaccaaaggggagacttgagacaaaaagaggacagagccccaagagctcacatgtatggtgggtaacatcagagccccgagagctcccaggtgtggcgggcagatcaggacccgagagctcccaggcatggtgggcagatcaggacccccagagctcccaggcgtggcaggcagatcagagccccgagagcttcctgcatggcaggcggatcaggacccccagagctaacaggtgtggcgggcagatcaggacccgagagctcccaggcgtggcgggcaggtcaggacccgagagctcccaggcgtggcaggcagatcaggacccgagggctcacaggtgtggcaggcagcatggactcgtctggcaattaaggtgggggtagaggtacgttcagtttcctgccttggaccgtctatttggcaggtgtgtgacagatggagaggggaccccgtgggaggcaaggaggctgtgagggaggctgctgggattgtgcacgtgagggatgagcactaccctgggttgagcagtggatgcaggatttggatgcagtggccgggcccatttgagagctatgtaagtgttcaaatcagcatttggggttagagtgggaataggaaggaactgaggaatgcatccagatacctgttagggaccgagtagacgccagagctgaaggaggatgtgcagatgagtgaaggctgttgaaggctgagggagtgggtttgggctgtaactgccacagaggcccccagagagtcggaactgatcgcacctgatcttacagtaggcaaaggggtaattcctatcaaatgggtagaaatcagatccaggtgaagaggttcttccaaggccagaggagacatgggatttaatgggagggcaggatggggtagcaaagggctttgtggggtctgatttaagggatcaagctgacttggggtcaggaatttagagcctgcctctcagtgggttgagcaggagagggcatcgggcttgggtttggcttgctcccagtgaagcctggtggtgccttggccacatgcatgcctgttcatccacagctcttcatccacggcccttcatccacggcttttcattcacaacttttcttcaacagctcttcccccacggctcatccacggctcttcacccatggcccttcatccacggctcttcacccatggcccttcatccacggctcttcacccacggcccttcatccacggctcttcacccatgtcccttcacccacggctcttcacccatgtcccttcatccacggctcttcacccacagtccttcatccatgcctcttcacccacggcccttcgtccatgcctcttcacccacggcccttcgtccatgcctcttcacccacggcccttcgtccatgcctcttcacccacggcccttcgtccatgcctcttcacccacggcccttcctccatgcctcttcacccacggcccttcctccatgcctcttcacccacggcccttcctccatgcctcttcacccacggcccttcctccatgcctcttcacccacggctctcgggcaannnnnnnnnnnnnnnnnnnnnnnnnnnnnnnnnnnnnnnnnnnnnnnnnnnnnnnnnnnnnnnnnnnnnnnnnnnnnnnnnnnnnnnnnnnnnnnnnnnntttccaaaaaaaaaaaaaaaaaaaaaaaccagtaagtattattaattcattaattataacaagtgtaccatactcacagaagaagttaataaaat

SEQ ID NO: 568 - protein, 395 aa, Homo sapiens
MSGENVTRVGTFILVGFPTAPGLQYLLFLLFLLTYLFVLVENLAIILTVWSSTSLHRPMYYFLSSMSFLEIWYVSDITPKMLEGFLLQQKRISFVGCMTQLYFFSSLVCTECVLLASMAYDRYVAICHPLRYHVLVTPGCASSWWASPFVTFCGSNVLNHFFCDISPILKLACTDFSTAELVDFILAFIILVFPLLATMLSYAHITLAVLRIPSPPAAGEPSSPAPLTSPCSSSTALHPRLFIHNFSSTALPPRLIHGSSPMALHPRLFTHGPSSTALHPRPFIHGSSPMSLHPRLFTHVPSSTALHPQSFIHASSPTALRPCLFTHGPSSMPLHPRPFVHASSPTALRPCLFTHGPSSMPLHPRPFLHASSPTALPPCLFTHGPSSMPLHPRLS

SEQ ID NO: 569 - DNA, 1336 bp, Homo sapiens
  source (1)..(1336)
  CDS (201)..(482)
  CDS (515)..(645)
  CDS (785)..(1136)
cagaagttttctactttaaaactcagaagatcagcagatcactgctctctcctggtgctctggggagccacgtggcctctctttgcaccaaaactccccatccaagtccagctccactctctctctgcctcagctgccctgcagccctttcctcttgctctttgatgttttgtaggcctgcagctcccaagcacagaggcatgagtggggagaatgtcaccaaggtcagcaccttcatcctggtgggcctccccacggccccagggctgcagtacctgctcttcctcctcttcctgctcacctacctctttgtcctggtggagaacctggccatcatcctcatcgtctggagcagcacctccctccacaggcccatgtactactttctgagctccatgtctttcctggagatctggtacgtgtctgacatcacccccaagatgctggagggcttcctcctccagcagaaacgcatctctttcgtcgggtgcatgacgcagctctacttcttcagctccctggtgtgcaccgagtgtgtgcttctgcctccatggcctacgaccgctacgtggccatctgccacccgctgcgctaccacgtccttgtgaccgccgggctgtgctccagctggtgggcttctcctttgtgagtgcttctccatctccatgatcaaggtctgttttatctccagcgtcacgttctgtggctccaacgtcttgaacccacttcttctgtgacatttcccccatcctcaagctggcctgcacggacttctccactgcagagctggtgatttcatcctggccttcatcatcctggtgtttccgctcctggccaccatactgtcatattggcacatcaccctggctgtcctgcgcatcccctcggccaccggctgctggagagccttctctacctgcgcctctcacctcaccgtggtcaccgtcttctatacagccttgcttttcatgtatgtccggccccaagccattgattcccagagctccaacaagctcatctctgccgtgtacactgttgtcacgccaataattaaccctttgatttactgcctgaggaacaaggaatttaaggacgccttgaaaaaggccttgggcttgggtcaaacttcacactaagacaactaaatgtcctagagtaaaatctgtagtgatgaaacaacattgtatgtggcactttgtgctctttaaattaatttttaagttaaatttaacaaacctacagaactaagtgaaatttaacaaacctacacaactgtgcacaagtaacaagccttcgtctgcatatgttttcacaaaaggactgtgctcatggaacc

SEQ ID NO: 570 - protein, 254 aa, Homo sapiens
MSGENVTKVSTFILVGLPTAPGLQYLLFLLFLLTYLFVLVENLAIILIVWSSTSLHRPMYYFLSSMSFLEIWYVSDITPKMLEGFLLQQKRISFLPGVHRVCASASMAYDRYVAICHPLRYHVLVTAGLCSSWWASPLAGDFILAFIILVFPLLATILSYWHITLAVLRIPSATGCWRAFSTCASHLTVVTVFYTALLFMYVRPQAIDSQSSNKLISAVYTVVTPIINPLIYCLRNKEFKDALKKALGLGQTSH

SEQ ID NO: 571 - DNA, 1258 bp, Homo sapiens
  source (1)..(1258)
  CDS (201)..(1058)
tggcaaatttttatatttgtacattggtatacttggatttaccatgtaaataaattatattaatttttttgacttcttacaggtaaaagagagacatttaaatggaatgggaaaaccaaaccattctggtggaattttttctgaagggacattctgttcacccaaggcttgagttactcttttttgtgctaatcttcataatgtatgtggtcatccttctggggaatggtactctcattttaatcagcatcttggaccctcaccttcacacccctatgtacttctttctggggaacctctccttcttggacatctgctacaccaccacctctattccctccacactagtgagcttcctttcagaaagaaagaccatttccttttctggctgtgcagtgcagatgttccttggcttggccatggggacaacagagtgtgtgcttctgggcatgatggcctttgaccgctatgtggctatctgcaaccctctgagatatcccatcatcatgagcaagaatgcctatgtacccatggctgttgggtcctggtttgcagggattgtcaactctgcagtacaaactacatttgtagtacaattgcctttctgcaggaagaatgtcatcaatcatttctcatgtgaaattctagctgtcatgaagttggcctgtgctgacatctcaggcaatgagttcctcatgcttgtggccacaatattgttcacattgatgccactgctcttgatagttatctcttactcattaatcatttccagcatcctcaagattcactcctctgaggggagaagcaaagctttctctacctgctcagcccatctgactgtggtcataatattctatgggaccatcctcttcatgtatatgaagcccaagtctaaagagacacttaattcagatgacttggatgctaccgacaaaattatatccatgttctatggggtgatgactcccatgatgaatcctttaatctacagtcttagaaacaaggatgtgaaagaggcagtaaaacacctaccgaacagaaggttctttagcaagtgaatgcaaaatgtactggagtgtgaacacacttgatattgttgaaacttcagaattatgttagaattttggatacttttactatttttctgcattttcatatattatgttaaaataatgagatacagcatttcaaaattattgcatgtccactctagagaatttgcaagatacagggcagtaggatgaagaagacagagggg

SEQ ID NO: 572 - protein, 285 aa, Homo sapiens
MYVVILLGNGTLILISILDPHLHTPMYFFLGNLSFLDICYTTTSIPSTLVSFLSERKTISFSGCAVQMFLGLAMGTTECVLLGMMAFDRYVAICNPLRYPIIMSKNAYVPMAVGSWFAGIVNSAVQTTFVVQLPFCRKNVINHFSCEILAVMKLACADISGNEFLMLVATILFTLMPLLLIVISYSLIISSILKIHSSEGRSKAFSTCSAHLTVVIIFYGTILFMYMKPKSKETLNSDDLDATDKIISMFYGVMTPMMNPLIYSLRNKDVKEAVKHLPNRRFFSK

SEQ ID NO: 573 - DNA, 2067 bp, Homo sapiens
  source (1)..(2067)
  CDS (201)..(878)
  CDS (1808)..(1867)
aggccatatgattcccaagccagtgatttccactctgaataagagaagggaaagagcaccagacacaacaaactgcagagcaaaataggtaataaaatgcatgatttagtattcagggaatcctgcgaaataatgttgtagcttgtgctcagtataggaggcattgcacttccttctgctgttcagacaggcaaaaggccatgggaagtttcaacaccagttttgaagatggcttcattttggtgggattctcagattggccgcaactggagcccatcctgtttgtctttatttttattttctactccctaactctctttggcaacaccatcatcatcgctctctcctggctagaccttcggctgcacacacctatgtacttctttctctctcatctgtccctcctggacctctgcttcaccaccagcaccgtgccccagctcctgatcaacctttgcggggtggaccgcaccatcacccgtggagggtgtgtggctcagctcttcatctacctagccctgggctccacagagtgtgtgctcctggtggtgatggcctttgaccgctatgctgctgtctgtcgtccactccactacatggccatcatgcacccccatctctgccagaccctggctatcgcctcctggggtgcgggtttcgtgaactctctgatccagacaggtctcgcaatggccatgcctctctgtggccatcgactgaatcacttcttctgtgagatgcctgtatttctgaagttggcttgtgcggacacagaaggaacagaggccaagatgtttgtggcccgagtcatagtcgtggctgttcctgcagcacttattctaggctcctatgtgcacattgctcatgcagtgctgagggtgaagtcaacggctgggcgcagaaaggcttttgggacttgtgggtcccacctcctagtagttttccttttttatggctcagccatctacacatatctccaatccatccacaattattctgagcgtgagggaaaatttgttgcccttttttatactataattacccccattctcaatcctctcatttatacactaagaaacaaggacgtgaagggggctctgtggaaagtactatggaggggcagggactcagggtaggaggtgaaaaaatgagcagtaaaattttctgtaatagctcttcaatcacagatctttccctgttccttggagggcagttggtcagtaggaaagccctcagtcatcctcagaattggtttttgtttttgttttttggtggcggggggaacagagtttcactcttgttgcccaggctggagtgcagtggcacgatcttggctcactgcaaccttggattcctgggttcaagtgattctcctgcctcagtctcccgagtagctgggattacaggcacccaccaccacgccctactaatttttgtattttcagtagagacagagtttcaccatgttggccaggctggtctcgaactcctgacctcaggtgatccactcgcctcagcctcccaaagtgctgggattacaggtgtgagccaccgcgcatggccgtcctcagagttttagtcccttccttgtttagaaactggaagtagggatctcttgggactctttcttgctcagtgtctgtgatcactgtgcagccatcagtaagtgctggtttttatcacaactttccaaaggaaccagcttgagaagagggtgtattgtgtccacttatggagagtgggatgggttctaggcaagactgagagtgatagaagatttaatagggaatgacaacaccttcccaaggtcaatgactcccaacgtggtgccatgcagatgcactgtgcccagaggcagacagaatgagttcccccgattctaagtaactgcgaccctgccgtagacgctcacatctcagaacccatttctaaggtctctaacagaggttattcatgtccgatatttggagcaaataaggagatcataaacagaggtacttcaaggagcatgcagagtttcaggtttggatgtcatttacacacttgaagaaaaagacaaaatcacta

SEQ ID NO: 574 - protein, 245 aa, Homo sapiens
MGSFNTSFEDGFILVGFSDWPQLEPILFVFIFIFYSLTLFGNTIIIALSWLDLRLHTPMYFFLSHLSLLDLCFTTSTVPQLLINLCGVDRTITRGGCVAQLFIYLALGSTECVLLVVMAFDRYAAVCRPLHYMAIMHPHLCQTLAIASWGAGFVNSLIQTGLAMAMPLCGHRLNHFFCEMPVFLKLACADTEGTEAKMFVARVIVVAVPAALILGSYVHIAHAVLRVNDSQRGAMQMHCAQRQTE

SEQ ID NO: 575 - DNA, 994 bp, Homo sapiens
  source (1)..(994)
  CDS (201)..(794)
tggatccccagcttgacagtcccatgtacttttttgtctctaatctatcctttctggacctctgctataccaccagcactgtcccacagatgctggtcaacctccggggaccagaaaagaccattagctatgggggttgtgttgcccaactctatatatttttggccctgggttctactgaatgcatacttctagccatcatggcctttgaccgttacgctgccatatgcaagccccttcactacccagtcatcatgaaccatagacgctgtatccacatggctgctggcacttggatcagtggctttgctaactcccttgtccagtccactctcacagtggtggccccaagatgtggacagagggtgttggaccatttcttctgtgaagttccagcccttttgaaactagcctgtattgatattcgtgtgaatgaaatggagctcaatgtactaggcgctttgcttctcctgatgccactcaccctcatcctgggcacttatgtgttcattgctcaggcagtaatgagaatctgctctgctgaaagtcgctggaaggctttcaatacctgtgcctcacatttgctggtggtctccctcttctacttcacagccatcagtatgtatgtccagcctccctctagctattctcatgaccgggggaagatcatggctctcttttatggcattgtcacacccaccctcaacccattcatctacacattgagaaacaaggatgtgaaagctgccctgagaaggtcactgactaaagagttttggattaagacaagatgatatctgaaaagaagtcctaagaagcgaggatagatgtgtttgactttcaaaaagatgttggacatggaattgatgagggaacagtatcaagtgacacaaagtttacaagtggaacaagactaagaaaaaaacaattaactcttggtaaaatctacatagcattttttcacttacgagactatctgctttacaatattgga

SEQ ID NO: 576 - protein, 197 aa, Homo sapiens
MAFDRYAAICKPLHYPVIMNHRRCIHMAAGTWISGFANSLVQSTLTVVAPRCGQRVLDHFFCEVPALLKLACIDIRVNEMELNVLGALLLLMPLTLILGTYVFIAQAVMRICSAESRWKAFNTCASHLLVVSLFYFTAISMYVQPPSSYSHDRGKIMALFYGIVTPTLNPFIYTLRNKDVKAALRRSLTKEFWIKTR

SEQ ID NO: 577 - DNA, 1632 bp, Homo sapiens
  source (1)..(1632)
  CDS (201)..(245)
  CDS (491)..(1432)
cctagttactaattacgtttttgttggctgcttctgattggttgagcttaagttctgtgtttctttaacataggcatttacaagaaataccacaaataaagtttcagacatgcttgcaaatcaagcaaggttaaggtcacttaggaggcccaactggctctgtctgctcaaggattcttctggcctcgtctccattttacatgaactgttgcataaataaacacagagtacctgaaacaacggaggtgatcattctgcctaccgagtgttggccacgccaagcttggagtgttgctcttattcttagggagtttatttttaagtaatctcatctgtaaatgggattacaatccacaaactgaccttgtatatgattccattccttctcccagcccagccccacactccaaggttttccctttgcttataaggggtagtcacccttttttatttcgaccttccaaacattctgggagttttcctcctttaggccaactacagcgcagaggagcgctttctcctgctgggtttctccgactggccttccctgcagccggtcctcttcgcccttgtcctcctgtgctacctcctgaccttgacgggcaactcggcgctggtgctgctggcggtgcgcgacccgcgcctgcacacgcccatgtactacttcctctgccacctggccttggtagacgcgggcttcactactagcgtggtgccgccgctgctggccaacctgcgcggaccagcgctctggctgccgcgcagccactgcacggcccagctgtgcgcatcgctggctctgggttcggccgaatgcgtcctcctggcggtgatggctctggaccgcgcggccgcagtgtgccgcccgctgcgctatgcggggctcgtctccccgcgcctatgtcgcacgctggccagcgcctcctggctaagcggcctcaccaactcggttgcgcaaaccgcgctcctggctgagcggccgctgtgcgcgccccgcctgctggaccacttcatctgtgagctgccggcgttgctcaagctggcctgcggaggcgacggagacactaccgagaaccagatgttcgccgcccgcgtggtcatcctgctgctgccgtttgccgtcatcctggcctcctacggtgccgtggcccgagctgtctgttgcatgcggttcagcggaggccggaggagggcggtgggcacgtgtgggtcccacctgacagccgtctgcctgttctacggctcggccatctacacctacctgcagcccgcgcagcgctacaaccaggcacggggcaagttcgtatcgctcttctacaccgtggtcacacctgctctcaacccgctcatctacaccctcaggaataagaaagtgaagggggcagcgaggaggctgctgcggagtctggggagaggccaggctgggcagtgagtagttggggaggggagaaagtattaagccagaacccaaggatggaaataccccttagtgagtcagtttagacttcaggctgttcatttttgtatgataatctgcaagatttgtcctaaggagtccaatgggggatatgttttcctcccgtgaggaaatgtttagttcttgagggaaaaatccctaaatcctctatatac

SEQ ID NO: 578 - protein, 328 aa, Homo sapiens
MNCCINKHRVPETTEANYSAEERFLLLGFSDWPSLQPVLFALVLLCYLLTLTGNSALVLLAVRDPRLHTPMYYFLCHLALVDAGFTTSVVPPLLANLRGPALWLPRSHCTAQLCASLALGSAECVLLAVMALDRAAAVCRPLRYAGLVSPRLCRTLASASWLSGLTNSVAQTALLAERPLCAPRLLDHFICELPALLKLACGGDGDTTENQMFAARVVILLLPFAVILASYGAVARAVCCMRFSGGRRRAVGTCGSHLTAVCLFYGSAIYTYLQPAQRYNQARGKFVSLFYTVVTPALNPLIYTLRNKKVKGAARRLLRSLGRGQAGQ

SEQ ID NO: 579 - DNA, 2027 bp, Homo sapiens
  source (1)..(2027)
  CDS (201)..(306)
  CDS (920)..(1827)
agagatgtagatataaataataatgaagtaatcttcttcctaaaattttgcttgatcacttgcaccttgttgaatttagatatgactctaggttttccagtatttatgagacagtatttagaatgagatttcacctaatagcaagtctggttctctgatccaaagatacaaaccactatttctttctttctttctttgagatggtgtctggctctgtcacccaggctggagtgcagtggtgcaatctcagctccctgcaacctccacctcccaggttcaagcaattctcctgcctcagcctcccaagtagctgggattacaagcgcctgccaccagacctggctaatttttttttttttttttgtatttttagtacagatggggttttaccatgttggccaggctgcttttgaactcctgacctcaagtaatccacctgccttgccctcccaaagtgctaggattacaggcgtaaactgccaccatgcctggaccaatccactttgtctatccaagggtcatgtatggctagaaaaatttactacttctccatttttaaaaaagttggaaaattttgagtgttaattccctcagcttctgaaagtaattttttacatcctgcccaattgaaaaaaagtgatgcaaaatgttggtaaatcatcacagccaggagccaaaaaaaaaaaaaggaactctcccaaatactgggtgctcctcagaccaaataatgatttaatccatacctattaaaattttgggtcaagcatcccacatatccaaggaagtttccattctactattttacaaatcattcaattttgaaggactatatctctgctattcacaggcattcatctttctctcaacaggtaatatgtagctgcaggtgtggaaaacgataatacaagttctttcgaaggcttcatcctggtgggcttctctgatcgtccccacctagagctgatcgtctttgtggttgtcctcatcttttatctgctgactcttcttggcaacatgaccattgtcttgctttcagctctggattcccggctgcacacaccaatgtatttctttttggcaaacctctcattcctggacatgtgtttcaccacaggttccatccctcagatgctctacaacctttggggtccagataagaccatcagctatgtgggttgtgccatccagctgtactttgtcctggccctgggaggggtggagtgtgtcctcctggctgtcatggcatatgaccgctatgctgcagtctgcaaacccctgcactacaccatcatcatgcacccacgtctctgtggacagctggcttcagtggcatggctgagtggctttggcaattctctcataatggcaccccagacattgatgctaccccgctgtgggcacagacgagttgaccactttctctgtgagatgccagcactaattggtatggcctgtgtagacaccatgatgcttgaggcactggcttttgccctggcaatctttatcatcctggcaccactcatcctcattctcatttcttatggttacgttggaggaacagtgcttaggatcaagtcagctgctgggcgaaagaaagccttcaacacttgcagctcgcatctaattgttgtctctctcttctatggtacaatcatatacatgtacctccagccagcaaatacttattcccaggaccagggcaagtttcttacccttttctacacaattgtcactcccagtgttaaccccctgatctatacactaagaaacaaagatgttaaagaggccatgaagaaggtgctagggaaggggagtgcagaaatatagtgggtgattaaactttgggattgtattttgacccatcttctatatatgttgttagacctagcaaatataggaatgttttggcattgcaggctgaagaggcatttaatgagatgggggaattcaatggtttagctaggtcaagaaaataggggctaggagcagtggctcctgcctgtaatcccagcactttgggaggtggg

SEQ ID NO: 580 - protein, 337 aa, Homo sapiens
MVSGSVTQAGVQWCNLSSLQPPPPRFKQFSCLSLPSFILVGFSDRPHLELIVFVVVLIFYLLTLLGNMTIVLLSALDSRLHTPMYFFLANLSFLDMCFTTGSIPQMLYNLWGPDKTISYVGCAIQLYFVLALGGVECVLLAVMAYDRYAAVCKPLHYTIIMHPRLCGQLASVAWLSGFGNSLIMAPQTLMLPRCGHRRVDHFLCEMPALIGMACVDTMMLEALAFALAIFIILAPLILILISYGYVGGTVLRIKSAAGRKKAFNTCSSHLIVVSLFYGTIIYMYLQPANTYSQDQGKFLTLFYTIVTPSVNPLIYTLRNKDVKEAMKKVLGKGSAEI

SEQ ID NO: 581 - DNA, 1210 bp, Homo sapiens
  source (1)..(1210)
  CDS (201)..(1010)
ggataagcggttgttctctctcttttgctctctagatttcacaaggaacaagggcttagaactaaatgttgatgaattactctagtgccactgaattttatctccttggcttccctggctctgaagaactacatcatatcctttttgctatattcttctttttctacttggtgacattaatgggaaacacagtcatcatcatgattgtctgtgtggataaacgtctgcagtcccccatgtatttcttcctcggccacctctctgccctggagatcctggtcacaaccataatcgtccccgtgatgctttggggattgctgctccctgggatgcagacaatatatttgtctgcctgtgttgtccagctcttcttgtaccttgctgtggggacaacagagttcgcattacttggagcaatggctgtggaccgttatgtggctgtctgtaaccctctgaggtacaacatcattatgaacagacacacctgcaactttgtggttcttgtgtcatgggtgtttgggtttctttttcaaatctggccggtctatgtcatgtttcagcttacttactgcaaatcaaatgtggtgaacaattttttttgtgaccgagggcaattgctcaaactatcctgcaataatactcttttcacggagtttatcctcttcttaatggctgtttttgttctctttggttctttgatccctacaattgtctccaacgcctacatcatctccaccattctcaagatcccgtcatcctctggccggaggaaatccttctccacttgtgcctcccacttcacctgtgttgtgattggctacggcagctgcttgtttctctacgtgaaacccaagcaaacgcaggcagctgattacaattgggtagtttccctgatggtttcagtagtaactcctttcctcaatcctttcatcttcaccctccggaatgataaagtcatagaggcccttcgggatggggtgaaacgctgctgtcaactattcaggaattagccttgctctgaggacttttacatggtaaagcacttagtatggattctagaataatctgaaaagaacttgctcatctttgaactgcatcataattattgccattatcaaatgatttgcatgcaacaaaatacttttaagttacagctacggtttttagtatgcttagttgttacttgaaactcagtctattatttttaaga

SEQ ID NO: 582 - protein, 269 aa, Homo sapiens
MIVCVDKRLQSPMYFFLGHLSALEILVTTIIVPVMLWGLLLPGMQTIYLSACVVQLFLYLAVGTTEFALLGAMAVDRYVAVCNPLRYNIIMNRHTCNFVVLVSWVFGFLFQIWPVYVMFQLTYCKSNVVNNFFCDRGQLLKLSCNNTLFTEFILFLMAVFVLFGSLIPTIVSNAYIISTILKIPSSSGRRKSFSTCASHFTCVVIGYGSCLFLYVKPKQTQAADYNWVVSLMVSVVTPFLNPFIFTLRNDKVIEALRDGVKRCCQLFRN

SEQ ID NO: 583 - DNA, 1315 bp, Homo sapiens
  source (1)..(1315)
  CDS (201)..(1115)
tatcattggtgacacaatcccttctataacactggatacttacaatcagtaattaacttaatgtgtagctcaatcactaatgttaaaagtttatcttttaaaaatgactaaattcataaaataatgtctaggtgttttttgacaatctggtcctaagtgatctttttctttttcacagggaaatgggggaaaatcagacaatggtcacagagttcctcctactgggatttctcctgggcccaaggattcagatgctcctctttgggctcttctccctgttctatatcttcaccctgctggggaacggggccatcctggggctcatctcactggactccagactccacacccccatgtacttcttcctctcacacctggctgtcgtcgacatcgcctacacccgcaacacggtgccccagatgctggcgaacctcctgcatccagccaagcccatctcctttgctggttgcatgacgcagacctttctctgtttgagttttggacacagcgaatgtctcctgctggtgctgatgtcctacgatcgttacgtggccatctgccaccctctccgatactccgtcatcatgacctggagagtctgcatcaccctggccgtcacttcctggacgtgtggctccctcctggctctggcccatgtggttctcatcctaagactgcccttctctgggcctcatgaaatcaaccacttcttctgtgaaatcctgtctgtcctcaggctggcctgtgctgacacctggctcaaccaggtggtcatctttgcagcctgcgtgttcttcctggtggggccacccagcctggtgcttgtctcctactcgcacatcctggcggccatcctgaggatccagtctggggagggccgcagaaaggccttctccacctgctcctcccacctctgcgtggtgggactcttctttggcagtgccatcatcatgtacatggcccccaagtcccgccatcctgaggagcagcaaaaggtcttttttctattttacagttttttcaacccaacacttaaccccctgatttacagcctgaggaacggagaggtcaagggtgccctgaggagagcactgggcaaggaaagtcattcctaactggtgtgacatttgactctccctcctcagtcatctcctggaatcttggtaccaaataccacctaagttcactactctctttatatctgagactgaatgaaccaagagactctgcaaagcattcctttttcctgcctgggaagtatttagtttttgatgcatttgttatacttaacattttttaatttaagcacttattg

SEQ ID NO: 584 - protein, 304 aa, Homo sapiens
MVTEFLLLGFLLGPRIQMLLFGLFSLFYIFTLLGNGAILGLISLDSRLHTPMYFFLSHLAVVDIAYTRNTVPQMLANLLHPAKPISFAGCMTQTFLCLSFGHSECLLLVLMSYDRYVAICHPLRYSVIMTWRVCITLAVTSWTCGSLLALAHVVLILRLPFSGPHEINHFFCEILSVLRLACADTWLNQVVIFAACVFFLVGPPSLVLVSYSHILAAILRIQSGEGRRKAFSTCSSHLCVVGLFFGSAIIMYMAPKSRHPEEQQKVFFLFYSFFNPTLNPLIYSLRNGEVKGALRRALGKESHS

SEQ ID NO: 585 - DNA, 1330 bp, Homo sapiens
  source (1)..(1330)
  CDS (201)..(1130)
agacttgggatgacaacatgtacctcaagctatgtatgtgccgaccacagtagcagggacatgtcacctgattctcaggttggaaatagtttcttaacctaatttttcttccttctctcttgagagcaggaccatgtggagcaatgccacctctcttttaatctctgggcttcaaaacaagcagaatcaaggactaaatgatggacaaccactctagtgccactgaattccaccttctaggcttccctgggtcccaaggactacaccacattctttttgctatattctttttcttctatttagtgacattaatgggaaacacggtcatcattgtgattgtctgtgtggataaacgtctgcagtcccccatgtatttcttcctcagccacctctctaccctggagatcctggtcacaaccataattgtccccatgatgctttggggattgctcttcctgggatgcagacagtatctttctctacatgtatcgctcaacttttcctgtgggaccatggagtttgcattacttggagtgatggctgtggaccgttatgtggctgtgtgtaaccctttgaggtacaacatcattatgaacagcagtacctgtatttgggtggtaatagtgtcatgggtgtttggatttctttctgaaatctggcccatctatgccacatttcagtttaccttccgcaaatcaaattcattagaccatttttactgtgaccgagggcaattgctcaaactgtcctgcgataacactcttctcacagagtttatccttttcttaatggctgtttttattctcattggttctttgatccctacgattgtctcctacacctacattatctccaccatcctcaagatcccgtcagcctctggccggaggaaagccttctccacttttgcctcccacttcacctgtgttgtgattggctatggcagctgcttgtttctctacgtgaaacccaagcaaacacagggagttgagtacaataagatagtttccctgttggtttctgtgttaacccccttcctgaatcctttcatctttactcttcggaatgacaaagtcaaagaggccctccgagatgggatgaaacgctgctgtcaactcctgaaagattagctgttctgtaagtcagttttaggtggtccaagcctcagggttaattattaagtcacctagaaaattctaactcctcttttctcttatcctctcattacaaaagtcaaagagtgtgtacaattcgccatcacaccatggaagtagattaggctggtaataatgaaatccattgtctgtccaggagactctcatagccttag

SEQ ID NO: 586 - protein, 309 aa, Homo sapiens
MDNHSSATEFHLLGFPGSQGLHHILFAIFFFFYLVTLMGNTVIIVIVCVDKRLQSPMYFFLSHLSTLEILVTTIIVPMMLWGLLFLGCRQYLSLHVSLNFSCGTMEFALLGVMAVDRYVAVCNPLRYNIIMNSSTCIWVVIVSWVFGFLSEIWPIYATFQFTFRKSNSLDHFYCDRGQLLKLSCDNTLLTEFILFLMAVFILIGSLIPTIVSYTYIISTILKIPSASGRRKAFSTFASHFTCVVIGYGSCLFLYVKPKQTQGVEYNKIVSLLVSVLTPFLNPFIFTLRNDKVKEALRDGMKRCCQLLKD

SEQ ID NO: 587 - DNA, 1342 bp, Homo sapiens
  source (1)..(1342)
  CDS (201)..(1142)
tttgttatctttctttattgccgtttctttctgcttttctgtttatcactcgctggctacttgcctttctctctctattctctgtctctgtccctgtttcttctgtttcaagttcaatggttctctgtctctatctctctgtttctgcctctccgtctgtcttttgtttctcttgcatgcagggccccatactgtggatcatggcaaatctgagccagccctccgaatttgtcctcttgggcttctcctcctttggtgagctgcaggcccttctgtatggccccttcctcatgctttatcttctcgccttcatgggaaacaccatcatcatagttatggtcatagctgacacccacctacatacacccatgtacttcttcctgggcaatttttccctgctggagatcttggtaaccatgactgcagtgcccaggatgctctcagacctgttggtcccccacaaagtcattaccttcactggctgcatggtccagttctacttccacttttccctggggtccacctccttcctcatcctgacagacatggcccttgatcgctttgtggccatctgccacccactgcgctatggcactctgatgagccgggctatgtgtgtccagctggctggggctgcctgggcagctcctttcctagccatggtacccactgtcctctcccgagctcatcttgattactgccatggcgacgtcatcaaccacttcttctgtgacaatgaacctctcctgcagttgtcatgctctgacactcgcctgttggaattctgggactttctgatggccttgacctttgtcctcagctccttcctggtgaccctcatctcctatggctacatagtgaccactgtgctgcggatcccctctgccagcagctgccagaaggctttctccacttgcgggtctcacctcacactggtcttcatcggctacagtagtaccatctttctgtatgtcaggcctggcaaagctcactctgtgcaagtcaggaaggtcgtggccttggtgacttcagttctcaccccctttctcaatccctttatccttaccttctgcaatcagacagttaaaacagtgctacaggggcagatgcagaggctgaaaggcctttgcaaggcacaatgatgagcccagggcccaggggaacctggcctgcctccattgagcagttctgtggggagggagacctccagcaagtgggaagaacactgctgagtttctttagtttttttccctctgagcaataactacagtgagccctgagtgctgcactgtctggcccaaagctcttatggaccaccatggaagagttccctacatcccct

SEQ ID NO: 588 - protein, 313 aa, Homo sapiens
MANLSQPSEFVLLGFSSFGELQALLYGPFLMLYLLAFMGNTIIIVMVIADTHLHTPMYFFLGNFSLLEILVTMTAVPRMLSDLLVPHKVITFTGCMVQFYFHFSLGSTSFLILTDMALDRFVAICHPLRYGTLMSRAMCVQLAGAAWAAPFLAMVPTVLSRAHLDYCHGDVINHFFCDNEPLLQLSCSDTRLLEFWDFLMALTFVLSSFLVTLISYGYIVTTVLRIPSASSCQKAFSTCGSHLTLVFIGYSSTIFLYVRPGKAHSVQVRKVVALVTSVLTPFLNPFILTFCNQTVKTVLQGQMQRLKGLCKAQ

SEQ ID NO: 589 - DNA, 1334 bp, Homo sapiens
  source (1)..(1334)
  CDS (201)..(452)
  CDS (499)..(1134)
atctgaaggtttgaattactttacaataaaaagttaaaaacaaaaacagaaagaaacactgagggaaaaggtgagtcaagtaggcacaaatatatacatgcttcctctgagctcattttgaaataaataactcattttctttgattctccaaccctgacctttcatcacactctggtcctttacaaagtatcattaaggaatgggggacaaccaatcacgggtcacagaattcatcctggttggattccagctcagtgtggagatggaagtgctcctcttctggatcttctccctgttatatctcttcagcctgctggcaaatggcatgatcttggggctcatctgtctggatcccagactgcgcacccccatgtacttcttcctgtcacacttggccgtcattgacatatactatgcttccagcaatttgctcaacatgctggaaaacctagtgaaacacaaaaaaaactatctcgttcatctcttgcattatgcagatggctttgtatttgacttttgctgctgcagtgtgcatgattttggtggtgatgtcctatgacagatttgtggcgatctgccatcccctgcattacactgtcatcatgaactggagagtgtgcacagtactggctattacttcctgggcatgtggattttccctggccctcataaatctaattctccttctaaggctgcccttctgtgggccccaggaggtgaaccacttcttcggtgaaattctgtctgtcctcaaactggcctgtgcagacacctggattaatgaaatttttgtctttgctggtggtgtgtttgtcttagtcgggcccctttccttgatgctgatctcctacatgcgcatcctcttggccatcctgaagatccagtcaaaggagggccgcaaaaaagccttttccacctgctcctcccacctctgtgtggttgggctttactttggcatggccatggtggtttacctggtcccagacaacagtcaacgacagaagcagcagaaaattctcaccctgttttacagccttttcaacccattgctgaaccccctcatctacagcctgcggaatgctcaagtgaagggtgccttatacagagcactgcagaaaaagaggaccatgtgaatgaggggagaattttggttcagttgatctacctttatgagatgtggtttgcttgtgcaatacaactcagaaaaagtccacaagaagaggcttcatttaagaatgaaaattatctagattttggccctgaaaatgggaacaaatttcatgggtatgcccatcttcttatattaagtagccttgttaggatacagaatagc

SEQ ID NO: 590 - protein, 295 aa, Homo sapiens
MGDNQSRVTEFILVGFQLSVEMEVLLFWIFSLLYLFSLLANGMILGLICLDPRLRTPMYFFLSHLAVIDIYYASSNLLNMLENLMALYLTFAAAVCMILVVMSYDRFVAICHPLHYTVIMNWRVCTVLAITSWACGFSLALINLILLLRLPFCGPQEVNHFFGEILSVLKLACADTWINEIFVFAGGVFVLVGPLSLMLISYMRILLAILKIQSKEGRKKAFSTCSSHLCVVGLYFGMAMVVYLVPDNSQRQKQQKILTLFYSLFNPLLNPLIYSLRNAQVKGALYRALQKKRTM

SEQ ID NO: 591 - DNA, 22929 bp, Homo sapiens
  source (1)..(22929)
  CDS (201)..(227)
  CDS (5175)..(6139)
  CDS (7730)..(7872)
  CDS (14638)..(14851)
  CDS (15813)..(16500)
  CDS (21746)..(21846)
  CDS (22615)..(22729)
  modified_base (1)..(106): a, t, c, g, unknown or other
nnnnnnnnnnnnnnnnnnnnnnnnnnnnnnnnnnnnnnnnnnnnnnnnnnnnnnnnnnnnnnnnnnnnnnnnnnnnnnnnnnnnnnnnnnnnnnnnnnnnnnnnnngaattcattgctagcagacccactttacaagaaatactaaaagaaatcctctaggctgaaagcaagccaaatacagacggaaattcaaatccacatgatagaacaaagagcactgataaaggtaattatataattataaaaggcagttttaagtgcatatttcttatttcttctcctatttttcaaagaaatcatataaaacaatatgtatataattatattcttggaaaaaatgtatactctaaaaattacaaaatattgttgaaagaaattaaagaagatccgactggctcattggcgctgtcatggcaggtgtgctgaagaagaccactggcctcatgggattggctgtatgcaagagtccacacaagacaagcaactaaaatcagtctgctaaaatgtaagaggctaagaatattgtacacaaagatccttgatgttcttaagcaaaccccttaaaaagcagcacatagaaagtatacagaacagattgcagatgagaaattggctatggttaaagcagaaccagatgttaaaaaattagaagaccaacttcaaggtgttcaaataaaagaggtgattcttcaggctgaaaatgaactaagtctggcaagaaaaatgatacagtggaaatgataggagatgttcatggaagagcctcctgccaatcaatggaaatggccaatgtaattaataaatgactggtgggttgatgggaaaaataatataattaaatattctgttatattaagagcatgcccatattattgacattttataatcaagaaaagtaatatagaaaatgtttaagagacttaaaattagtgattatggtagtacagtattgtgaatcaatttttgatttgtaaagtattcacacaaattattacaaagatgatatttcttagaacagagaggtcatggaaagacttgaaaattaattttaaaaaatcctacagatcttcaatgcagaggccatactccaaaagtaaagtttctttagtagtatcttcaatacatcattaatttttttatcattctgaagaagaaaaggtccttaattattattgtctaaacaaatttatagatcactgtttaaagtaaatatagtaagagtgaatattttcaaatgtgataaaatagcacaagtggctggtaataaaatttgaaattatagttaacctccttggctgtgatcttacgtatgtaaagtaaaatgtaaatacataattaggccaggtgcagtggctcacacctgtaatcctagcactttgggaggccgaggcagttggatcatttgagatcagaagtttgagaccagcctagccaacatggtgaaaccccatctctaccaaaaatacacaaaaattacctgggtatgatggtgtgtgcttgtgatcccagctactcgggaggctgaggtgggaggatcacttgagcccaaaaggcagaagttgcagtgagcccaggtcacactactgcaccccagcctgggtatcagagcgaaaccccatctcaaagaaaaaaaattaaaattaaaataggctaaagagcctatttttttctccaaagaagatatacaaatacccaatgagcacttgaaaatatgttcaatgtcattagccattagagaaatgcaaatcaaaatcacaattagataccacttcactcttactatgatggttatatataaatataaattttttttttgagacagggtctcactctgtcacccaggctggagtagggtggtatgaacatggctcacagcagccctcaaccttctgggctcaagctattctcctgcctcaatctcccaagtagcggagactacaggcacatgccaccatgcccggctaatttttgtattttttgtagagacgaggtttcaccatgttgcccgggctggtctcgaactcctggtctcaagtgatctgcccacctcggcctcccaaagtgctgggattacaggcgtgagccaccacacccaaccaagatggctataatttaaaaagcagataataacaattgttggtgaggatgtggagaaattgaaaccctcacatattggggaaatgtaaaatgggaaagtaaaatgatactttccattttggaaactggcagttccccaaaaatatacacatagagtttctatatgacctagaaactccactcctaagaaaatatccaagaaaaatgaaaatatacatccacacaaaaacttgtatgcaaatgttcatagcagcactattcgtaacagtcaaaaagtggaatcaacccaaatgtctatcaactgatgaatgggcacataaaatgtggtatatccatacaactgaatattaattagcaataaaaagaaagtaagtcctgatacatgctacaatatagatgaaccttgaaaacattaagctaagtaagagaaaccagtcacaaagggaaacatattttataatttcatttatgtaaaatgtccagaataggcagctcaaaagagacaaaaagtagattaatggtttcctaagactggaggaggttgaggggaaaaggggagtgatggctaaagggtatgggcttcctttggaagtgataaacatgttctaaaatcaactgtggtgatactcaaaactattgcattgtacactttaaattcacccgttgtacactttaaactcacccatttaaagtgtacaatgcaatagttttgtatttgaattgtacattttaaatgggtgaatttaaatgggcggctgcatggtgtttgaattatagctcaataaagatgctatttttaaaaagaactaaccattgattcacacaacatggatgactctcaaaataatcacgctgagtgaaagaagccagattttaaaaagagtacattctgcataattccctttatgtaaaatgctagaaaatgaaagtaatctacagttacagagagcaaatcagtggctgcctggttggggaagaaaggaatggattaccaaggggcatgagaaaaattgtgggtatattagataagttcattatcttgattgtggtcatggtttcatgactgtatacattaaaactaatcaaattatatgatttaaatatagttgtacatcaaccatccttcaataaagctgcaacaaaaaagcatactaaaaagtcacaagacctatttccatgtatagatatacatatgcaaatggccagaaaagtatctggatagatatacacaaaactaataacaatagttacttttggaaaagtgggagagtgggaagggtgggtgaggctgggtatggaagagtgagggaagggtgaggctgggtatgggagagtgggaagggtgggtgaggctgggtatgggagagtggggggagggtgagtctgggtatgggagagtgggaagggtgggtgaggctgggtatggaagagtcaggggagggggaggctgggtatgggagggtgggggaggacaaggatgggtatgggagagtgggaggggtgggtgaggctgggtacggaagagtggggggacggtgaggctgggtatggaagacttgggggtcctctctgcctaggaagggtttgcactcagcagcctgggagcacacctgtcatcagtgctccctcacatctggcaccacctgacatgtagcaggtcctcagttacttctaggttctgggatgagtaagtgagggtggaataaaagacggaaatggtctcctgcaaggaaggcactgagaggaactgtgctccacccaggcccaggatttggcatcgtgtcccatgggattaatgacaccgtgccagataccctggaacactaaggagaggtgactcatgctcttttgctggtgagaggattgtggcagcacctggggcactgatatccatctagaatggtaaaagaacaagcattgtttgaaacctaatagaagcatacacctgctctgagcatggtataggggtcacactgttgggagggctggattctagcttcacctcaccagagacctgttgtgtgacctcagcatccccatctatacaatgggagatccaacaagttggcctctggtcatgttccatgctaataccctaggagttcatgaagtcaaagcagccctcgctctggcccacagaacataggggtttggagctgggccaaaagctccatcagattttagctgggaaacccacaggaaggcagattgtgaaggtccaatccacacagggtagctaatgaaacaggccctgggcaggggacaggggaacatgcccagcgataggcttcaaggtcagcagccctccaacacacagcacggtgtatgctttgttcatggatactagagtaggcctgaagagacaggtcagaccactgcaggccgaggacattccagacagaaggaatagcaaatgcgatggctcagaggcttccttaaagccaggagaatctccacctgctcagagaccacctagcccactagttcctcaaagtgtggtacctacatcagcagcagaagcatcgcccagacgcaccgagtcagaaactgggtttggggcccaacaatctgttttaacaaactttccaggtgattctggtgcatgttaaagtttgagaactgttgatctagcctactgtttcccagactatgctcatagaacacttatctgcagtaggttaatgggttttctgtaaaaggggatccatgatcaaataagtttggggtacagatgttctacattgctttgcaggagtcatagatcacattagcgtagtaaacgctctgagaagtcctgcagtaaagagctttattttttattaatccaatgttgtctcaaattgatttttcagattgcttactaatgttctcattaacattctctcagggaatgctgatctaaatcaatgctcatttttcacatggataaactgaggcctagagaggataaagggattgcccgacgtcacagacagtgagtgtggcagtgctggaaaagatcctgacagtccacctcgtcccagaaagggctctgtgagcttccccgcaccctgtaccctctctccttccatcccagctgtggaccatctcttcagaactctgcagcatggagccgctcaacagaacagaggtgtccgagttctttctgaaaggattttctggctacccagccctggagcatctgctcttccctctgtgctcagccatgtacctggtgaccctcctggggaacacagccatcatggcggtgagcgtgctagatatccacctgcacacgcccgtgtacttcttcctgggcaacctctctaccctggacatctgctacacgcccacctttgtgcctctgatgctggtccacctcctgtcatcccggaagaccatctcctttgctgtctgtgccatccagatgtgtctgagcctgtccacgggctccacggagtgcctgctactggccatcacggcctatgaccgctacctggccatctgccagccactcaggtaccacgtgctcatgagccaccggctctgcgtgctgctgatgggagctgcctgggtcctctgcctcctcaagtcggtgactgagatggtcatctccatgaggctgcccttctgtggccaccacgtggtcagtcacttcacctgcaagatcctggcagtgctgaagctggcatgcggcaacacgtcggtcagcgaagacttcctgctggcgggctccatcctgctgctgcctgtacccctggcattcatctgcctgtcctacttgctcatcctggccaccatcctgagggtgccctcggccgccaggtgctgcaaagccttctccacctgcttggcacacctggctgtagtgctgcttttctacggcaccatcatcttcatgtacttgaagcccaagagtaaggaagcccacatctctgatgaggtcttcacagtcctctatgccatggtcacgaccatgctgaaccccaccatctacagcctgaggaacaaggaggtgaaggaggccgccaggaaggtgtggggcaggagtcgggcctccaggtgagggagggcggggctctgtacagacgcaggtctcaggttagtagctgaggccatcgtatgccaatgccagtgaagacatggcagggctggggctacaggtctggtatcttcatcccagcaaggcagcaccaagtcccgctgatcctgccacagaacagcccccaaatcaccctctgctctcagcatcaccctggccttcacaccagcctcctggctggtcccaagacttcagtcctgttcctccctccaatctctccttcatggggcatctttttgaaatgcacatgtgattgcatcactcttctcactgaaatccctaggtggctccccactgttctcagaacaaagtggaagcttttcagtggggcatttgaggccctcacaagctggccctgcctgactggctccccagccttcctcccctcccaccccatctccctcctcacagccacacacaccagccagttgtggcccccacatgccctgcaccacccagctctgtgctctccttgtttctccccacgaggcagcaccccctcccctatccccagcacacttctccatatgtaaaaggactgactgcctgacccttcaggcccagctcaaatgccacctccaccaggaagccaccccaccttgctcctcttgctgtgcccctctgtgttttcagcattactccaagagcagggagtgtcagattctactctctcccaaggtccagccttgcccaactctaggccctgcacaagtttcttaaatagagatattaacatgtcaatgtaggggtgacaatggcagagcctagagttcttcccaaaactgagcagagctgagacggagtccacagatgacgagaatggcccagcttccctggtaggtgacagtagaggcagcaatgaggcctgtattagtcagggttctcttagagggacagaactaataggatagaggagtttattaagtattaacttacacgatcacaaggttccacaataggctgaggagcaaggagaaccagtccgagtccccagactgaagaacttggagtccattgttcaagggacggaaacatccagcatgggagaaagatgtaggctcggaggctaggcccgtctctccttttcacgtttttctgcctgctttatattcactggaaactgattagatcatgcccaccagattagggtggatctgccttccccagcccactgactcaaatgtgaatctcttttggcaacacccacacagaacacacccaggattcatactttgtatcccacgatccaaagaagttgacactcagtattaaccatcacaaggcccaaagtccaagattcccagacctgtcaggccctgggacaccaatcatccagcccaaagcctgaagccaccccattcctcccacctcaccccgcccagcagcaacagcagcagcagcagcttccagtgctccctttcttgggatccaggcctcacctggcttgaggaagcttgttttacccatcctcacctcatgccctgggaccctgccatagttgcccctgcctggtgctcagcctcttccagcttttctttctgataactcagtgcacaggcagtggacactgacctagattcacggagcatttccattccctgccttgccctggcctccatggtaccatctgtacgatgggagcactgggcttgccctgcaagcagcagtccacctttcctgcccccggctacaggtaagcacagcccctgcatgaggcctgaattcccctcccagggctttctccctgcttcctctgctggccagaacagaggcacagagaagcatggctagaggagtgagagatacccaagcctctctgaccacgcctgagagaaggctgccagtagccatgccagtggccatgccattctgctgggccatggatacatcacagaggtttgggttttattctgtgggctctgggggtttacaatcagattgacttttagcaaggtcactgattagataccattctctctcttgtttaacacaatgtccactgttaggtaccatgtggtgaagtaggcagtgtcatacactgctggtggaaatggggataatttaatatgaacttcctagaaagtaagttggaaatatgaatcaagggccttcaaaacttccagaccccttgacccaacacctctacttctaggaatccagtctaagtaaataataaagggcacaaagatttggacataaggatattaataacagcattatttgtagtaacaaaaaaactgtaataatcttaatgttcaaccatagaagaatatttaaacaaatcccggtggagtccaatgacagtatgtgatgcagccgttaagaatctgttttttttttttttttttcaagacagggtctcactctgttacccaggctggaatgtagtggtacaatcttggctcaccgcagcctcaacttcctgggcccaagcaattctcccacctcagccgtctgaggagctgggactacatgcatgtgccaccacgtccagctaatttatttttaatagagacgaggtctcgctatgttgcccaggctggtcttgaactcctgggctcaaccgatcctcccaactcggtctcccaaagtgctgggattacaggcatgagccaccatgcctggccaggaatcttattttttgaagggtatatgataatgggcaatactcgtaaagtaactagaaaaaaaaaaagcagaacacataacattgtattttagtatgatctcaattttaactttttaagtatttttcttacagatctatgaataagtcagtatctaggaaatactggaaaacgatgaccaaatattaactaacagttgtttcctttgggtgacagggttacagataagtactgttttttaaattattattttcaatattatccaatatttctatgatgaccatgactttgaacttaaaaaataatggtatgtggaagaccaccttgcccgcagtagacgacagatgagaaaggcttcctcctgagggcagggaagggaggaagctgctgtagtcacccaggccctcagtgaggcctgagctggctgggcagtaaaggagagggtggccccaagaaatattggggagatagatatagatgcaaaataacatttgggagctagagatataatatttgggattacagttaacccctgaacaacacgggggtgaggggtgccaactctcctcactgtaaaaaaaaaaatccatgtataactgttgactggaagccttatcaataacataaagtcgattaacacataatttgtatgttatatgttttatatactgtattcttacaataaagctaaagaaaagagaatgttattaagaaagtcataaggaagagacatagatttcctatctattaaacggatcatcataaaagtcttcatcactgtcaacatcatgttgagtaggaggaggaggaagaggagggactagtcttgctgtctcaggggtggcggttcatctgcaagttttttcaaattgtagcaaatctcaaaaaaaaattcccaatatattttttgaaaaatacaagtataagtgaactcatgtagttcaaatccatgttattcaagggtcaactgtatatatatgtaaaataatatttggaagatattttgggattatagaggtggaggagggagaggtgaggaccgtgggcaggtcctgagtttctggtttatttggggtagactgagacactgcatggggaggatgagcacagtagatgggggaagtggggagatggtgagtttgtcttcgacctgctgagttcagggtatccgtggggcagcaagaggacaatatgctatgagcagatagaaaatcaacagtagcaacttttccattttttacttcgacctatgttcttgataaaaaaattccagaagacaaattatagcatcataggaaactttgcaacttctgctgctttattgaaggatgatttttagtctctaagctgtgtcaagttgttattctttattgtgaaaggacaggaaggggaggggagggaacaggaataaagaaatctgtaaaaacagatgcctgattaaatccctgacctaataaagtccctcgcctgtactcggtgtctcccaccttacaaagcaatttactttaagctttgatgaatccaggtccttacggcaatcctggaaggagacaccccatttcacaacccagacacccaggcctagtgaagccgggcttatgggcctggagcctatggcatccaaggcgcagaactgcaacgtgacccagtattcagattctctgtccactctctctcctatgcccacttcacctcagcagggccctcctggggcaggccgaggaacctggagtctctgaagcccaggtcccacagctgccaagcctgcaactttgtgcagttgcagagtttgaactttaaattgggcagggaccatgaggtccctgaaagcagggggcaagcagactgtctatgtggcaggggagcaagaggcaggtcctgggaggcagtggcagggcgaggtgcggggaacctagcccatcccagcaccgtgcacttgctcataatgaactcggcacttcccaaaccacagctcccctcacctggctccagctccctacagacatttaggccatggccagtaggtgagaggtaaggagatttcatctgacccattgcttattctcaagaaatcatttaaaacatttaaaagccaaaatatttgctgggggacagggatagggacaggatggtaataatatcatctactgctcactgactatttaccagtgccaggctctgttctaagagcttcgcatgcttcctgtcactggatccttaaaacaagcccacaaggaaatactgccgtctccatggtataggtaaggaagctgaggctgagaacattgttaacaagtggaagagctggggcttggaccctagtcccgtctgactccagggccatcctcatcttctctgccacacagccaggaagcaggaatcccagatccaggcatttcggggaaattgtaaccgaagctttcttcttgttatgcccctatcttttcttttaaaataatttgtgaagcctaaaataagtattaagtggttaaaattagatttaccagacaatgagactgatatgtcagttagcttgcaaagtaaccctgggtctatcagacctcaggttggaagttgctagaaacatatgaggaaatgtttcagagattacagcatatcggagatcgcttaattggctccacttctcagaaggagaaatctgaccaaagtcatacagcagaaaaggaacaaaggccccgattcaaacctgggacgtgccctcccagtccagggctcattctaggcatcactctgcttctcaagaggcgtaaaaccggggagtgaaaccaggcagctattttcagagacactccaggtcctatccctctgtgactctgatcttccaggccatgaccgagcgtgacactgcgtgacactggtagatggccactagagtagctttctgagagtcataagacgccattgcacccacatgcagaggagctgctcagcagtaattctggttctcctccttctgggcaggtggtaggatgccgcagggccagtgggctgtgtgcagatatgacaaatgtctcctgtggctcagagcagcaagagcctccagtgtgtccttccccagccataacaactggtgacgtcccacagggtggagcctccatctgccaggggctctgagaaccctgagccaccgggaaagccacagtagacatgtagcatgagaaataaaacttcgtcatgctagccactaaaatgatgaggttgtacgttactgcaacataacttagcccatcccaacccagccaccatgggaaccagcttctatctgatgtcccagcctgtgcccatgttacaggcaaagctgtaggcaacctggtaacatggcattttctggacacagagttatttctttagggccacaagccaatggtttcgtgtgctggttctagtttccatgaatgtgttacgatcagacttttaagttgtgaggaaaacccaccatgttactgatgtagctcttcagaaagagcaggtgttactgcaaacaggagactggcactgcccaaagcccttctcctagcaatcacaatagctgtatcattctgttgcggtgtatgtgttggagggggaagggggaattgattttgaggcaagaccttgggttcagcgttcttcgtttgcttttttagagaaagggcctcactctgttgcccaggctggagtgcagtggcacaatcatagttcactgtaacctcgaactcctgggctcaagtactcctcccacctcagccttctgagtagctgtgaccacaggtgcaaaccaccatgcctaggatcaggatttttggcagaacaacactggatgtcaataaatagttcaactcaaatggcaatcactgacacctcctggctgcgggtcactggagggtgacagtgatgaaggacacagccctttcactgcaatagctcatagtctagtcagagagagatatacaagaaaaatgaactataatgaaggcagaatgaacttaacctccactaatagctgtgtgaccatcttgttgtccgggtggtcagttttatgaagccatctgagagaaggctgcacgagacagtggtgtgtgaactgagccttgaaggatgagtagaaaagaaaggcactccagcctgaagaaactgcccaagaagagggatgggactggagcacacaggctttgtccaaaagacagggagtggtctgatgaggctgcagcaggtgtgcatgagggatgcggtggaggcaaggcaggaggacgggccagagcctgcacacacaaaagccctcaaatgcctccgccaggcccacttggtcttactgttagaggtgtgagtgataaagaaaaatgcagtcaggtggtttcccacccttggcctgcttgaaacccccacgcctgtgtccagtgtcagaatttgagatggacatagttctgtctgcagcaacacccccatcagaaacaaagctcttatagttctgctttccagatttcaggttttactttgtctttacatcccagactcagagagaatctcagagatctaaagcctggagagaggagggggaggtgtccaaagtcaccgagtgagtgaatgaatgactgcaaactccatgagggcaggagccaggtctgtctctgctgtattcccagcacctggcccagggcctaacacatagtaggtgctcaataactatttgttgaataagtgaatgaatgaggcttcacacttggggaattctttactttttgccaaacatcaccaagaaaatccctaactgtagatgttcacatggatgatagttaaaggtcagttactgaccaagattacccaagtgcccctatatgttcctgaaactgtcctttaagaatcaccctgattcagggtagaggaaggaaatcctgcacaggctctggagaaagctggtgtcatggaggacactggagcccttgtccaggaggtggctagtatagatggagcaggaacctgtagatagaggaggcacctgtagctgatgatggatgccatcctccatccagcctcagtaacaggtcattgcaccccccggggcagcaccttcaggtgtatgtttcctctgagctacatagcatcccagtcttcaaggaggaagctgagtctgagagaggtcaagtgtcttggtcagtgtcacacagctagtctgaactacagccaggaggcaaagctgggttttggagtcgtgcattcgctatctgctgggtgcctgctattggcagcacttgctgcatgaggtgctggtaggaaggaggcagagtcctgctcttaaggtgtagtagagaagacaggtgcaccacagcgcacaatgacacagagggatggccaagggcagtgggagcacaagaaggcagcaggtaacagcaaggggaaggagagggaggaaaagagatggagcagtgctgggctctggagaatgggcagaacaccccccactggggatgggcgggaggacacgcctccatctcggacaaaggtgcggagctgggaaaagagatggtttcttcaggaaagggtgagccctgcaactcgacaaatcgtggatacaacgaaacaggaggaataagagaaagaagaaatctagcccggaaggacagacagggctccactgctgtcacaaagcactgtcctcacaaccaacccaggagcgaagggcaggaggggagaggtggattatatcttctgagtgataaaagttcacactcagctcctatttttccttcagaccaggggccacctggccataagacatttttccagttctaacaagactactgttctctggacacacctgggcttcctcctaggaatacctgacgctggcctttcccgaggagaagtgagagcagctctgcatggcgatggaggtcacctgggagagaccacagcctcgcccaccgctccctttgcaaagctggtcacaactgaccgcacctccaccagattcgtgcctggcttccctcctcgtgtgacatcattgtcagtatcatttctcctacaaagcaatatggaggccagaaagtaagttgcttggctttcatgaccacagttcagtcctgtgaccagtaactctattgagacatgtacgttcttatgtgtccttttaaacaaaataatgaatggtccatgattccttaaggagagatgaccagaaatcaagcttacacatcctatggggctgaaatatttgatcttcatggcccaaggaacactaggtgagcatcatccattacccacctgccttccggagctcatctcacctgactcagggagtggggcagcgcctgtgacaggtgtggaatccttttgtccacttactttccttactgctatagccccagcacctgatacctagcacagaataggtacttaataaatacttagtggatgaataaatctgaaatactatggccataatttggtcacatgaaaccgtaatgtagaaaagatgcttcctgttaatgaccaaaaacactttggattccaaacgatcattttaaacatgaatctttctctgctgtctcctctgaccccatcctggggagagcagagaggagcctaggggactagaatgtgccccatcctcccctcagtgacgtccacagaactgcagcgctgagaaggccagattgcagatctgaagtccaactccctcattatacagatggtgaaactaaattccagagagggaggctgacctgctgcagctcagacatcaggtcactgggctcccaggccagttggagctttttccaaaaagctgggtggtccagatggaaaaggagagagaatgagatgaagtgggcaaaccagacagctgtgacggaatacgtcctgatggggctacacgagcactgtaacctggaggtggtcctgtttgtgttctgcctgggcatctactccgtgaatgtgttggggaacgccctcctcatagggctgaacgtgctgcaccctcgcctgcacaaccccatgtacttctcagcaacctctccctcatggacatctgcggcacctcctcctttgtgcctctcatgctagacaatttcctggaaacccagaggaccatttccttccctggctgtgccctgcagatgtacctgaccctggcgctgggatcaacggagtgcctgctgctggctgtgatggcatatgaccgttatgtggctatctgccagccgcttaggtacccagagctcatgagtgggcagacctgcatgcagatggcagcgctgagctgggggacaggctttgccaactcactgctacagtccatccttgtctggcacctccccttctgtggccacgtcatcaactacttctatgagatcttggcagtgctaaaactggcctgtggggacatctccctcaatgcgctggcattaatggtggccacagccgtcctgacactggcccccctcttgctcatctgcctgtcttaccttttcatcctgtctgccatccttagggtaccctctgctgcaggccggtgcaaagccttctccacctgctcagcccaccgcacagtggtggtggttttttatgggacaatctccttcatgtacttcaaacccaaggccaaggatcccaacgtggataagactgtcgcattgttctacggggttgtgacgccctcgctgaaccccatcatttacagcctgaggaatgcagaggtgaaagctgccgtcctaactctgctgagaggaggtttgctctccaggaaagcatcccactgctactgctgccctctgcccctgtcagctggcataggctaggttgtgctgtggtcatgacctcaaaccttgagaggcttaaagccattaaggtttgtttcttgctcctgatgcaggtccaccagaggctggtggggcttctgctccgcatcatggtcttcacccctctgggactcaggatgacaaaacagctaccattgggaacactgctggtcaccatgacaaaaagaaaagggaaagtaacaaagcctacactgactcttaaagcttctactcagaagtggctgtgttgcctccacctacatttcagtggccaacacaatggcaacaggaaggcacaggaccacacctattgttaagggggaaaagcacactatcgtgtgtctggatggcaaacgagagggacagagagatttgtgaatggcctaatgactaccacaccagctgacagtgtcaacccaagagctatgggaggtttggctttctttatcctgaccatctatccttcacgggctgctgccaagttaatcgtcccaagaaagctctggttagctcacgtgtggtagctttatactgagtcaaccaaactaggttagagggtgtgggttagggttggccacagagaagtttgcatgtgatttggaaggcaaaagtgggccaggtgtggtggctcatacctgtaatcccagcactttgggagaccgaggtgggaggatcacctgaggccaggagttcgagaccagcccgggaaatgtgatgaaaccctgcctctactaaaaacacaaaaaattagccaggtgtggtggtgcacctgtaatcccagctactagggaggatcgcttgaacttgggaggtggaggctgcagtgagctgagatggcgccactgcactccagcctgggcaacagagtgagactccgtctcaaaaaaaaaaaaaagaaagaaagaaaaaaaatggaacagcaccagacacagtgagggcacccccatgttgctcatctgctggctccccattagcacagcctgtccagtccccaccaggtcacctccttccactgtgctgagtgctgggccaagtgcaagctccatggcaaaggtgacagcttctcctgcaggtcaccagtcactgagattgaaggcataagagccaggcacaggttccagtttgtccttctggattctagtgtgcccttactgcccctcacttcacactcagccttctttcctaactgctggcccagctgagctgtaacagcttcaggcccaacaccaaatgcagaagtaacagttttgcacagatttctccaactgctcccatgactgtaaaggtctaatctttttatcactcatagtggttctgttactttggtcaaacctggattgattcatcactcttctgatcaaggacttttgacagctcccattaccattaagtccaaattcttcagttgaatcctcaaggccctccagaatctgcccccacctgcttcttcagcctgattttccactatgcccttcacatggctgtcccctcgctacattatctgtactgccgcacccccatgtcttcgcacccttgtatgtattgtgctgttctctgataatagctgggactagttttcaaagctaggttagacaccatctctctcatgcatcctttcccattgcactttgagatcgctctctttacatcctacagcactttgtcaggatcttccacttcacacttgtcccatctaacttgcattcatgacacttcaccaccgtgtgagctccttcagggcaggattcagtcgggtctggctcatctctgtagctcccacagcatgttccctatggaaggtttgcgggactgaattgtcactcagaagctttcagaacatcaccctgtggggattgagccctgtgctgctgaacatgccccaggcagctgcaagtgctcaggggtctcagtccagtcgtatgtacagatacatgcaagggtacagcaatatctgccagccacagccctgtattcaaggcaaggaagggctgtttgaatcttgggatctcccccactgagacaagtcaggagacaaccaaggattcccattttgggagcctggagacaggcctggttcagcggctacgtccagcactgtcatattgctggcccccttccctccgggaatcccacatgcacctcaaactgtccaaagtggagctcatcttccccccacccaaagtggtgtcaccatctcagggaatggcaccaccatccccaaatcagaatatcaccatcatcctaggctctctcatacctcaccaccccacacacccaatcagtcaccaagtcctaaagagttcactcctaacagctcttaaattggtcccctcctttccaccgatattgctttaagaaggcttcaccatttctctttcaaatgttccaatagctgtggtcactgcactttgtcctccaaggtctcccaaagtccatcctctgccccagccatcaaaaccccaatctgatgttcctctcctgcttaatctctccaatggctcctcatttcccatagaataaagacccaacctccacttatctatctaatcatatcattggctgcttacctccaccaccccactccacacacaaaagcatgcgcacatgcactggcccaggcacactgaactattcagtgcccggagtaaatatcagtctttcctgcctctgcattcccccttgctgttccctctccatgtccaaacacgtggtgaccttaagctaacatatattggaccacatcacataccagactaggcactatacaagtgttctaagagctttactgactgaagaccacagggagtgatgaaaatctcagggaagggatgccatgtggacactggtgaccacaaagaacactctcccattatcttagcatcatggcaactcagctaatcctagttcaaatgtccctcttcccagacgcccctcatgacccctcctcactgggagggatgcaccccagctccgtctcccacttcagagccttctgtactctgctgactctgtccagaatcccagctatttgggttcaagcatcccagtgacctggctctatacgtcttaatgtggtatttctgatgtaggaacagtattttctaaaatgggaacagacacctagctcacacctcctcactgcttctcactactcacttggccacaccattctctgctcagtgccccatggaagagacgtgattgcagaaagcagataacaaaggcatgttttcctggcttttgggtttcaaaagcctaggtcctgaagggaacagaaaaggcttaaggcatagataaaagattcaggagaggccaggcgcggtggctcacaactgtaatcccagcactttgggaggccgaggcgggtggatcacctgaggccgggagtttgagagcagcctgaccaacatggagaaaccccatctctactaaaaatacaaaaattagctgggcttggtggtgcacacctctaatcccagctactcgggaggctgagacaggagaatcacttgaacccgggaggcagaggttgcagtgagctgagatcgcaccattgcattccagcctgggcaacaagagcaaaactccgtctcaaaaaaaaaaagattcaggagaaaacattaagtaaggcttcctcacctccaatattaacgaaagggggaaagaagagagaggaggagaggatgtagtgagaatactgacacagagggtcccaaaaggaagagtccctgagctccacaccccaggccaagatagatttgcagttttaacagatgcagcaactcatgccttgtctgtcaaaacccagagcagaaacagcttcaaggtgtgtctgcatagccaaggccttagacaactttacgggtctccacatatggcccagaagtggcagagagaaccttaggactgagagagtaatgcaaatgggaacaagaaatctctctgcatcccagatgaactgtctggacctctgactggggaccagatggaatgatggaaatcccggggatggatgaagtatggacactggtgatcagtgagaatgctctcccaacttcttggcattatgtaagaccctcagaactcagctatgaccctcatggaaagagaaggaatcccaaatggacaaatgatcttttctggcactcaggaaaaatgggggctcaaaacagaagttacattcttgtgatatttcttgcacacctgagacgtgtacctgctattccaatttcctgggacctcggcttccttctgtgttgggtgtgggcatcataaggaaagtctgtctcactgatttaaatcatctcagcatacgtatacatacataaacacacacacacacacacacacccctcagatactgcaaatcgggctcaataggaattggggaataggcattagaaactgtttagaaatgaatgcagggcccagatgagcgggatcagactgtgtacagggtgtgacaaaagcctccggcagtagctcccatcagccctgctgattccctgaggggccctctttccccacttccccacacccctgaccccagggggaaaaaaggcatcacagaaccattctgaaccaatcaatcactggagacacacagactccacctgtatcaaacgaggataccagccacccagacagccccagtcccagctccatccatcctgcaatccctcctccacagcacagcacagcccagacgctgcctctgggaaggaagcctgaggccagagttgctgagcctctgggaaaatctggaaatttggtttccccaagatagactccacctcctctggaaagatgctgtgctcctgacagggctttgtctccctgggaaggaatccatgtcttgggaaggctctgcatcccaggaaaggctccacacctgcaggagggactccttggtcctgagggactctgtgcctgcataggctccagtccttaagaaggactccatgatgcagggggactccaggccctcaggaagttctccatgtcctgggaagggctccaggtccctggaagagttttgtgtccttgagaaagactccatgtcctcaagaaatacagcctgtctccttctaagagggctccacacccccagaaagaactctaggaagcattcatatcccctcagggccaggcccaaagcccctctcagctggcacagatgctgctgacagtggcccctcctgggcccacgaggcccagctcctcctgctcgttgatgcatagctggtaaccacagccccgggcccgggctccagatgggaccccgtggtcagtcttggcacgagggggcagcaggaagcccacactgcccgcaatgagcatatgccaaatgctgtgaatgtagaagtagttgtcccgggtctccacaaaagcataaagcaggacggcactgcctgcaataaggctgccagggcacaagtagaaaagccagcggcgccacgtgggtgggtagcagtgccggcggcggacgctgcgtactgtctgggggagacagagaagtggggctcaggaatgccaagccctggaacccaagccagagctggtcactctcaggtttcctctgtatcctggttgtgacctaaagacacctgccaagactggagcggacactgccagcagcaggtgatgacgacagagccaagcccaccttaaactggggaccagatacctggggcccagcacccaagtcctgctgggaccctccccccacatccctccccacccttacccaggctgtggccaagatccccagggcgaagagactgggtccaagcaggttccagagtccatgtcggtcaagctgcagagccatggacagcagcatagctcccagcaaatacagcacctagagaaagagactcaagggctgggctagggccaggtgacagacagcactccagggcctgggtcagaatcatgagaggcacttggaaatgcccccagggagaggtcaggagtggatttcaaggagacttggccatggttgttccccagggcccactctggactgacctgcttgaccacgggctgtaaacgagccatggcaatgacagtgacccacacggacattaaggagcccaggaaatcacagaactgcagcacatcgtagtccatgatgcagaaaaccacgatgcctggctggtcacaggcatgatagaactgaaggaagaaatgacaggcattgagagaacttgaggcagaggtccagatctacaaaaccggaggggtgggcccaggggtggtgtgctgctgtcagtgcagcagaggtgaaaggtcacagatgagaagatctgggaaatgcctgactcc

SEQ ID NO: 592 - protein, 750 aa, Homo sapiens
MIEQRALIKLWTISSELCSMEPLNRTEVSEFFLKGFSGYPALEHLLFPLCSAMYLVTLLGNTAIMAVSVLDIHLHTPVYFFLGNLSTLDICYTPTFVPLMLVHLLSSRKTISFAVCAIQMCLSLSTGSTECLLLAITAYDRYLAICQPLRYHVLMSHRLCVLLMGAAWVLCLLKSVTEMVISMRLPFCGHHVVSHFTCKILAVLKLACGNTSVSEDFLLAGSILLLPVPLAFICLSYLLILATILRVPSAARCCKAFSTCLAHLAVVLLFYGTIIFMYLKPKSKEAHISDEVFTVLYAMVTTMLNPTIYSLRNKEVKEAARKVWGRSRASSAQAVDTDLDSRSISIPCLALASMVPSVRWEHWACPASSSPPFLPPATGIPDAGLSRGEVRAALHGDGGHLGETTASPTAPFAKLVTTDRTSTRFVPGFPPRVTSLSVSFLLQSNMEARNNLSLMDICGTSSFVPLMLDNFLETQRTISFPGCALQMYLTLALGSTECLLLAVMAYDRYVAICQPLRYPELMSGQTCMQMAALSWGTGFANSLLQSILVWHLPFCGHVINYFYEILAVLKLACGDISLNALALMVATAVLTLAPLLLICLSYLFILSAILRVPSAAGRCKAFSTCSAHRTVVVVFYGTISFMYFKPKAKDPNVDKTVALFYGVVTPSLNPIIYSLRNAEGQAQSPSQLAQMLLTVAPPGPTRPSSSCSLMHSWAHSGLTCLTTGCKRAMAMTVTHTDIKEPRKSQNCSTS

SEQ ID NO: 593 - DNA, 1033 bp, Homo sapiens
  source (1)..(1033)
  CDS (201)..(833)
tgggcaacagcactcttattttgatcactatcctagattcacgccttaaaacccccatgtacttattccttggaaatctctctttcatggatatttgttacacatctgcctctgttcctactttgctggtgaacttgctgtcatcccagaaaaccattatcttttctgggtgtgctgtacagatgtatctgtcccttgccatgggctccacagagtgtgtgctcctggccgtgatggcatatgaccgttatgtggccatttgtaacccgctgagatactccatcatcatgaacaggtgcgtctgtgcacggatggctacggtctcctgggtgacgggttgcctgaccgctctgctggaaaccagttttgccctgcagatacccctctgtgggaatctcatcgatcacttcacgtgtgaaattctggcggtgctaaagttagcttgcacaagttcactgctcatgaacaccatcatgctggtggtcagcattctcctcttgccaattccaatgctcttagtttgcatctcttacatcttcatcctttccactattctgagaatcacctcagcagagggaagaaacaaggctttttctacctgtggtgcccatttgactgtggtgattttgtattatggggctgccctctctatgtacctaaagccttcttcatcaaatgcacaaaaaatagacaaaatcatctcgttgctttacggagtgcttacccctatgttgaaccccataatttacagtttaagaaacaaggaagtcaaagatgctatgaagaaattgctgggcaaaataacattgcatcaaacacacgaacatctctgattgggtccctatggttttaccagagatgtgcccctggcagagctcatcagagaaattcgagacaacatacaacctcttagaactctgatcggatcttatctctatataatttcacagttatgagctgcatacacagagtgattgcctattaataatagtaggtttcaatttgcatttgttaatatttcctttttgtgttt

SEQ ID NO: 594 - protein, 210 aa, Homo sapiens
MGSTECVLLAVMAYDRYVAICNPLRYSIIMNRCVCARMATVSWVTGCLTALLETSFALQIPLCGNLIDHFTCEILAVLKLACTSSLLMNTIMLVVSILLLPIPMLLVCISYIFILSTILRITSAEGRNKAFSTCGAHLTVVILYYGAALSMYLKPSSSNAQKIDKIISLLYGVLTPMLNPIIYSLRNKEVKDAMKKLLGKITLHQTHEHL

SEQ ID NO: 595 - DNA, 1258 bp, Homo sapiens; identical to SEQ ID NO: 571
  source (1)..(1258)
  CDS (201)..(1058)

SEQ ID NO: 596 - protein, 285 aa, Homo sapiens; identical to SEQ ID NO: 572

SEQ ID NO: 597 - DNA, 1258 bp, Homo sapiens
  source (1)..(1258)
  CDS (201)..(1058)
ggattatgatacatattcattgatacatgcttgaaagtaatcagagtaagataaatatttgtcttaacatgctctctcttacaggttaaatagagagtaaaatggaatgggaaaaccacaccattctggtggaattttttctgaagggactttctggtcacccaagacttgagttactcttttttgtgctcatcttcataatgtatgtggtcatccttctggggaatggtactctcattttaatcagcatcttggaccctcaccttcacacccctatgtacttctttctggggaacctctccttcttggacatctgctacaccaccacctctattccctccacgctagtgagcttcctttcagaaagaaagaccatttccctttctggctgtgcagtgcagatgttcctcggcttggccatggggacaacagagtgtgtgcttctgggcatgatggcctttgaccgctatgtggctatctgcaaccctctgagatatcccatcatcatgagtaaggatgcctatgtacccatggcagctgggtcctggatcataggagctgtcaattctgcagtacaatcagtgtttgtggtacaattgcctttctgcaggaataacatcatcaatcatttcacctgtgaaattctggctgtcatgaaactggcctgtgctgacatctcagacaatgagttcatcatgcttgtggccacaacattgttcatattgacacctttgttattaatcattgtctcttacacgttaatcattgtgagcatcttcaaaattagctcttccgaggggagaagcaaagcttcctctacctgttcagcccatctgactgtggtcataatattctatgggaccatcctcttcatgtacatgaagcccaagtctaaagagacacttaattcggatgacttggatgctaccgacaaaattatatccatgttctatggggtgatgactcccatgatgaatcctttaatctacagtcttagaaacaaggatgtgaaagaggcagtaaaacacctactgaacagaaggttctttagcaagtgagtgcaaaatgtactggaatatgaacacacttgatattgttgaaacttcagaattatgttagaattttgggtacttttactatttttatgcattttcatatattatgttaaaataatgagatacagcatttcaaaattattgcatgtccactctagagaatttgcaagatacagggcagtaggatgaagaagaaagagggg

SEQ ID NO: 598 - protein, 285 aa, Homo sapiens
MYVVILLGNGTLILISILDPHLHTPMYFFLGNLSFLDICYTTTSIPSTLVSFLSERKTISLSGCAVQMFLGLAMGTTECVLLGMMAFDRYVAICNPLRYPIIMSKDAYVPMAAGSWIIGAVNSAVQSVFVVQLPFCRNNIINHFTCEILAVMKLACADISDNEFIMLVATTLFILTPLLLIIVSYTLIIVSIFKISSSEGRSKASSTCSAHLTVVIIFYGTILFMYMKPKSKETLNSDDLDATDKIISMFYGVMTPMMNPLIYSLRNKDVKEAVKHLLNRRFFSK

SEQ ID NO: 599 - DNA, 1258 bp, Homo sapiens
  source (1)..(1258)
  CDS (201)..(1058)
gaattatggcacatattcattgacacatgcttgaaagtaatcagagtaagataaatatttgtcttaacatgctctgtcttacaagctaaagagggagtaaaatggaatgggaaaaccacaccattctggtggaattttttctgaagggactttctggtcacccaagacttgagttactcttttttgtgctcatcttcataatgtatgtggtcatccttctggggaatggtactctcattttaatcagcatcttggaccctcaccttcacacccctatgtacttctttctggggaacctctccttcttggacatctgctacaccaccacctctattccctccacgctagtgagcttcctttcagaaagaaagaccatttccctttctggctgtgcagtgcagatgttcctcagcttggccatggggacaacagagtgtgtgcttctgggcgtgatggcctttgaccgctatgtggctatctgcaaccctctgagatatcccatcatcatgagtaaggatgcctatgtacccatggcagctgggtcctggatcataggagctgtcaattctgcagtacaaacagtgtttgtggtacaattgcctttctgcaggaataacatcatcaatcatttcacctgtgaaattctagctgtcatgaaactggcctgtgctgacatctcaggcaatgagttcatcctgcttgtgaccacaacattgttcctattgacacctttgttattaattattgtctcttacacgttaatcattttgagcatcttcaaaattagctcttcggaggggagaagcaaaccttcctctacctgctcagctcgtctgactgtggtgataacattctgtgggaccatcttcctcatgtacatgaagcccaagtctcaagagacacttaattcagatgacttggatgccactgacaaacttatattcatattctacagggtgatgactcccatgatgaatcctttaatctacagtcttagaaacaaggatgtgaaggaggcagtaaaacacctactgagaagaaaaaattttaacaagtaaatgagaaaggtgagagtaattttataatcacaatatggaaatcaattagagaaaccaaggttaaacagataggttctcgttgctgtttcacattcatctctcgaagttctaaagctccaaaatacacttctctgattgcgatacataatgaaaagaagtaaataaataaatttcagtgtttggaaataagtttctattct

SEQ ID NO: 600 - protein, 285 aa, Homo sapiens
MYVVILLGNGTLILISILDPHLHTPMYFFLGNLSFLDICYTTTSIPSTLVSFLSERKTISLSGCAVQMFLSLAMGTTECVLLGVMAFDRYVAICNPLRYPIIMSKDAYVPMAAGSWIIGAVNSAVQTVFVVQLPFCRNNIINHFTCEILAVMKLACADISGNEFILLVTTTLFLLTPLLLIIVSYTLIILSIFKISSSEGRSKPSSTCSARLTVVITFCGTIFLMYMKPKSQETLNSDDLDATDKLIFIFYRVMTPMMNPLIYSLRNKDVKEAVKHLLRRKNFNK

SEQ ID NO: 601 - DNA, 1045 bp, Homo sapiens
  source (1)..(1045)
  CDS (201)..(845)
ttggaaatggagtccttatctcagttatcatctttgattctcacctgcacacccccatgtatttcttcctctgtaatctttccttcctcgacgtttgctacacaagttcctctgtcccactaattcttgccagctttctggcagtaaagaaaaaggtttccttctctgggtgtatggtgcaaatgtttatttcttttgccatgggggccacggagtgcatgatcttaggcacgatggcactggaccgctatgtggccatctgctacccactgagataccctgtcatcatgagcaagggtgcctatgtggccatggcagctgggtcctgggtcactgggcttgtggactcagtagtgcagacagcttttgcaatgcagttaccattctgtgctaataatgtcattaaacattttgtctgtgaaattctggctatcttgaaactggcctgtgctgatatttcaatcaatgtgattagtatgacagggtcgaatctgattgttctggttattccattgttagtaatttccatctcttacatatttattgttgccactattctgaggattccttccactgaaggaaaacataaggccttctccacctgctcagcccacctgacagtggtgattatattctatggaaccatcttcttcatgtacgcaaagcctgagtctaaagcctctgttgattcaggtaatgaagacatcattgaggccctcatctcccttttctatggagtgatgactcccatgcttaatcctctcatctatagtctgcgaaacaaggatgtaaaggctgctgtcaaaaacatactgtgtaggaaaaacttttctgatggaaaatgaatactgatttatactacatgacttaatattcaatgctgctgcagacataaaattcagaaagataaaattaccatgtgaaaacaaattttgccatgtggcattcaaaaccatatggtagaaatatttttgggccaggcacagtggctcatgcctataatcccagcactttgggaggccaaggaaggtgggtcacctgaggt

SEQ ID NO: 602 - protein, 214 aa, Homo sapiens
MGATECMILGTMALDRYVAICYPLRYPVIMSKGAYVAMAAGSWVTGLVDSVVQTAFAMQLPFCANNVIKHFVCEILAILKLACADISINVISMTGSNLIVLVIPLLVISISYIFIVATILRIPSTEGKHKAFSTCSAHLTVVIIFYGTIFFMYAKPESKASVDSGNEDIIEALISLFYGVMTPMLNPLIYSLRNKDVKAAVKNILCRKNFSDGK

SEQ ID NO: 603 - DNA, 1800 bp, Homo sapiens
  source (1)..(1800)
  CDS (201)..(978)
  CDS (1575)..(1600)
ttctctaaatgtctcttgggtatttccttgcattcccagtgagattcagagattcttattggcaaagaccatttatttttcttttctttttctcccagcacagttctggccacacagatgcatatctgtaaattgatctaataaataaatactgacacatggaaggtttttatctgcgcagatcacacgaactacaagggatgggaaaaccaggcagagtgaaccaaaccactgtttcagacttcctccttctaggactctctgagtggccagaggagcagcctcttctgtttggcatcttccttggcatgtacctggtcaccatggtggggaacctgctcattatcctggccatcagctctgacccacacctccatactcccatgtacttctttctggccaacctgtcattaactgatgcctgtttcacttctgcctccatccccaaaatgctggccaacattcatacccagagtcagatcatctcgtattctgggtgtcttgcacagctatatttcctccttatgtttggtggccttgacaactgcctgctggctgtgatggcatatgaccgctatgtggccatctgccaaccactccattacagcacatctatgagtccccagctctgtgcactaatgctgggtgtgtgctgggtgctaaccaactgtcctgccctgatgcacacactgttgctgacccgcgtggctttctgtgcccagaaagccatccctcatttctattgtgatcctagtgctctcctgaagcttgcctgctcagatacccatgtaaacgagctgatgatcatcaccatgggcttgctgttcctcactgttcccctcctgctgatcgtcttctcctatgtccgcattttctgggctgtgtttgtcatctcatctcctggagggagatggaaggccttctctacctgtggttctcatctcacggtggttctgctcttctatgggtctcttatgggtgtgtatttacttcctccatcaacttactctacagagagggaaagtagggctgctgttctctatatggtgattattcccacgctaaacccattcatttatagcttgaggaacagagacatgaaggaggctttgggtaaactttttgtcagtggaaaaacattctttttatgattagacatctagacggtgatgtctaatcttgatcaacccctccctgtcttccatcacttcagtaattctactactgtcatgttgatattaggggaaggttatccgttgactctgagttagggatgtaaaaaaaaaaaaaagagtgtttcattcttttattaggctgtggaatgagatgttctgtctcagcctctttcctgaccccagtgaggcaaccattactaacagcaaaactactattcctcctcacatctctaaaaccagcatattagccatagtgaacaaggcatttgttatgaggctctggagctgagcaattctaccccagcaaggcaggcatgggatgaggtgaaggaaggagaatagaaacatttattgactatccacaatgttcctcattattccttacatcagttactttaggtagaattgtgaaaactgtgaattaggatgctaaataacttaacaagtcaatttatgcctatcgactccctttctattttaccactttgtgaggatcatgacaaggaaggtgtgagtgtacatctaaggttaatattgaatgataacaataggagaaaaagaattaatatatgttatggtattccttactatttcatttctttaacttaaaagcactcttctgttg

SEQ ID NO: 604 - protein, 267 aa, Homo sapiens
MGKPGRVNQTTVSDFLLLGLSEWPEEQPLLFGIFLGMYLVTMVGNLLIILAISSDPHLHTPMYFFLANLSLTDACFTSASIPKMLANIHTQSQIISYSGCLAQLYFLLMFGGLDNCLLAVMAYDRYVAICQPLHYSTSMSPQLCALMLGVCWVLTNCPALMHTLLLTRVAFCAQKAIPHFYCDPSALLKLACSDTHVNELMIITMGLLFLTVPLLLIVFSYVRIFWAVFVISSPGGRWKAFSTCGSHLTVVLLFYGSLMGRIVKTVN

SEQ ID NO: 605 - DNA, 1345 bp, Homo sapiens
  source (1)..(1345)
  CDS (201)..(1145)
tattaggttggtgcaaaagtaattgtggtttttagcagtacttttaataatgatgatgttaatgaaaaatccatattatcttggaaaagtcataagcacttaatccctttatcagcacagtgtgtagtttacactggggcacaacagtgactatatgtccaagtctatagaactaattctttttgttcttatggcaacagatggacaacagcaactggaccagtgtgtcccattttgttctcttgggcatttccacccacccagaagagcaaatcccactcttccttgttttctcactcatgtacgcaatcaatatttctggcaacttggccatcatcacactgattctctctgctccacgcctccacatccccatgtacatcttcctcagtaacttggccttgacagacatctgcttcacctccaccacggtccccaagatgctgcagattattttctcccctacaaaggtaatttcctacacaggctgtttagcccaaacttatttcttcatttgcttcgccgtcatggaaaacttcatcctggctgtgatggcctatgacaggtacattgccatctgccaccctttccactacactatgatcctgactagaatgctgtgtgtgaagatggtggtcatgtgccatgctctctcccaccttcatgccatgctgcatacctttctcataggccaactaatcttctgtgcagataacagaatcccccacttcttctgtgacctctacgctctgatgaagatctcctgcaccagcacctacctcaacacccttatgattcacacagaaggtgctgttgtaatcagtggagctctggccttcattactgcctcctatgcctgcatcatcctggtggtcctccggatcccctcagccaagggcaggtggaaaaccttttctacctgcggctcccacctcactgtggtggccatattctatggcaccctcagttgggtctacttccggcccctttccagctattcagtgaccaagggtcgcattataacagtcgtgtacacagtggtgactcccatgctgaaccccttcatctacagcctgaggaatggggatgtcaagggaggcttcatgaaatggatgagcagaatgcagacttttttctttagataaaaccccaaacacagttcagaggtttacctatggttctggagaaataatgttgtgcctcacagatctgctttctttagaactttccagaaatatctaaattagctatatatcatgtgttttctcactggatattgcccagagaaatctattaaatccaaagtacataaaacaaaaaggaaccaccatgtacttagtgtaaa

SEQ ID NO: 606 - protein, 314 aa, Homo sapiens
MDNSNWTSVSHFVLLGISTHPEEQIPLFLVFSLMYAINISGNLAIITLILSAPRLHIPMYIFLSNLALTDICFTSTTVPKMLQIIFSPTKVISYTGCLAQTYFFICFAVMENFILAVMAYDRYIAICHPFHYTMILTRMLCVKMVVMCHALSHLHAMLHTFLIGQLIFCADNRIPHFFCDLYALMKISCTSTYLNTLMIHTEGAVVISGALAFITASYACIILVVLRIPSAKGRWKTFSTCGSHLTVVAIFYGTLSWVYFRPLSSYSVTKGRIITVVYTVVTPMLNPFIYSLRNGDVKGGFMKWMSRMQTFFFR

SEQ ID NO: 607 - DNA, 1333 bp, Homo sapiens
  source (1)..(1333)
  CDS (201)..(1133)
gcaggcaactgagattaaaatatatattaatttctaaatatcccacattaatggaaagaaaccacaatccagataattgtaatgttttaaattttttctttgctgataagaagaataaaaggagaaattttggacagattgtatcagatgttggaagaatctgttacagtgttagtttatctttaggtgaacccacaactatgggaagaaataacctaacaagaccctctgaattcatcctccttggactctcctctcgacctgaggatcagaagccgctctttgctgtgttcctccccatctaccttatcacagtgataggaaacctgcttatcatcctggccatccgctcagacactcgtctccagacgcccatgtacttctttctaagcatcctgtcttttgttgacatttgctatgtgacagtcattatccctaagatgctggtgaacttcttatcagagacaaagaccatctcttacggtgagtgtctgacccagatgtactttttcttagcctttggaaacacagacagttacctgctagcagccatggccattgaccgctatgtggccatatgtaatcccttccactacatcaccattatgagtcacagatgctgtgtcctgcttctggttctctccttctgcattccacattttcactccctcctgcacattcttctgactaatcagctcatcttctgtgcctccaatgtcatccatcactttttctgcgatgatcaaccagtgctaaaattgtcctgttcctcccattttgtcaaagaaatcacagtaatgacagaaggcttggctgtcataatgaccccgttttcatgcatcatcatctcttatttaagaatcctcatcactgttctgaagattccttcagctgctggaaagcgtaaagcattttctacctgtggctctcatctcacagtggtgaccctgttttatggaagcattagctatgtctattttcagcccctgtccaactatactgtcaaggatcaaatagcaacaattatctacaccgtactgactcctatgctaaatccatttatctatagtctgaggaacaaagacatgaagcagggtttggcaaagttgatgcacaggatgaaatgtcagtaaaagacctaaggtcttaagagaataccacagatctcttgccctggactataggttattaatgggtatgtgattctgaaatgattattagattctgaaaggatagtaccttcaatgatggtgtttcattccttacagaagaatgtttattgcatgtattgaagctactcctgaatataatgcctacaaactaagttggatca

SEQ ID NO: 608 - protein, 310 aa, Homo sapiens
MGRNNLTRPSEFILLGLSSRPEDQKPLFAVFLPIYLITVIGNLLIILAIRSDTRLQTPMYFFLSILSFVDICYVTVIIPKMLVNFLSETKTISYGECLTQMYFFLAFGNTDSYLLAAMAIDRYVAICNPFHYITIMSHRCCVLLLVLSFCIPHFHSLLHILLTNQLIFCASNVIHHFFCDDQPVLKLSCSSHFVKEITVMTEGLAVIMTPFSCIIISYLRILITVLKIPSAAGKRKAFSTCGSHLTVVTLFYGSISYVYFQPLSNYTVKDQIATIIYTVLTPMLNPFIYSLRNKDMKQGLAKLMHRMKCQ

SEQ ID NO: 609 - DNA, 1330 bp, Homo sapiens
  source (1)..(1330)
  CDS (201)..(1130)
ctactgtaatattggggtgtttatcttaatcaatatgccctaatgcatctctatctttcatgcagtgatgtgaggtgtggaagaaacacgggagcagccttcctcaggacacctcttgtttatctctctagctctgaaatcacatgaagctgtggatggagagtcacctgatagtcccagaaacccgtcccagcccaaggatgatgagtaaccagacgttggtaaccgagttcatcctgcagggcttttcggagcacccagaataccgggtgttcttattcagctgtttcctcttcctctactctggggccctcacaggtaatgtcctcatcaccttggccatcacgttcaaccctgggctccacgctcctatgtactttttcttactcaacttggctactatggacattatctgcacctcttccatcatgcccaaggcgctggccagtctggtgtcggaagagagctccatctcctacgggggctgcatggcccagctctatttcctcacgtgggctgcatcctcagagctgctgctcctcacggtcatggcctatgaccggtacgcagccatctgccacccgctgcattacagcagcatgatgagcaaggtgttctgcagcgggctggccacagccgtgtggctgctctgcgccgtcaacacggccatccacacggggctgatgctgcgcttggatttctgtggccccaatgtcattatccatttcttctgcgaggtccctcccctgctgcttctctcctgcagctccacctacgtcaacggtgtcatgattgtcctggcggatgctttctacggcatagtgaacttcctgatgaccatcgcgtcctatggcttcatcgtctccagcatcctgaaggtgaagactgcctgggggaggcagaaagccttctccacctgctcttcccacctcaccgtggtgtgcatgtattacaccgctgtcttctacgcctacataagcccggtctctggctacagcgcagggaagagcaagttggctggcctgctgtacactgtgctgagtcctaccctcaaccccctcatctatactttgagaaacaaggaggtcaaagcagccctcaggaagcttttccctttcttcagaaattaacttgtgtcttctgaagtttttgtccttggagactgcagttttagtggagtctgatgagcaagtttctggactgggaggtaaatagacttgttttttctaacccagcagaacctgtgcatggatgagctgggagtgctggttccctgagacttggtgatggggggattgcggtaggtgtgacccaccagcctctgagacac

SEQ ID NO: 610 - protein, 309 aa, Homo sapiens
MMSNQTLVTEFILQGFSEHPEYRVFLFSCFLFLYSGALTGNVLITLAITFNPGLHAPMYFFLLNLATMDIICTSSIMPKALASLVSEESSISYGGCMAQLYFLTWAASSELLLLTVMAYDRYAAICHPLHYSSMMSKVFCSGLATAVWLLCAVNTAIHTGLMLRLDFCGPNVIIHFFCEVPPLLLLSCSSTYVNGVMIVLADAFYGIVNFLMTIASYGFIVSSILKVKTAWGRQKAFSTCSSHLTVVCMYYTAVFYAYISPVSGYSAGKSKLAGLLYTVLSPTLNPLIYTLRNKEVKAALRKLFPFFRN

SEQ ID NO: 611 - DNA, 1339 bp, Homo sapiens
  source (1)..(1339)
  CDS (201)..(1139)
atgtcctgtctttttctaaggcattttccaaatctctgcactgctgaaatacttccttattaagtagcacttccacttaataagcagaagaaactttattcaagtgacttactgcaatggctgcagccaaatgataccatgttaggttttcttgtaggaatatgaagacttttagttcctttcttcagatcggcagaaatatgcatcaaggaaaccaaaccaccatcactgaattcattctcctgggatttttcaagcaggatgagcatcaaaacctcctctttgtgcttttcttgggtatgtacctggtcactgtgattgggaacgggctcatcattgtggctatcagcttggatacgtaccttcatacccccatgtatctcttccttgccaatctatcctttgctgatatttcctccatttccaactcagtccccaaaatgctggtgaatattcaaaccaagagtcaatccatctcttatgagagctgcatcacacagatgtacttttctattgtgtttgtcgtcattgacaatttgctcttggggaccatggcctatgaccactttgtggcgatctgccaccctctgaattatacaattctcatgcggcccaggttcggcattttgctcacagtcatctcatggttcctcagtaatattattgctctgacacacacccttctgctcattcaattgctcttctgtaaccacaacactctcccacacttcttctgtgacttggcccctctgctcaaactgtcctgttcagatacattgatcaatgagcttgtgttgtttattgtgggtttatcagttatcatcttcccctttacactcagcttcttttcctatgtctgcatcatcagagctgtcctgagagtatcttccacacagggaaagtggaaagccttctccacttgtggctctcacctgacagttgtattactgttctacggaaccattgtaggcgtgtactttttcccctcctccactcaccctgaggacactgataagattggtgctgtcctattcactgtggtgacacccatgataaaccccttcatctacagcttgaggaataaggatatgaaaggtgccctgagaaagctcatcaatagaaaaatttcttccctttgatgccctggacctctacattcttttagtccacataatcagataaatgattcagcccagagcgtatggcacagttgtgatggttcaacttttgatgaacttgcaggtatctgtctcctattccaacctctgaaggggttggagcttttccacttagctcttgtcttggaaacaaaacctgtaactgccatggtaagtcacaa

SEQ ID NO: 612 - protein, 312 aa, Homo sapiens
MHQGNQTTITEFILLGFFKQDEHQNLLFVLFLGMYLVTVIGNGLIIVAISLDTYLHTPMYLFLANLSFADISSISNSVPKMLVNIQTKSQSISYESCITQMYFSIVFVVIDNLLLGTMAYDHFVAICHPLNYTILMRPRFGILLTVISWFLSNIIALTHTLLLIQLLFCNHNTLPHFFCDLAPLLKLSCSDTLINELVLFIVGLSVIIFPFTLSFFSYVCIIRAVLRVSSTQGKWKAFSTCGSHLTVVLLFYGTIVGVYFFPSSTHPEDTDKIGAVLFTVVTPMINPFIYSLRNKDMKGALRKLINRKISSL

SEQ ID NO: 613 - DNA, 1339 bp, Homo sapiens
  source (1)..(1339)
  CDS (201)..(1139)
tgtggcattttccaaatctctgcactgctgaaatacttccttattaagtagcacttccacttaataagcagaagaagctttattgctcatcagcttaaaggaagtgccttactgtaatggctgcagccaaatgacaccatgttaaattttcttgtaggtgtatgaagactttgtgttcctttcttcagatcagcagaaatatgcatcaagaaaaccaaaccaccatcactgaattcattctcctgggactctccaaccaggctgaacatcaaaacctcctctttgtgcttttcctgagtatgtatgtggtcactgtggttgggaacgggctcatcattgtggctatcagcttggatatataccttcacacccccatgtatctcttccttgcctacctatcctttgctgatatttcctccatttccaactcagtccccaaaatgctggtgaatattcaaaccaacagccaatccatctcttatgagagctgcatcacacagatgtacttttctattgtgtttgtcgtcactgacaatttgcttttggggaccatggccttcgaccactttgtggcgatctgccaccctctgaactatacaactttcatgcgggccaggttcggcactttgctcacagtcatctcgtggttcctcagtaatattattgctcttacacacacccttctgctcattcaattgctcttctgtgaccacaacactctcccacacttcttctgtgacttggcccctctgctcaaactgtcctgttcagatacaatgatcaatgagcttgtgttgtttattgtgggtttatcagttatcatcttcccctttgtactcatcttcttctcctatgtctgcatcatcagagctgtcctgggagtatcatccacacagggaaagtggaaagccttctccacttgtggctctcacctgacaattgcattactgttctacggaaccactgtaggcgtgtactttttcccctcctccactcaccctgaggacactgataagattggtgctgtcctattcactgtggtgacacccatgatgaaccccttcatctacagcttgaggaataaggatatgaaaggtgccctgagaaagctcatcaatagaaaaatttcttccctttgatgccctggacatctacattcttttagtccacataatcagataaatgattcagcccagagtgtatgacacagttgtgacggttcaacttttgatgaacttgcagatgtctgtctcctattccaacctctaaggggattggagcttttccacttagctcttgtcttggaaacaaaatctgtaactgccatggtaagtcacaa

SEQ ID NO: 614 - protein, 312 aa, Homo sapiens
MHQENQTTITEFILLGLSNQAEHQNLLFVLFLSMYVVTVVGNGLIIVAISLDIYLHTPMYLFLAYLSFADISSISNSVPKMLVNIQTNSQSISYESCITQMYFSIVFVVTDNLLLGTMAFDHFVAICHPLNYTTFMRARFGTLLTVISWFLSNIIALTHTLLLIQLLFCDHNTLPHFFCDLAPLLKLSCSDTMINELVLFIVGLSVIIFPFVLIFFSYVCIIRAVLGVSSTQGKWKAFSTCGSHLTIALLFYGTTVGVYFFPSSTHPEDTDKIGAVLFTVVTPMMNPFIYSLRNKDMKGALRKLINRKISSL

SEQ ID NO: 615 - DNA, 1144 bp, Homo sapiens
  source (1)..(1144)
  CDS (201)..(944)
tagcttgaagagcaaactgtcaggaaatgtccaacacaaatggcagtgcaatcacagaattcattttacttgggctcacagattgcccggaactccagtctctgctttttgtgctgtttctggttgtttacctcgtcaccctgctaggcaacctgggcatgataatgttaatgagactggactctcgccttcacacgcccatgtacttcttcctcactaacttagcctttgtggatttgtgctatacatcaaatgcaaccccgcagatgtcgactaatatcgtatctgagaagaccatttcctttgctggttgctttacacagtgctacattttcattgcccttctactcactgagttttacatgctggcagcaatggcctatgaccgctatgtggccatatatgaccctctgcgctacagtgtgaaaacgtccaggagagtttgcatctgcttggccacatttccctatgtctatggcttctcagatggactcttccaggccatcctgaccttccgcctgaccttctgtagatccagtgtcatcaaccacttctactgtgctgacccgccgctcattaagctttcttgttctgatacttatgtcaaagagcatgccatgttcatatctgctggcttcaacctctccagctccctcaccatcgtcttggtgtcctatgccttcattcttgctgccatcctccggatcaaatcagcagagggaaggcacaaggcattctccacctgtggttcccatatgatggctgtcaccctgttttatgggactctcttttgcatgtatataagaccaccaacagataagactgttgaggaatctaaaataatagctgtcttttacacctttgtgagtccggtacttaatccattgatctacagtctgaggaataaagatgtgaagcaggccttgaagaatgtcctgagatgaaatattgtcatgaccatggtgatgcctttgtttcctaataaacattaaatcgaaatctttggctcacatgtcctagcgttctgatggtgagttttaatattctctgtgagtctatgttgagtgtctcagctaaaaagctcatgctgggtaaaaatgagatttttctaggctttgctcctccacatatattccatgaatca

SEQ ID NO: 616 - protein, 247 aa, Homo sapiens
MYFFLTNLAFVDLCYTSNATPQMSTNIVSEKTISFAGCFTQCYIFIALLLTEFYMLAAMAYDRYVAIYDPLRYSVKTSRRVCICLATFPYVYGFSDGLFQAILTFRLTFCRSSVINHFYCADPPLIKLSCSDTYVKEHAMFISAGFNLSSSLTIVLVSYAFILAAILRIKSAEGRHKAFSTCGSHMMAVTLFYGTLFCMYIRPPTDKTVEESKIIAVFYTFVSPVLNPLIYSLRNKDVKQALKNVLR

SEQ ID NO: 617 - DNA, 1396 bp, Homo sapiens
  source (1)..(1396)
  CDS (201)..(1196)
tttgtattgaaagattcattatgaagaaataaacagcaaggaagcactagactagagcagaacaaaactgtaagatgaacttgtacatctttctcttgcttactgggtaagaccaaggtggtgtggcttgatggataatgacatctcaggaaagggatacagctatttattccattaatgtcagttttgttgcaaaggggatgactagccgctctgtgtgtgagaagatgaccatgacaacggagaaccccaaccagactgtggtgagccacttcttcctggagggtttgaggtacaccgctaaacattctagcctcttcttcctcctcttcctcctcatctacagcatcactgtggctgggaatctcctcatcctcctaactgtgggctctgactctcacctcagcttacccatgtaccacttcctggggcacctctccttcctggatgcctgtttgtctacagtgacagtgcccaaggtcatggcaggcctgctgactctggatgggaaggtgatctcctttgagggctgtgccgtacagctttattgcttccactttctggccagcactgagtgcttcctgtacacagtcatggcctatgaccgctatctggctatctgtcaacccctgcactacccagtggccatgaacagaaggatgtgtgcagaaatggctggaatcacctgggccataggtgccacgcacgctgcaatccacacctccctcaccttccgcctgctctactgtgggccttgccacattgcctacttcttctgcgacataccccctgtcctaaagctcgcctgtacagacaccaccattaatgagctagtcatgcttgccagcattggcatcgtggctgcaggctgcctcatcctcatcgttatttcctacatcttcatcgtggcagctgtgttgcgcatccgcacagcccagggccggcagcgggccttctccccctgcactgcccagctcactggggtgctcctgtactacgtgccacctgtctgtatctacctgcagcctcgctccagtgaggcaggagctggggcccctgctgtcttctacacaatcgtaactccaatgctcaacccattcatttacactttgcggaacaaggaggtgaagcatgctctgcaaaggcttttgtgcagcagcttccgagagtctacagcaggcagcccacccccatagtctgtgctatcaaaactcacaatttgcctgccaggaaagcaactattcacatctcaaatcattcaggtggaaatcagaataactgagttgcaactcagtcacacactttcccccagctttggccaaatggtctacctcactctctcccttgcaaacacttcatctagaaaatgaggaggctggattagatgatgtctaga

SEQ ID NO: 618 - protein, 331 aa, Homo sapiens
MTSRSVCEKMTMTTENPNQTVVSHFFLEGLRYTAKHSSLFFLLFLLIYSITVAGNLLILLTVGSDSHLSLPMYHFLGHLSFLDACLSTVTVPKVMAGLLTLDGKVISFEGCAVQLYCFHFLASTECFLYTVMAYDRYLAICQPLHYPVAMNRRMCAEMAGITWAIGATHAAIHTSLTFRLLYCGPCHIAYFFCDIPPVLKLACTDTTINELVMLASIGIVAAGCLILIVISYIFIVAAVLRIRTAQGRQRAFSPCTAQLTGVLLYYVPPVCIYLQPRSSEAGAGAPAVFYTIVTPMLNPFIYTLRNKEVKHALQRLLCSSFRESTAGSPPP

SEQ ID NO: 619 - DNA, 1372 bp, Homo sapiens
  source (1)..(1372)
  CDS (201)..(1172)
caatattgccatgctgcttactattgtaatttgtttctctctttgtaagtcacgtgcagaccaaactatagatcaacatattctcagaatgtaaggaagtgttgggtgttcaatattattttaccgattggttaaatgatgattggtagctatagaccagttacagagttctgtttcatttcccctgcaggtgactgaagatgaaccctgaaaactggactcaggtaacaagctttgtccttctgggtttccccagtagccacctcatacagttcctggtgttcctggggttaatggtgacctacattgtaacagccacaggcaagctgctaattattgtgctcagctggatagaccaacgcctgcacatacagatgtacttcttcctgcggaatttctccttcctggagctgttgctggtaactgttgtggttcccaagatgcttgtcgtcatcctcacgggggatcacaccatctcatttgtcagctgcatcatccagtcctacctctacttctttctaggcaccactgacttcttcctcttggccgtcatgtctctggatcgttacctggcaatctgccgaccactccgctatgagaccctgatgaatggccatgtctgttcccaactagtgctggcctcctggctagctggattcctctgggtcctttgccccactgtcctcatggccagcctgcctttctgtggccccaatggtattgaccacttctttcgtgacagttggcccttgctcaggctttcttgtggggacacccacctgctgaaactggtggctttcatgctctctacgttggtgttactgggctcactggctctgacctcagtttcctatgcctgcattcttgccactgttctcagggcccctacagctgctgagcgaaggaaagcgttttccacttgcgcctcgcatcttacagtggtggtcatcatctatggcagttccatctttctctacattcgtatgtcagaggctcagtccaaactgctcaacaaaggtgcctccgtcctgagctgcatcatcacacccctcttgaacccattcatcttcactctccgcaatgacaaggtgcagcaagcactgagagaagccttggggtggcccaggctcactgctgtgatgaaactgagggtcacaagtcaaaggaaatgatcttattaaatgggagattaaatgtttattgaaaattttttaaatgtgcaagaagtttaagggatgtaggcaacactgttcacttttctcagctaatgaaagaacagtcttcataaatatacaacatgaaatacggtggtaaaccttcattttccctccctacaaccttccttgtgcctcctcctccccacagagaaggc

SEQ ID NO: 620 - protein, 323 aa, Homo sapiens
MNPENWTQVTSFVLLGFPSSHLIQFLVFLGLMVTYIVTATGKLLIIVLSWIDQRLHIQMYFFLRNFSFLELLLVTVVVPKMLVVILTGDHTISFVSCIIQSYLYFFLGTTDFFLLAVMSLDRYLAICRPLRYETLMNGHVCSQLVLASWLAGFLWVLCPTVLMASLPFCGPNGIDHFFRDSWPLLRLSCGDTHLLKLVAFMLSTLVLLGSLALTSVSYACILATVLRAPTAAERRKAFSTCASHLTVVVIIYGSSIFLYIRMSEAQSKLLNKGASVLSCIITPLLNPFIFTLRNDKVQQALREALGWPRLTAVMKLRVTSQRK

SEQ ID NO: 621 - DNA, 1183 bp, Homo sapiens
  source (1)..(1183)
  CDS (201)..(983)
ttcattgacaaggtcataccaaccagatgaatccagcaaatcattcccaggtggcaggatttgttctactggggctctctcaggtttgggagcttcggtttgttttcttcactgttttctctgctgtgtattttatgactgtagtgggaaaccttcttattgtggtcatagtgacctccgacccacacctgcacacaaccatgtattttctcttgggcaatctttctttcctggacttttgctactcttccatcacagcacctaggatgctggttgacttgctctcaggcaaccctaccatttcctttggtggatgcctgactcaactcttcttcttccacttcattggaggcatcaagatcttcctgctgactgtcatggcgtatgaccgctacattgccatttcccagcccctgcactacacgctcattatgaatcagactgtctgtgcactccttatggcagcctcctgggtggggggcttcatccactccatagtacagattgcattgactatccagctgccattctgtgggcctgacaagctggacaacttttattgtgatgtgcctcagctgatcaaattggcctgcacagatacctttgtcttagagcttttaatggtgtctaacaatggcctggtgaccctgatgtgttttctggtgcttctgggatcgtacacagcactgctagtcatgctccgaagccactcacgggagggccgcagcaaggccctgtctacctgtgcctctcacattgctgtggtgaccttaatctttgtgccttgcatctacgtctatacaaggccttttcggacattccccatggacaaggccgtctctgtgctatacacaattgtcacccccatgctgaatcctgccatctataccctgagaaacaaggaagtgatcatggccatgaagaagctgtggaggaggaaaaaggaccctattggtcccctggagcacagacccttacattagcagaggcagtgacctgagaatctgaaagatgctacagggtattagcctgctggataggaccctcgaggtagataaaatctatgcctacttcttctccattgttcttaacctcaatcaggttctggtgacctgaactattagccacaatagaagatgggatgagtgtcttagaactgcttctaaatgcctcccagataaaa

SEQ ID NO: 622 - protein, 260 aa, Homo sapiens
MYFLLGNLSFLDFCYSSITAPRMLVDLLSGNPTISFGGCLTQLFFFHFIGGIKIFLLTVMAYDRYIAISQPLHYTLIMNQTVCALLMAASWVGGFIHSIVQIALTIQLPFCGPDKLDNFYCDVPQLIKLACTDTFVLELLMVSNNGLVTLMCFLVLLGSYTALLVMLRSHSREGRSKALSTCASHIAVVTLIFVPCIYVYTRPFRTFPMDKAVSVLYTIVTPMLNPAIYTLRNKEVIMAMKKLWRRKKDPIGPLEHRPLH

SEQ ID NO: 623 - DNA, 1339 bp, Homo sapiens
  source (1)..(1339)
  CDS (201)..(1139)
aaagaaccagccaaatcatcagtaaagaaggggtggccagtgcgtatttgtatgtgggtgagggaggacctgaaatagagtcaggtcccgaaggaccttacatagtcagaatcctccttattttttgtcccaactataatcaactgtgctctaagattctaaggagctttcttgcttgtctttctagggtatcaagggacatgagaaatggcacagtaatcacagaattcatcctgctaggctttcctgttatccaaggcctacaaacacctctctttattgcaatctttctcacctacatattaacccttgcaggcaatgggcttattattgccactgtgtgggctgagcccaggctacaaattccaatgtacttcttcctttgtaacttgtctttcttagaaatctggtacaccaccacagtcatccccaaactgctaggaacctttgtagtggcaagaacagtaatctgcatgtcctgctgcctgctgcaggccttcttccacttcttcgtgggcaccaccgagttcttgatcctcactatcatgtcttttgaccgctacctcaccatctgcaatccccttcaccaccccaccatcatgaccagcaaactctgcctgcagctggccctgagctcctgggtggtgggcttcaccattgtcttttgtcagacgatgctgctcatccagttgccattctgtggcaataatgttatcagtcatttctactgtgatgttgggcccagtttgaaagccgcctgcatagacaccagcattttggaactcctgggcgtcatagcaaccatccttgtgatcccagggtcacttctctttaatatgatttcttatatctacattctgtccgcaatcctacgaattccttcagccactggccaccaaaagactttctctacctgtgcctcgcacctgacagttgtctccctgctctacggggctgttctgttcatgtacctaagacccacagcacactcctcctttaagattaataaggtggtgtctgtgctaaatactatcctcaccccccttctgaatccctttatttatactattagaaacaaggaggtgaagggagccttaagaaaggcaatgacttgcccaaagactggtcatgcaaagtaaaacatgcaacacatcaaagtgagcttaatgcagataaaaacaatgaaagttgagagaggattttggagaagtttggtaaaacaggctccccccaaatcccagaagttctgattcaatgctatagtaagataaagatgcaaaagcaaaccatgatggttaaggtctcccatgagaacttgttacatgtaaatgaactagga

SEQ ID NO: 624 - protein, 312 aa, Homo sapiens
MRNGTVITEFILLGFPVIQGLQTPLFIAIFLTYILTLAGNGLIIATVWAEPRLQIPMYFFLCNLSFLEIWYTTTVIPKLLGTFVVARTVICMSCCLLQAFFHFFVGTTEFLILTIMSFDRYLTICNPLHHPTIMTSKLCLQLALSSWVVGFTIVFCQTMLLIQLPFCGNNVISHFYCDVGPSLKAACIDTSILELLGVIATILVIPGSLLFNMISYIYILSAILRIPSATGHQKTFSTCASHLTVVSLLYGAVLFMYLRPTAHSSFKINKVVSVLNTILTPLLNPFIYTIRNKEVKGALRKAMTCPKTGHAK

SEQ ID NO: 625 - DNA, 1162 bp, Homo sapiens
  source (1)..(1162)
  CDS (201)..(962)
ttcagttggcaccattcccaatatagatggggactggaaatgacaccactgtggtagagtttactcttttggggttatctgaggatactacagtttgtgctattttatttcttgtgtttctaggaatttatgttgtcaccttaatgggtaatatcagcataattgtattgatcagaagaagtcatcatcttcatacacccatgtacattttcctctgccatttggcctttgtagacattgggtactcctcatcagtcacacctgtcatgctcatgagcttcctaaggaaagaaacctctctccctgttgctggttgtgtggcccagctctgttctgtagtgacgtttggtacggccgagtgcttcctgctggctgccatggcctatgatcgctatgtggccatctgctcacccctgctctactctacctgcatgtcccctggagtctgcatcatcttagtgggcatgtcctacctgggtggatgtgtgaatgcttggacattcattggctgcttattaagactgtccttctgtgggccaaataaagtcaatcactttttctgtgactattcaccacttttgaagcttgcttgttcccatgattttacttttgaaataattccagctatctcttctggatctatcattgtggccactgtgtgtgtcatagccatatcctacatctatatcctcatcaccatcctgaagatgcactccaccaagggccgccacaaggccttctccacctgcacctcccacctcactgcagtcactctgttctatgggaccattaccttcatttatgtgatgcccaagtccagctactcaactgaccagaacaaggtggtgtctgtgttctacaccgtggtgattcccatgttgaaccccctgatctacagcctcaggaacaaggagattaagggggctctgaagagagagcttagaataaaaatattttcttgatactagttagtttgaagaatctgatatattaatattctatatataataataataagacaccgagtgtttgtggtcaaaatttatctgtccatagaccattacccagtgtggagctttttagtcaatcaggagggaagattttcagatagaataggaaattagaagtccatcttgctttacctttaataaaatttaattaa

SEQ ID NO: 626 - protein, 253 aa, Homo sapiens
MYIFLCHLAFVDIGYSSSVTPVMLMSFLRKETSLPVAGCVAQLCSVVTFGTAECFLLAAMAYDRYVAICSPLLYSTCMSPGVCIILVGMSYLGGCVNAWTFIGCLLRLSFCGPNKVNHFFCDYSPLLKLACSHDFTFEIIPAISSGSIIVATVCVIAISYIYILITILKMHSTKGRHKAFSTCTSHLTAVTLFYGTITFIYVMPKSSYSTDQNKVVSVFYTVVIPMLNPLIYSLRNKEIKGALKRELRIKIFS

SEQ ID NO: 627 - DNA, 1330 bp, Homo sapiens
  source (1)..(1330)
  CDS (201)..(1130)
agtatttcccttttaaattatttatttagcacattcttagaagtcaaatgcctagatggagaatacatgggtaaaaacaaagaacaaattccctgaggtcctggaaatacaagaagccaaattagtcactaattataaatcatatcttgcttatttaggattctcaactctcagctggaactcatatcaacacctgagaaatggaaaatcaaaacaatgtgactgaattcattcttctgggtctcacagagaacctggagctgtggaaaatattttctgctgtgtttcttgtcatgtatgtagccacagtgctggaaaatctacttattgtggtaactattatcacaagtcagagtctgaggtcacctatgtatttttttcttaccttcttgtcccttttggatgtcatgttctcatctgtcgttgcccccaaggtgattgtagacaccctctccaagagcactaccatctctctcaaaggctgcctcacccagctgtttgtggagcatttctttggtggtgtggggatcatcctcctcactgtgatggcctatgaccgctacgtggccatctgtaagcccctgcactacacgatcatcatgagtccacgggtgtgctgcctaatggtaggaggggcttgggtggggggatttatgcacgcaatgatacaacttctcttcatgtatcaaatacccttctgtggtcctaatatcatagatcactttatatgtgatttgtttcagttgttgacacttgcctgcacggacacccacatcctgggcctcttagttaccctcaacagtgggatgatgtgtgtggccatctttcttatcttaattgcgtcctacacggtcatcctatgctccctgaagtcttacagctctaaagggcggcacaaagccctctctacctgcagctcccacctcacggtggttgtattgttctttgtcccctgtattttcttgtacatgaggcctgtggtcactcaccccatagacaaggcaatggctgtgtcagactcaatcatcacacccatgttaaatcccttgatctatacactgaggaatgcagaggtgaaaagtgccatgaagaaactctggatgaaatgggaggctttggctgggaaataactgcaatgctgagaacatcatgtatttcccaaaaggagaagtcattctttcagaaatgtgtaagagctaaaactgtccattcctcggtggctgtcaaaggaagctttttttgagacagagtctcactgtgtcacccaggctggagtgcggtggcactatcttggctctgcagtctccacctcctgggtgattattctgcc

SEQ ID NO: 628 - protein, 309 aa, Homo sapiens
MENQNNVTEFILLGLTENLELWKIFSAVFLVMYVATVLENLLIVVTIITSQSLRSPMYFFLTFLSLLDVMFSSVVAPKVIVDTLSKSTTISLKGCLTQLFVEHFFGGVGIILLTVMAYDRYVAICKPLHYTIIMSPRVCCLMVGGAWVGGFMHAMIQLLFMYQIPFCGPNIIDHFICDLFQLLTLACTDTHILGLLVTLNSGMMCVAIFLILIASYTVILCSLKSYSSKGRHKALSTCSSHLTVVVLFFVPCIFLYMRPVVTHPIDKAMAVSDSIITPMLNPLIYTLRNAEVKSAMKKLWMKWEALAGK

SEQ ID NO: 629 - DNA, 1222 bp, Homo sapiens
  source (1)..(1222)
  CDS (201)..(1022)
caggattcttaaagaagaaagtaaagactttatgcaggaagcagcctatggctgtaggaaggaacaacacaattgtgacaaaattcattctcctgggactttcagaccatcctcaaatgaagattttccttttcatgttatttctggggctctacctcctgacgttggcctggaacttaagcctcattgccctcattaagatggactctcacctgcacatgcccatgtacttcttcctcagtaacctgtccttcctggacatctgctatgtgtcctccaccgcccctaagatgctgtctgacatcatcacagagcagaaaaccatttcctttgttggctgtgccactcagtactttgtcttctgtgggatggggctgactgaatgctttctcctggcagctatggcctatgaccggtatgctgcaatctgcaaccccttgctttacacagtcctcatatcccatacactttgtttaaagatggtggttggcgcctatgtgggtggattccttagttctttcattgaaacatactctgtctatcagcatgatttctgtgggccctatatgatcaaccactttttctgtgacctccctccagtcctggctctgtcctgctctgataccttcaccagcgaggtggtgaccttcatagtcagtgttgtcgttggaatagtgtctgtgctagtggtcctcatctcttatggttacattgttgctgctgttgtgaagatcagctcagctacaggtaggacaaaggccttcagcacttgtgcctctcacctgactgctgtgaccctcttctatggttctggattcttcatgtacatgcgacccagttccagctactccctaaacagggacaaggtggtgtccatattctatgccttggtgatccccgtggtgaatcccatcatctacagttttaggaataaggagattaaaaatgccatgaggaaagccatggaaagggaccccgggatttctcacggtggaccattcatttttatgaccttgggctaatgtttacaatgaagctgtgagctaggtgaattgtgcagacatttacataattttaaactagttgatctatagaatgaattgtgggaatcaggcttttttccctcctgcttaagatttcactaatagtttgcctgttggctattagaaaacattttggccattgttgcttgtaaaatgaatagcattgtatagtttgagat

SEQ ID NO: 630 - protein, 273 aa, Homo sapiens
MDSHLHMPMYFFLSNLSFLDICYVSSTAPKMLSDIITEQKTISFVGCATQYFVFCGMGLTECFLLAAMAYDRYAAICNPLLYTVLISHTLCLKMVVGAYVGGFLSSFIETYSVYQHDFCGPYMINHFFCDLPPVLALSCSDTFTSEVVTFIVSVVVGIVSVLVVLISYGYIVAAVVKISSATGRTKAFSTCASHLTAVTLFYGSGFFMYMRPSSSYSLNRDKVVSIFYALVIPVVNPIIYSFRNKEIKNAMRKAMERDPGISHGGPFIFMTLG

SEQ ID NO: 631 - DNA, 1303 bp, Homo sapiens
  source (1)..(1303)
  CDS (201)..(1103)
tgtataaattataatgctatataatctgctataaaatgaaaacatgcacatcatccctgaggtttctcagcaagtgcctgaatactgaatggagaagttgggaaagcatcatatgaaaccagagatgccttgaggcccatgtcatctttcctcttaggtccaatactctactcatggaaggaataaataaaactgcaaagatgcagtttttctttcgtccattctcacctgaccctgaggtccagatgctgatttttgtggtcttcctgatgatgtatctgaccagcctcggtggaaatgctacaattgcagtcattgttcagatcaatcattccctccacacccccatgtactttttcctggctaatctggcagttctagaaatcttctatacatcttccatcaccccattggccttggcaaacctcctttcaatgggcaaaactcctgtttccatcacgggatgtggcacccagatgtttttctttgtcttcttgggtggggctgattgtgtcctgctggtagtcatggcttatgaccggtttatagcgatctgtcaccctctgcgatacaggctcatcatgagctggtccttgtgtgtggagctgctggtaggctccttggtgctggggttcctgttgtcactgccactcaccattttaatcttccatctcccattctgccacaatgatgagatctaccacttctactgtgacatgcctgcagtcatgcgcctggcttgtgcagacacacgcgttcacaagactgctctgtatatcatcagcttcatcgtccttagcatccccctctcattgatctccatctcctatgtcttcatcgtggtagccattttacggatccggtcagcagaagggcgccagcaagcctactctacctgctcttctcacatcttagtggtcctcctgcagtatggctgcaccagctttatatacttgtcccccagttccagctactctcctgagatgggccgggtggtatctgtggcctacacatttatcactcccattttaaaccccttgatctatagtttgaggaacaaggaactgaaagatgccctaaggaaagcattgagaaaattctaggtaggatgatcctatgatttacttaaattgggacacttctgagagtgaaatgggatgctactaataattttgctgaaaggacatgcataggtgggtgtgtggctcacgcctataatcccagcactttgggaggccaaggcaggcagatcacttgaggttgggagtttgagaccagcctcaccaacatggagaaacccatc

SEQ ID NO: 632 - protein, 300 aa, Homo sapiens [sequence omitted]

SEQ ID NO: 633 - DNA, 1201 bp, Homo sapiens
  source (1)..(1201)
  CDS (201)..(1001)
aataaatatcccagtgctttcacatgacatggtttaaaaccaaagagaataaagaggatgattgaatggagatggaaaactgcaccagggtaaaagaatttattttccttggcctgacccagaatcgggaagtgagcttagtcttatttcttttcctactcttggtgtatgtgacaactttgctgggaaacctcctcatcatggtcactgttacctgtgaatctcgccttcacacgcccatgtattttttgctccataatttatctattgccgatatctgcttctcttccatcacagtgcccaaggttctggtggaccttctgtctgaaagaaagaccatctccttcaatcattgcttcactcagatgtttctattccaccttattggaggggtggatgtattttctctttcggtgatggcattggatcgatatgtggccatctccaagcccctgcactatgcgactatcatgagtagagaccattgcattgggctcacagtggctgcctggttggggggctttgtccactccatcgtgcagatttccctgttgctcccactccctttctgcggacccaatgttcttgacactttctactgtgatgtccaccgggtcctcaaactggcccatacagacattttcatacttgaactactaatgatttccaacaatggactgctcaccacactgtggtttttcctgctcctggtgtcctacatagtcatattatcattacccaagtctcaggcaggagagggcaggaggaaagccatctccacctgcacctcccacatcactgtggtgaccctgcatttcgtgccctgcatctatgtctatgcccggcccttcactgccctccccatggataaggccatctctgtcaccttcactgtcatctcccctctgctcaaccccttgatctacactctgaggaaccatgagatgaagtcagccatgaggagactgaagagaagacttgtgccttctgatagaaaatagaaaaaaaaatcctcagctcttcatcaccaaagatatcttatatttattatttttcccatgaagtcatattcatatattcaaatatattgtcaaaccaactacacttagtaataattaatttttctatttatgttagtaagtaactgataagcttctggtcagggagagattcacaccttctaattgaaaataaaccagag

SEQ ID NO: 634 - protein, 266 aa, Homo sapiens
MVTVTCESRLHTPMYFLLHNLSIADICFSSITVPKVLVDLLSERKTISFNHCFTQMFLFHLIGGVDVFSLSVMALDRYVAISKPLHYATIMSRDHCIGLTVAAWLGGFVHSIVQISLLLPLPFCGPNVLDTFYCDVHRVLKLAHTDIFILELLMISNNGLLTTLWFFLLLVSYIVILSLPKSQAGEGRRKAISTCTSHITVVTLHFVPCIYVYARPFTALPMDKAISVTFTVISPLLNPLIYTLRNHEMKSAMRRLKRRLVPSDRK

SEQ ID NO: 635 - DNA, 1033 bp, Homo sapiens
  source (1)..(1033)
  CDS (201)..(833)
accagcaatggtctgctgctcctggccatcaccatagaagcccggctccacatgcccatgtacctcctgcttgggcagctctctctcatggacctcctgttcacatctgttgtcactcccaaggccttgcggactttctgcgcagagaaaacactatctcctttggaggctgtgcacttcagatgttcctggcactgacaatgggtagcgctgaggacctcctactggccttcatggcctatgacaggtatgtggccatttgtcatcctctgaaatacatgaccctcatgagcccaagagtctgctggatcatggtggccacatcctggatcctggcatccctgattgctataggacataccatgtacactatgcacctccctttctgtgtgtcctgggaaatcaggcatctgctctgtgagatcccacccttgctgaagttggcctgtgctgatacctccaggtatgagcttataatatacgtgacaggtgtgactttcctcttgctccccatttctgccattgtggcctcctacacactagtcctattcactgtgcttcgtatgccatcaaatgaggggaggaagaaagcccttgtcacctgctcttcccacctgattgtggtcgggatgttctatggagctgccacattcatgtatgtcttgcccagttccttccacagccccaaacaagacaacatcatctctgttttctacacaattgtcactccagccctgaatccactcatctacagcctgaggaataaggaggtcatgcgggccttgaggagggtcctgggaaaatacatactgctggcacattccacgctctagggaaggatcatggcttgcctctcaccattcctcctccagataaaattctctactcactcattcctgctccaaataaaattctctactcactcattcttcaatactgtactctgagatgatagatacattttttaaattttacttttattttcaactgtgaatctggtgtgtacaatgatcttgagttaaactcatttggc

SEQ ID NO: 636 - protein, 210 aa, Homo sapiens
MGSAEDLLLAFMAYDRYVAICHPLKYMTLMSPRVCWIMVATSWILASLIAIGHTMYTMHLPFCVSWEIRHLLCEIPPLLKLACADTSRYELIIYVTGVTFLLLPISAIVASYTLVLFTVLRMPSNEGRKKALVTCSSHLIVVGMFYGAATFMYVLPSSFHSPKQDNIISVFYTIVTPALNPLIYSLRNKEVMRALRRVLGKYILLAHSTL

SEQ ID NO: 637 - DNA, 1330 bp, Homo sapiens
  source (1)..(1330)
  CDS (201)..(1130)
cctgaaacactcacgctggtcttcctgcaaagaagaccagcaaatagcaggacgaggggaggagggcggggaggatgcatcagcagagagcccaggatgtttcactagcaccaaaggctcaagactagccgtccaagattagccttttaatggggttcttgtctcccatgcatccctgcaggcctcccacccagaggagaatggctgcaggaaatcactctacagtgacagagttcattctcaagggtttaacgaagagagcagacctccagctccccctctttctcctcttcctcgggatctacttggtcaccatcgtggggaacctgggcatgatcactctaatttgtctgaactctcagctgcacacccccatgtactactttctcagcaatctgtcactcatggatctctgctactcctccgtcattacccctaagatgctggtgaactttgtgtcagagaaaaacatcatctcctacgcagggtgcatgtcacagctctacttcttccttgtttttgtcattgctgagtgttacatgctgacagtgatggcctacgaccgctatgttgccatctgccaccctttgctttacaacatcattatgtctcatcacacctgcctgctgctggtggctgtggtctacgccatcggactcattggctccacaatagaaactggcctcatgttaaaactgccctattgtgagcacctcatcagtcactacttctgtgacatcctccctctcatgaagctgtcctgctctagcacctatgatgttgagatgacagtcttcttttcggctggattcaacatcatagtcacgagcttaacagttcttgtttcttacaccttcattctctccagcatcctcggcatcagcaccacagaggggagatccaaagccttcagcacctgcagctcccaccttgcagccgtgggaatgttctatggatcaactgcattcatgtacttaaaaccctccacaatcagttccttgacccaggagaatgtggcctctgtgttctacaccacggtaatccccatgttgaatcccctaatctacagcctgaggaacaaggaagtaaaggctgccgtgcagaaaacgctgaggggtaaactgttttgatgcaaatgttattgttccttttcaatttagtggtaattgttataaataccagagtgacagcttctgaatgctggccagctgtggatggaaaataatcacttctccacatggctgggtgaatgggcatttttccttctttcctcttccttccctcttcctttcctcttccttcctcttccttccttcctcttctttcctct

SEQ ID NO: 638 - protein, 309 aa, Homo sapiens
MAAGNHSTVTEFILKGLTKRADLQLPLFLLFLGIYLVTIVGNLGMITLICLNSQLHTPMYYFLSNLSLMDLCYSSVITPKMLVNFVSEKNIISYAGCMSQLYFFLVFVIAECYMLTVMAYDRYVAICHPLLYNIIMSHHTCLLLVAVVYAIGLIGSTIETGLMLKLPYCEHLISHYFCDILPLMKLSCSSTYDVEMTVFFSAGFNIIVTSLTVLVSYTFILSSILGISTTEGRSKAFSTCSSHLAAVGMFYGSTAFMYLKPSTISSLTQENVASVFYTTVIPMLNPLIYSLRNKEVKAAVQKTLRGKLF

SEQ ID NO: 639 - DNA, 1312 bp, Homo sapiens
  source (1)..(1312)
  CDS (201)..(1112)
tctgccttcttggaatgctcttcccttctacacataactaactcctactcacctttcaatttccaactcagaagcatctcagctatgcaagggctttcatgtaattcacccactgagtgaagaagtattttgtatcatttcagatcacaccacccaaattgctgcctcttgatgatgacctcttggctaacatacacaacatgactgaattcatttttctggtactttctcccaaccaggaggtgcagagggtttgctttgtgatatttctgttcttgtacacagcaattgtgctggggaatttcctcattgtgctcactgtcatgaccagcagaagccttggttcccccatgtacttcttcctcagctacctctccttcatggagatctgctactcctccgctacagcccccaaactcatctcagatctgctggctgaaaggaaagtcatatcttggtggggctgcatggcacagcttttcttcttgcacttctttggtggcactgagattttcctgctcactgtgatggcctatgaccactatgtggccatctgcaagcccctcagctacaccaccatcatgaactggcaggtgtgtactgtccttgtaggaatagcatgggtgggaggcttcatgcattcctttgcacaaatccttctcatcttccacctgctcttctgtggccccaatgtgatcaatcactatttctgtgacctagttccccttctcaaacttgcctgctctgacaccttcctcattggtctgctgattgttgccaatggaggcaccctgtctgtgatcagttttggggtcctcttagcatcctatatggtcatcttgctccatctgagaacctggagctctgaagggtggtgcaaagccctctccacctgtgggtcccatttcgctgtggttatcttgttctttgggccctgcgtcttcaactctctgaggccttctaccactctgcccatagacaagatggtggctgtgttctacacagtgataaccgcgatcctgaaccctgtcatctactctctgagaaatgctgaaatgaggaaggccatgaagaggctgtggattaggacattgagactaaatgagaaatagaggctgagtctttgtattgatacttgggtttagaatgactgttgagtccaaactgaaggagcagaataggttgaaggaaagttcacaggacctgttagttgcagattattctacctggcctctctctttaaaaagttcattttcataacttgaatagtatttctttttgtggaggtactaattttttaccaccataaata

SEQ ID NO: 640 - protein, 303 aa, Homo sapiens
MTEFIFLVLSPNQEVQRVCFVIFLFLYTAIVLGNFLIVLTVMTSRSLGSPMYFFLSYLSFMEICYSSATAPKLISDLLAERKVISWWGCMAQLFFLHFFGGTEIFLLTVMAYDHYVAICKPLSYTTIMNWQVCTVLVGIAWVGGFMHSFAQILLIFHLLFCGPNVINHYFCDLVPLLKLACSDTFLIGLLIVANGGTLSVISFGVLLASYMVILLHLRTWSSEGWCKALSTCGSHFAVVILFFGPCVFNSLRPSTTLPIDKMVAVFYTVITAILNPVIYSLRNAEMRKAMKRLWIRTLRLNEK

SEQ ID NO: 641 - DNA, 3168 bp, Homo sapiens
  source (1)..(3168)
  CDS (201)..(324)
  CDS (2268)..(2968)
tattaggaagaggatcacagggctatggaaaccccctgcggtcctgggagtaatatcatcctctctccctctgaaaataggaagattttcacaggggtgtgtacaccccctgcgatattgggagtaagatcatcctctccacccaggaaatgactaacaaggtcacgagggggtgtactccccctgcgatattgggagtaatgtcgtcctccccaaacctggatgttagcaacgagctcacaaagggggtgtacacaccctgcgacattggaagtaatatgatcctctccccacctggacactgggaaagataccacagcgcgggtatacgtttcctacgctgttgggagtaatatcattcttttcctttctggatattagggagaatatcacaggggtgctgtacaattacttcgacattgggagtaacatcatcctctagtttcctggatattgggcacaaaaacacaaaagggtgtacaacccctgcgatattggaaggaatagaatactctccttccctggatgttagaaaacaatatcaccatggctgaacaccccccaccataatgggagtcatgtttactctttcgcaggccatttggaacaatatcacagggggtgtttacaaacggggtggtgtacaccccctgtgatattgggagtaacatcattctctccacctccggatattaagaacaatatcctggcgggaggtggtacacccccagtgatattgggaataatgtcatcctctccttccctggatattaggaacaaaatcacaggggggtgtacaccttctgtgatattggaagcaatatcatcctctcccgcgctggatattagaaaaaaatatcactcacggtgtacacccactgtgatatgaggagtaatatcttcctagggtattacgaataatttcacagtctgtacacacatggtgtacactcactgtgatattaggagtaatatctacctagtagataacaaataacatcgcagggggtacacccactttgatattagctgtaatatttttctaagttgttacaaataagatcacagagtgtacaaacatggtgtacactcactgtgatatcaggagtcatatctctgtaatacattatgaataatatcacagggtgtacacccactgtattattaggagtaatgtctctgtaggatattacaattaagatcacagggtgtagagcaaccatgatattaggagcaaaatctttctaggatattaccaataatatcacagggtgtacacccactctgctgtcaggagcaatatctccctaggatatccaaaatcctatcacagggtgtccaatctctgccttttaggttctaagggattctcctgcttcagcctcccgagtagttagggttatccgccaccagtcccggctaatttttttttttttaattttcactggagacggggtttcaccacgttggccaggctggtctggaactcctgacctcaggtgatccatcagcctcggccacccaaagtgatgggattacaggtgtgagccatggtgctgggcacaagagttatagattcaattcatttggaaacacagctcccatctttgagtgtgcatgtacctttatgaagaaatgatgtcagaaaaccgaaggatgatgataaatatgaaaagtaacaggcatgggaaaaggtcttccgattgagaactataacgtttgatttcgttttcagataatggggtcctagctcttgtgtcgtccttttacatattctacatcaatggaagttgtagcacggtgtcagaataaagtacagtgtatttcacggcttcttaatttctttcaattagactgagatctttttcttaaagagagaaggacattgtcattgcattgtatttttttctgaaaagggtaggccgtattttactgagatcaaggatttgttataagacgttttggtcttctaatattcttcagtggattttctctaaagtagtatgtacagaaagccttgtatagcaaaaaagtaaatcacgtaataattctgagatttttttggaattgtcacaactgagaaacattgctggtggtgtatggtccgcaagtgtgaaaatgttccttctgaattacttgcatcaagcattaagagctggtttttatcttttatttttccaatcctctttccttctcaaggtgtccaagacacacagagccacggaatctcacaggtgtctgagaattcctcctccttggactcccagaggatccagaactgcagccggttctcgctttgctctccctgtccctgtccatgtatctggtcacggtgctgaggaacctgctcatcatcctggctgtcagctctgtctctcccctccacacccccatgtacttcttcctctccaacctgtgctgggctgacatcggtttcacctcggccacggttcccaagatgattgtggacatgcagtcgcatagcagagccatctctcatgcgggctgtctgacgcagatgtctttcttgttcctttttgcatgtatagaaggcatgctcctgactgtgatggcctatgactgctttgtagccatctgtcgccctctgcactacccagtcatcgtgaatcctcacttctgtgtcttcttcgttttggtgtcctttttccttagcctgttggattcccagctgcacagttggattgtgttacaattcaccatcttcaagaatgtggaaatctctaattttgtctgtgacccctctcaacttctcaaacttgcctgttctgacggcgtcatcaatagcatattcatatattttgatagtactatgtttggtttccttcccatttcagggatcctatggtcttactataaaatcgtcccctccattctaaggatttcatcgtcagatgggaagtataaagccttctccacctgtggctctcaccaggcagttgtttgctgattttatagaacaggcattggcatgtacctgacttcagctgtgtcaccaccccccaggaatggtgtggtggcatcattgatatacgctgttgtcactcccatgctgaaccttttcatctacagcctgagaaacagggacatacaaagtgccctgcggaggctgctcagcagaacagtcgaatctcatgatctgttccatcc

SEQ ID NO: 642 - protein, 274 aa, Homo sapiens
MSSSPNLDVSNELTKGVYTPCDIGSNMILSPPGHWERYHSAEDPELQPVLALLSLSLSMYLVTVLRNLLIILAVSSVSPLHTPMYFFLSNLCWADIGFTSATVPKMIVDMQSHSRAISHAGCLTQMSFLFLFACIEGMLLTVMAYDCFVAICRPLHYPVIVNPHFCVFFVLVSFFLSLLDSQLHSWIVLQFTIFKNVEISNFVCDPSQLLKLACSDGVINSIFIYFDSTMFGFLPISGILWSYYKIVPSILRISSSDGKYKAFSTCGSHQAVVC

SEQ ID NO: 643 - DNA, 3147 bp, Homo sapiens
  source (1)..(3147)
  CDS (201)..(324)
  CDS (2163)..(2947)
atattaggaagagtatcacagggctgtggaaaccccctgcggtagtgggagtaatatcatcctctctccctctgaatataggaagattttcacaggggggtgtacaccccctgcgatattgggagtaagatcatcctctccacccaggaaatgactaacaaggtcacgggggttgtacaccccctgcgatattgggagtaatgtcgtcctccccaaacctggatgttagcaacgagatcacagaggggctgtacacaccctgcgacattggaagtaatatgatcctgtccccacctggatactgggaaagataccacagcgcgggtatacgtttcctacgctgttgggagtaatatcattcttttcctttctggatattaggaagaatatcacaggggtgctgtacaattacttcgatattgggagtaatatcatcctctattttcctggatattgggcacaaaaacacaaaagggtgtacaacccatgcgatattggaagtaatagcatactctccttccctggatgttagaaaacaatatcatcagggctgaacaccccccgctataatgggagtcctgtgtactctttcacaggccatttggaacaatatcacaaggggtgtttacaaacaggggtggtgtacaccccctgtgatattgggagtaacatcattctctccacctccggatattaagaacaatatcccggcgggaggtggtacaccccccagtgatattgcgaataatgtaatcctctccttccctgtatattaagaacaatatcgcaggggggtgtacatcttctgtgatattggaagcaatatcatcctcttccccgctggatattagaaaaaaatatcactcacagtgtacacccactgtgatatgaggagtaatatcttcctagggtattacgaataatttcacagtctgtacacacatggtgtacactccctgtgatattaggagtaatatctacctagtagatacaaataacatcgcagggtgtacacccactttgatattagctgtaatatttttctaagttgttacaaataagatcacagggtgtacatacatggtgtacactcactgtgatatcaggagtcgtatctctgtaatgtattatgaataatatcacaggttgtacacccactgtattattaggagtaatatctctgtaggatattacaattaatatcacagggtgtagagacaccgtgatattaggagcaatatctttctaggatattacaaataatatcagggtgtacacccactctgctgtcatagctagggttacccgccaccacgcccagctaaattttttttattttcactggagacggggtttcaccacgttggccaggctggtctggaactcctgacctcaggtgatccatcagcctcggctgcccaaagtgctgggattacaggtgtgggccatggtgctgggccaagagttatatattcaattcatttggaaacacagctcccatttttgagtgtgcatgtacttttatgaagaaatgatgtcagaaaaccaaaggatgataataaatatgaaaagtaacaggcatgtgaaaaggtcttccgattgagaactctaaggttcgatttcgttttcagataatggggtcttagctcttgcttcgtccttttacatattctacatcaatggaagttgtagcacggtgtcagaataaagtagagtgtatttcacggcttcttaatttctttcaattagactgagatctttttctaaaagagagaaggacattttcattgcattatatttttcctgaaaagagtaggctgtattttactgagatcagggatttgttatatataacgttttggtcttctaatattcttccgtggattttctctaaagtagtatgtacagaaagccttgtatagcaaaaaagcaaatcacgtaataattctgagatttttggaattgtcacaactgagaaacattgctggcgatgtatggtccggaagtgtgaagatgttccttgtaaattgcttgcatccagcattaagggctggtttttatcttttatttttccaatcctctttccttctcaaggtgtccaagacacacagagccacggaatctcacaggtgtctgagaattcctcctcctgggactctcagaggatccagaactgcagtcggtcctcgctttgctgtccctgtccctgtccctgaatctggtcacggtgctgaggaacctgctcagcatcctggctgtcagctctgactcccccctccacacccccatgtacttcttcctctccaacctgtgctgggctgacatcggtctcacctcggccacggttcccaaggtgattctggatatgcagtcgcatagcagagtcatctctcatgtgggctgcctgacacagatgtctttcttggtcctttttgcatgtatagaaggcatgctcctgactgtgatggcctatggctgctttgtagccatctgtcgccctctgcactacccagtcatagtgaatcctcacctctgtgtcttcttcgttttggtgtcctttttccttaacctgttggattcccagctgcacagttggattgtgttacaattcaccatcatcaagaatgtggaaatctctaattttttctgtgacccctctcagcttctcaaccttgcctgttctgacagcgtcatcaatagcatattcatatatttcgatagtactatgtttggttttcttcccatttcagggatccttttgtcttactataaaattgtcccctccattctaaggatgtcatcgtcagatgggaagtataaagccttctccacctatggctctcacctaggagttgtttgctggttttatggaacagtcattggcatgtacctggcttcagccgtgtcaccaccccccaggaatggtgtggtggcatcagtgatgtaggctgtggtcacccccatgctgaaccttttcatctacagcctgagaaacagggacatacaaagtgccctgcggaggctgcgcagcagaacagtcgaatctcatgatctgttccatcctttttcttgtgtgcgtgagaaagggcaaccacattaaatctctgcatctgcaaatcctgccccttagtcacattatttttgtgg

SEQ ID NO: 644 - protein, 302 aa, Homo sapiens [sequence omitted]

SEQ ID NO: 645 - DNA, 1227 bp, Homo sapiens
  source (1)..(1227)
  CDS (201)..(515)
  CDS (548)..(1027)
ttgttacttgaaatcatttgaactcctcttgagctgtcccctcatctggctcttgtcttagccgttgcaggtgaaccactggatggatggctgaaaggaattacaccgtagtgacggagttcttccttactgcatttactgaacatctccagtggagggttcctctcttcctcatatttttgagtttctatcttgccactatgttagggaacacaggcatgatcctcctgatccgtggcgatcgtcggctccacaccccgatgtacttcttcctcagccacctttccttggtggacatctgctactcgtccgccatcatccctcagatgctggctgtgctgtgggagcacggcacaaccatctcccaggctcgctgtgcagctcagttcttcctcttcaccttctttgcctccatcgactgctaccttctggccatcatgcctatgaccgctacacggccgtgtgcagcccctgctttatgtcaccatcataaccgagaaggaccgctgggcctagtcactggggcttacgttgctggttttttcagtgcctttgttcgacggtcacagccttcactctctccttttgtggaaacaatgagatcaacttcattttctgtgacctccctcctctattaaaactctcctgtggggacagctacactcaggaagtggtgattattgtgtttgctcttttcgtcatgcctgcctgtatcttggtgatcttggtatcctacctgtttatcattgtggccatcctgcagatccactctgctggaggccgggccaagaccttctccacctgcgcctcccacctcactgccgtcgctcttttctttggcaccctcatcttcatgtacctgcgagacaacacaggccagtcctccgagggagaccgagtggtgtctgtgctctacacggtggtgaccccaatgctgaatccccttatctatagcctgagaaacaaggaggtaaaagaggccactaggaaagccctgagcaaatcaaagcctgctagaagaccctaaatggacccttgtgaaatatatcattccttagtttccccatcttttctgtcttttctcaatagcaccttctggagagactttcctaaataaccctatgcaaaatcgcacctgaacttcccacctccactttctgatttattattccatgtaatacttatcatcatctgacatattagatgttatatgtgtttgacattttc

SEQ ID NO: 646 - protein, 264 aa, Homo sapiens
MLGNTGMILLIRGDRRLHTPMYFFLSHLSLVDICYSSAIIPQMLAVLWEHGTTISQARCAAQFFLFTFFASIDCYLLAIMPMTATRPCAAPALCHHHNREGPLGLCLCSTVTAFTLSFCGNNEINFIFCDLPPLLKLSCGDSYTQEVVIIVFALFVMPACILVILVSYLFIIVAILQIHSAGGRAKTFSTCASHLTAVALFFGTLIFMYLRDNTGQSSEGDRVVSVLYTVVTPMLNPLIYSLRNKEVKEATRKALSKSKPARRP

SEQ ID NO: 647 - DNA, 1330 bp, Homo sapiens
  source (1)..(1330)
  CDS (201)..(1130)
catagggcaaatgggactgggaaggatccaacatcattcaaatgggccactggtctggactatgtcatcagaggagaagttaatcatccatttcatttttttcttgtcagacttcatccgttcatttcagagcacctcttcctttctcacttttgattactactctctttttcactttgagactcaaaattttttcaacaatgaaaaataaaaccgtgttaactgagtttatccttctgggtctaacagatgtccctgaactccaggtggcagttttcacctttcttttccttgcgtatttactcagcatccttggaaatctgactatcctcatcctcaccttgctggactcccaccttcagactcccatgtatttctttctccggaacttctccttcttggaaatttccttcacaaacatcttcattccaagggtcctgattagcatcacaacagggaacaagagtatcagctttgctggctgcttcactcagtatttctttgccatgttccttggggctacagagttttaccttctggctgccatgtcctatgaccgctatgtggccatctgcaaacctctgcattacaccaccatcatgagcagcagaatctgcatccagctgattttctgctcttggctgggtgggctaatggctattataccaacaatcaccctgatgagtcagcaggacttttgtgcatccaacagactgaatcattacttctgtgactatgagcctcttctggaactctcatgttcagacacaagcctcatagagaaggttgtctttcttgtggcatctgtgaccctggtggtcactctggtgctagtgattctctcctatgcattcattatcaagactattctgaagctcccctctgcccaacaaaggacaaaagccttttccacatgttcttcccacatgattgtcatctccctctcttacggaagctgcatgtttatgtacattaatccctctgcaaaagaaggggatacattcaacaagggagtagctctactcattacttcagttgctcctttgttgaacccctttatttacaccctaaggaaccaacaggtaaaacaacccttcaaggatatggtcaaaaagcttctgaatctttaaagaatttaagaattatgcatcgcgacattattcacaatagcaaagacttggaaccaacccaaatgtccaacaatgatagactggattaagaaaatatggcacatatacaccatggaatactatgcagccattaaaaatgatgagttgatgtcctttgtagggacatggatgaaattggaaatcatcattctcagtaaact

SEQ ID NO: 648 - protein, 309 aa, Homo sapiens
MKNKTVLTEFILLGLTDVPELQVAVFTFLFLAYLLSILGNLTILILTLLDSHLQTPMYFFLRNFSFLEISFTNIFIPRVLISITTGNKSISFAGCFTQYFFAMFLGATEFYLLAAMSYDRYVAICKPLHYTTIMSSRICIQLIFCSWLGGLMAIIPTITLMSQQDFCASNRLNHYFCDYEPLLELSCSDTSLIEKVVFLVASVTLVVTLVLVILSYAFIIKTILKLPSAQQRTKAFSTCSSHMIVISLSYGSCMFMYINPSAKEGDTFNKGVALLITSVAPLLNPFIYTLRNQQVKQPFKDMVKKLLNL

SEQ ID NO: 649 - DNA, 1342 bp, Homo sapiens; identical to SEQ ID NO: 587
  source (1)..(1342)
  CDS (201)..(1142)

SEQ ID NO: 650 - protein, 313 aa, Homo sapiens; identical to SEQ ID NO: 588

SEQ ID NO: 651 - DNA, 1330 bp, Homo sapiens; identical to SEQ ID NO: 585
  source (1)..(1330)
  CDS (201)..(1130)

SEQ ID NO: 652 - protein, 309 aa, Homo sapiens; identical to SEQ ID NO: 586

SEQ ID NO: 653 - DNA, 1156 bp, Homo sapiens
  source (1)..(1156)
  CDS (201)..(956)
aacaaagtctgaaacctgaggcaatggacccacagaactattccttggtgtcagaatttgtgttgcatggactctgcacttcacgacatcttcaaaattttttctttatatttttctttggggtctatgtggccattatgctgggtaaccttctcattttggtcactgtaatttctgatccctgcctgcactcctcccctatgtacttcctgctggggaacctagctttcctggacatgtggctggcctcatttgccactcccaagatgatcagggatttccttagtgatcaaaaactcatctcctttggaggatgtatggctcaaatcttcttcttgcactttactggtggggctgagatggtgctcctggtttccatggcctatgacagatatgtggccatatgcaaacccttgcattacatgactttgatgagttggcagacttgcatcaggctggtgctggcttcatgggtcgttggatttgtgcactccatcagtcaagtggctttcactgtaaatttgccttactgtggccccaatgaggtagacagcttcttctgtgacctccctctggtgatcaaacttgcctgcatggacacctatgtcttgggtataattatgatctcagacagtgggttgctttccttgagctgttttctgctcctcctgatctcctacaccgtgatcctcctcgctatcagacagcgtgctgccggtagcacatccaaagcactctccacttgctctgcacatatcatggtagtgacgctgttctttggcccttgcatttttgtttatgtgcggcctttcagtaggttctctgtggacaagctgctgtctgtgttttataccatttttactccactcctgaaccccattatctacacattgagaaatgaggagatgaaagcagctatgaagaaactgcaaaaccgacgggtgacttttcaatgaaatccagccttccatagtgttagatgtttctattcattcagcagatataatttctttaatataattctgctcaaagatttcattctgacactacattgatataatttgtaatgtgttatattacagagaaacagtttatttcaagaaaaaatatatcattttattttatactacaaatatgtatatataatgtattacat

SEQ ID NO: 654 - protein, 251 aa, Homo sapiens
MYFLLGNLAFLDMWLASFATPKMIRDFLSDQKLISFGGCMAQIFFLHFTGGAEMVLLVSMAYDRYVAICKPLHYMTLMSWQTCIRLVLASWVVGFVHSISQVAFTVNLPYCGPNEVDSFFCDLPLVIKLACMDTYVLGIIMISDSGLLSLSCFLLLLISYTVILLAIRQRAAGSTSKALSTCSAHIMVVTLFFGPCIFVYVRPFSRFSVDKLLSVFYTIFTPLLNPIIYTLRNEEMKAAMKKLQNRRVTFQ

SEQ ID NO: 655 - DNA, 1342 bp, Homo sapiens
  source (1)..(1342)
  CDS (201)..(1142)
gtaacttcatcacatactctctccctcttggtttatcagatataaaatgggcaaccaaatgtatcctcgtgtaatctgttagtgacagggaacgtatgacaattttgaaagcagtgatataactctaggtaaatgctatgtctactaattatagtttcttaattttcatagctatattatgaaaagagtaaattgaagaaatggaaactgcaaattacaccaaggtgacagaatttgttctcactggcctatcccagactccagaggtccaactagtcctatttgttatatttctatccttctatttgttcatcctaccaggaaatatccttatcatttgcaccatcagtctagaccctcatctgacctctcctatgtatttcctgttggctaatctggccttccttgatatttggtactcttccattacagcccctgaaatgctcatagacttctttgtggagaggaagataatttcttttgatggatgcattgcacagctcttcttcttacactttgctggggcttcggagatgttcttgctcacagtgatggcctttgacctctacactgctatctgccgacccctccactatgctaccatcatgaatcaacgtctctgctgtatcctggtggctctctcctggagggggggcttcattcattctatcatacaggtggctctcattgttcgacttcctttctgtgggcccaatgagttagacagttacttctgtgacatcacacaggttgtccggattgcctgtgccaacaccttcccagaggagttagtgatgatctgtagtagtggtctgatctctgtggtgtgtttgattgctctgttaatgtcctatgccttccttctggccttgttcaagaaactttcaggctcaggtgagaataccaacagggccatgtccacctgctattcccacattaccattgtggtgctaatgtttgggccatccatctacatttatgctcgcccatttgactcgttttccctagataaagtggtgtctgtgttcaatactttaatattccctttacgtaatcccattatttacacattgagaaacaaggaagtaaaggcagccatgaggaagttggtcaccaaatatattttgtgtaaagagaagtgaaagataaattatacattttatagttcccctgaggatcattgtcctaaagcaggaagtatttgcagtaataatgctgcattgacttcctcctttcatttgtgttattaaaattttactataatttttctctattcattcctctttatattgaaaaaatagaggcattaagatgaaaataaatttactcacacctaccctga

SEQ ID NO: 656 - protein, 313 aa, Homo sapiens
METANYTKVTEFVLTGLSQTPEVQLVLFVIFLSFYLFILPGNILIICTISLDPHLTSPMYFLLANLAFLDIWYSSITAPEMLIDFFVERKIISFDGCIAQLFFLHFAGASEMFLLTVMAFDLYTAICRPLHYATIMNQRLCCILVALSWRGGFIHSIIQVALIVRLPFCGPNELDSYFCDITQVVRIACANTFPEELVMICSSGLISVVCLIALLMSYAFLLALFKKLSGSGENTNRAMSTCYSHITIVVLMFGPSIYIYARPFDSFSLDKVVSVFNTLIFPLRNPIIYTLRNKEVKAAMRKLVTKYILCKEK

SEQ ID NO: 657 - DNA, 12703 bp, Homo sapiens
  source (1)..(12703)
  CDS (201)..(1084)
  CDS (11552)..(12503)
gccaagaaggcctggctcagacttctgtaaacctgagccctgaacatagcagtagcagccccagcagggttgacaatattatcatttacatcctgcaagcaaaattctactgccattcctgtgccccatcttaaccagcattttccaagcttttgcatttcgtcttctttgtctgcctctgtgtccaggatcccaggcccatgagcgggacaaaccagtcgagtgtctccgagttcctcctcctgggactctccaggcagccccagcagcagcatctcctctttgtgttcttcctcagcatgtacctggccactgtcctggggaacctgctcatcatcctgtccgtaagcatagactcctgcctgcacacccccatgtacttcttcctcagcaacctgtcttttgtggacatctgcttctccttcaccaccgtccccaagatgctggccaatcacatactcgagactcagaccatctccttctgtggctgtctcacacagatgtatttcgttttcatgttcgtggacatggacaatttcctcctagctgtgatggcctatgaccactttgtcgccgtgtgccaccccttacattacacagcaaagatgacccatcagctctgtgccctgctggttgctggattatgggtggttgccaacctgaatgtccttctgcacaccctgctgatggctccactctcattctgtgcagacaatgccatcactcacttcttctgcgatgtgactcccctactgaaactctcctgctcagacacacacctcaatgaggtcataatccttagtgagggtgccctggtcatgatcaccccatttctttgcatcctggcttcttatatgcacatcacctgcactgtcctgaaggtcccatccacaaagggaaggtggaaagccttctccacctgtggttctcacctggctgtggttctcctcttctacagcaccatcattgctgtgtattttaaccctctgtcctcccactcagctgagaaagacactatggctactgtgttgtatacagtagtgactcccatgctaaaccctttcatctacagcctgaggaacaggtacttgaaaggggctctgaaaaaagtagttggcagggtggtgttttctgtctgatgaaataatcaagactgaatctcattcccaaggaaatttatttttcaccaattgagtttaatgcagtagttgtttcattaaatgatgttcttgctagtgacacacttagtaattatactaagttaaactattaattataattttttttgagacagggtcatgctctgtcacccaggctggagtgcagtgccgtgatcttggctcactgcaccctccatctcccaggctcaagtgatcctcctgcctcagcctcctgagtagctgggaccacaggtgtgtgccacatgcctagctaaatttttttttttttttttgagacggagtctctctatgtcgccaggctggatgctgttgcgggaagtcagggaccctgaacagagggaccagctggagctgtgtcagaggaacataaattgtgaagatttcattttaatatggacatgtatcggttcccaaaattaatacttttataatttcttacgcctgtctttactgcaatctctgaacataagctgtgaagatttcacggacatttatcagttcccgaaattaacacttataatttctcatgcctgtctttactttaatctcttaatcctgttatcttcgtaagctgacgatgtacgtcacctcaggaccactgtgataattctacctaactatacaaattgattgtaaaacatgtgtatttgaacaatatgaaatcagtgcaccttgaaaaagaacagaataacagtgattttagggaacaagggaagataatcataaggtctgactatctgtggagttgggcagaatggagccatatttttcttcttgcagagagcctataaatggacgtgcaagtagggatatcactgaattcttttcctagcaaggaatgttaataattaagaccttgggagaggaatgcactcctcgggggaggtctataaatggctgctctgggagagtctgtcttatgcagttgagataaggactgaaatatgccctggtctcctgcagtaccctcaggcttattagtgtggggaaaaaaccccaccctggtgaatttaaggtcagacagattctctgctcttgaaccctgttttctgttgtttaagatgtttatcaagacaatacgtgcacagctgaacatagacccttatctggaggttttgattttgtcctttgccttgtgatctctattggcttcagaggcatgtgatctttgttctcctttttgccctttgacacctgtgatctctgtgacctactccctgttcgtacacccccaccccttttaaagtccttaataaaaacctcctggttttgcggctcaggtgggtcctaccaatatgggatgtcacccccagaggcctagctgtaaaattcctctctttgtactctttctctttatttctcagctggccgacacttagggaaaatagaaagaacctatgttgaaatattgggggtgggttcccccagtagagtgcagtggagccatctcggcttcctgcaacctccacctcccagattcaagctattctcctgcctcaaccacccgagtaactgggactacaggtgtgcaccacctgtgcagcccgggtgaagactcactggcctcatcctccttttatgtgtcctctgcaatggtcaagcataaaggctgggtcacaaaaatgctcaggcaaaagaacagcagagtgaggctgggtgtggtggctcatgccagtaatcccagcagtttgggaggctgaggcaggtggatcacctgaggtcaggactttaagaccagcctggccaacatggtgaaaccctatctctactaaaaatacaaaaattagctgggcgtggtggcaggcgcctacaatcacagatactcagggggatgaggcaggagaattgcttaaacttgggaggtggaggttgcagtgagccaagatcaggccattgcattccagcctgggtgaaagagcaaggttctgtcaaaaaagggaggggaggggaggggaggggaggggagggaagaaagaaagagcggagtgaaatgtgagtaccacaacgagtaacaagcatttcagatgaacctggggccctggtccgcttgcagcccaggcggtgcagaggtgaagcgacgctgaaccttgggaaccggctaggagcaccctgattggctgcctgacttagggggcagggtcagccagagccaggtctttgacatcagggaaacaaatcgacatttggtcttccctccatccagaccaactgcctctgtctctcctctcaagtcagctcccacccacaccttcaagaaccaagtcaatgccacctcctcctccgtgaagcctccggattcacgcttccggctctcagagctctgtttttctttggtttatcattccctctccacaagggctttccgcagactacgagacctacagacccgaatacacacatgactcactttgtatctcggtgtccagcactgctgctagaccaaaggtgatcatcaactttaactgaaaggaaaaaatataggtgaatgcatatgcatattgccatacattttaatttggagaatgttactttagaataagaaagaaatagcagagggaaatgtgagtactacagcaagtaacaagcatttcagatgaaccttgggccctggcccgcttgtagcccaggtggtgcagaggtgaagcaacgctgaactgtgggaactggccaggagcaccctgattggctgcctgacttagggggcggggtcaaatgacaaaaaatcattttgttatttgaaagctagtgtctacgtatgcattatggtacaccataaaccataaagaagaaaattaaagtaacctgtatccttgcagctcaaaggtaatcgcagttaggcacttggaatattgttttacaaaagttggctgcaatcgatgcatataattttgagttctgattttccacttcttacttcccatgtcagtggagctcttagaaacgtgatttttttttttttttttgagatggaatcgcgttctgtcaccaggctggagtgcagtggcacgaccttgactcactgcaacttctgcctcctggattcaagcaattctcctgcctcagcctcccaagtagctgggacaacagacacgcaccgccacgcccagctactttttgtatttttagtagagacggggtttcaccatgttggccaggactgtctccatctgctgacctcgtgatccacctgcatcggcctcccaaagtgctgggattacaggcatgagccaccatgctcagcccagaaatgtgatttttttttttttttttttgagatggagtctcgctctgtcgcccaggctgaagtgcagtggcatgatttccgctcactgcaagctccacctccggcttcacaccattctcctgcctcagcctccggagtagctggggctataggcgcctgccaccacacccagctaattttttgtatttttagtaaagatggggtttcaccatgttaggcaggatggtctcaaactcctgaccttgtgatccgcccgtctcagcctcccaaagtgctgggattacaggcatgagccactgcgcctgaccccagaaatttgattttaatggctgcataatatttcatcacagggacgtgatataattcaccctttccccaactctgaacaatttcaagtgtttctgtaccataacaaacactgctgcacacttccttgtgtgggaatcattgtttgtgtttattattgccacaggtagcctgactgatctatttcttcagcttggagtaaaaatgtcacctttcctttgttattcataatttctgcctaaccataccctgccattactaccagggggtccagcacctccctgtgggtgtcaaaaagcaccccaggagttcactcagaggagtcagtcaggtggagagagggagagactggggagctagaagcatccactggcacgatcctgtgagttacggcacacagtgcagtccctgcccttcgatgcctggtcagctgacagcctgtgtgctgcaacatagatgcctgtggcccatccctttgggggccacactgggacccacctaaggttcagatcacagccatctgtgttcaaactcatgttattctccactaaaatctgactctgggccgggtatggtggctcccacctgtaatcacaacacctttaaagtccaaggtgggaggatcatttgagcccaggagtttgagaccagcctgggcaatatagtgagactccatctctacaaaaaattaaaaaattaactgggcatggtggctcatacctgtggtcccagctacttgggaggctgaggtgggaggatcacttgagcccaggaagttgaggctgcagtgagctgcgatcgtgccactgcactccagcctcgggaacaaagcatgatcctgtctccaaaaaaaaaaaaaaaaatctgcctccggatggacacccactccctggccctggggcttccagtcccactgtgtcaaaccaggtttccccaggaacacccagagcagatccaggcttattcctttgagattccctctgggtcctagggatctttttatgtggaaatgacttcaatatatttttttctcatgatatagctgtagctgtaaaatataatccaaatagatctatatgaagattataatgtttgaattctgactgcttcttattatttatttagttgatttgcaaagtctaataattaacatttcaattattttctttctatatgttaatagcttttacctttttttctttacagaatgattgcagtaagcttttacttttttttttttaacgtcctttttttttctgcgggggggatgaagtctcagtctgttgcccaggctggagtgcagcagcacgatctcagctcactgtaacctctgcctcctgggttcaagtgattttcctgcctcaacctcttgagtggctgggattacagacatccaccaccatgcctggctaatttttgtatttttagtagagatggggtttcaccatgttggccaggctggtcttgaactcctgacctcaagtgatctgcctaccttggcatcccaaagtgctggaattacaggcatgagccaccatgccgggtcagctttactttttgatttgatctttggttatggaggtgatgtggtttggctgtttgtctccaccaaatctcatgttgaaatgtgattctcagtgttggaggtggcgcctggcaggtggtgtttaggtcatgggggtgggtccctcatgaatggcttggttccccccacacagtaataagttaccatgagctctgattgttagagcctgggagcttccccttctcccttttattccctctctcttcatgtgacacacctgtttccacttcaccttctgccatgattggaaacttcctgaggcctcaccagaagtaggtgcccacaccatgcttcttgtacagcctgcagaatcatgacccaaaaaaacttttctttataaattacccagagtcaggtatttctttatagcagcgaaaacggactaacacagaaggcctggaggctggtgaatgttatccattcattataaattatattaaataccttctagaaatagaatgatctttgtcctcttcaattcttgtttctgcttaaagcatactttggttaatactaatattactcattctgctttcttgtgtttgctcattctctcagactttctgaaatagttgacttggatgaagggctccttccctctgtatcaagatcttccttttcaaagctttcagtatgtgagaaaaaattagggcaggcaaggtggctcacgcctgtaatcccagcactttgggaggcctaggctggtggatcacgacgtcaggagatcgagaccatcctggctaacacggtgaaaccccgtctctactaaaaatacaaaaaaattatccaggcatggtggtgggcacctgcagtcccagttacttgggaggctgaggcaggagaatcacttgaacctgggaggtggaggctgcagtgagccaagatcacgctgctgcactccagcctggatgacagagtgagactctgtctaaaaaaaattaaaaaaaataaaaaaaaaatagagtgtaatctaacacctagaaagaacagtctacaggccgggcatggtggctcacgcctgtaatcccagcccttggggaggctgaagtaggcgcctgtaatcccagcctttggggaggccgaggtaggcggatcacctgaggtcaggagttcgagaccagactgaccaacatggtgaaaccgcatctctactaaaaatacaaaaaaaaatctgggcgtggtggtgggttcttgtaataccagctactcaggaacctgcggtgggaggatcccttgagcctgggaagtggaggttgcagtgagtcgagattgtgttactgcactacagcctgggcgacagtaagactctgtctcaaaaaaaaaaaaagtgattctgtttttcagtttgtcttttgtctatctcacacacttttgtctctgctcttccacgtatatttttatctactaattttcacctttgaatgtccctcttttgaagatgggtgagtggggcttccagttttgtaagggatacttgcgttatgttaggatccagcctaacattttcaggagggtgtgttttggggaagaggtgtgcgtattaataccacaagccagaggatgactctagtggacatttgtcagactttgtggcttccaagcatctgggcccacttccaaagtttgtagagtcccctaatttatggatgttgttgggaagagagcccacctcccactatagaaataagtacaccagaaacttgcttctgagtgtctctttcagctagaatgagagcaagtgacaggctctctgcccatcagatatatctgccctgcatttgacacagagaaggggagacaaggaggaacttgctctgtcagtttgtaggcagccattgtagggacatggattcctggagcgtgacgacagtaatgctaggggtagcagcgaatgtctgtgagaagtacatcagaaatgcaagctgcagcatctagtgcttggtggcagcagcactggtgtcctcactagctggcttggagtcatgatttggggcactgttaacagatgaatttttgttgttgttgtagttttgttttgttttgtttttgtttttgtagaaacggggtctcgctgtgttgcccagggtgatgttgaactcctggcctcaagcaatcctcctgtcttggcctcccaaagcgctgggacttcaggcatgagacaccacactcagccatagactcgtttgttagttctcctaagaaacagagccaacaaaatatattgctaaagggtgggtggggtgggtgggaaggtaagattttaaactctaaggaattggcacatgtgattgtggaggcttggcaagttcaaagtatgcagggtggaccagaaggctgtagacctagcgaagagctgatgttgttgcagcttgagtccaaaggcagtgggttgactttttctattgtggccttcaactgattggataaggcccacccacattatggaggctaatctggtgtactcaagttctattgatttaaatgttaatctcatcttaaaaatactccccaaaaagaaaaataagaaagaaagaaagaaagaaggaaagaaagaggaaagaaaagagaaagaaagaaagagagagaaagaaagaaagaaagaggaaagaaaagaaagagaaagaaagagagagagagaaagaaagaaagaaagaaagaaagaaagaaagaaagaaagaaagaaagaaaagaaaagaaaagaaagagaagaaagagggctgggcgcggtggctcacgcctgtaatcccagcactttgagaggccgaggtgggtgggtcacgaggtcaagaaatcaagaccatcctgggcaaaatggtgaaaccctgtctttactaaaaatacaaaaaattagctgggcgtggtggcgcgtgcctgtagtcccagctactcgggaggctgaggcaggaaaatcactcgaacctgggaggtggaggttgcagtgagccgagattgcgccactgcactccagcctggcgacagagcgagactccgtctcaaaaaaaaaaaaaaaagaaagaaagaaagaggcgccaggcggggtggttcacgcctgtaatcccaccactttgggaggctgaggtcaagagatcgagaccattatggccaacaatgtgaaaccctgtctctactaaaaatacaaaaattagctgggcatggtggtacgtgcctgtagtcccagctactcgggaggctgaggcaggagaatctcttgaacccgggaggtggaggttgcagtgagttgagatcaaaccactgaactccagcctgatgacagagtgaaactccatctcaaaaaaaaaaaaaaaaaaaaaaagagaatgggacagagagaaggtgattggatttatacattgtagccaagcatgtagtgatagctttgctcaatcctggttccaaatactctggttcaaccagctatggtgaaggggaggtggtagaaacacgactcctggggctccaccacattgtgcctatgcagattaggaagctctatcccaagaaaagggcaaaccatgtgagttgcagggacatccccaaagatgtccatcctaggggtctagagttcataaatcacggcatcctggattctcctggagaaaacctcccttacaatcagactacccttcatctcaaacattttctttttccttttttttttttttttgagacagagtcttgctctattgcccaggctggagtgcagtggcacgatctcggttcactgcaacatccacctcctgggttcaagtaattattgtgcctcaccctcccaagtagctaggactacaggcacatgccaccatgcctggctaatttttgtatttttagtagagactgggtttcaccatgatggccaggctggtctcgaacccctgaccttaggtgatctgcccaccttggcttcccaaacttttgggttacaggcgtgagccactgtgcctgaccccaaacattttcacgaattaagcccatctcagtaatgtgctcgtaacattccctcctgtaaaatggaaaacacgaagcatcactaatgtcttaagatgaccaggcagaggaaagcaagggctacacagaaaacacggaagagccccatatctcaacaaaggaagtgatactgcaaaggatttcatgacagaatttccacacctgtgggcacaggagcagatcacaaggtgaggaggtttgtggttccaaggaatcttgtctgcgatttatctgtatcaggatggcttcatttctaatatctacaagttttggtccaagagttttatctaaacgttagataatattgaatgtcgtcgttgtttggtccaaaggggccaaaattaggtgggacaattatgttcttcttgtccctaatgaggctctcagggaatctggtcccagtggccaaaggaggttcctacaaatgcctgctctgtgattgccccaaacatttacttacacagaggactaagaccatgagcccctactcctcacacactcaggacccgcctgtgtttccaagacattccaactcccacagtaagtagaagcattgaccagttatgtagaaatgaggaacaactgagagtgacagcaccaaccttctccaggaaaggtcgcagaggtgaacaattaagtatgtgttggctcagatgtgaagttcttttaggaatcttctttgctacatcatccagatacaggaagtaatgagtaatgtacagagaagtgaagtacaggagtcctgaatccatcagttgtcacttgagattaacccagtaatcatcagtcattcctccagtctctttatgagctgctaactagttgggtggggaactgaatgtaccagagacacacacattctcagagtcaggctatgtgtacgtgtctgtgtgttttgttttcttttcttttttaatagagatggggtcttggtatgttgtccaggctggtcttgaactcctggcctcaagccatcttccctctttggccttccaaagttctaggattacaggcatgagccaccatgcccagcctgtctgtgttttcaacgttaaatatgcaaaataagaatcagtgagtcgtctaggaaaagcatcgtaactgagtgttggaaattggacgtatgggtgaggagaccacatcctgtttttgcaagtttgtgaattgatttgcaaacgtggttcttcctggagcctcatcacatcttaaccacccatgtgtatgtttctgaattcactgtcttctatgcagctgggtccagacatatgagagggacaaaccagtgagtgtctccgagttcctcctcttgggactctccaggcagccccagcagcagcatctcctctttgtgttcttcctcagcatgtacctggccactgtcctggggaacctgctcatcatcctggccataagcatagactcccgcctgcacacccccatgtacttcttcctcagcaacatgtcctttgtggacaactgcttctccaccaccgtccccaagatgctggccaatcacatactcaggactcaaaccatctccttctctggctgtctcatgcagatgtattttatcagtgagcttgctgacatggacaatttcctcctggctgtgatggcctatgaccgctttgtcgccgtgtgccgccccttacattacacagcaaagatgacccatcagctctgtgccctgctggtcactggatcatgggtggttgccaactcgaatgctctgctgcacaccctgctgatggctcgactctcattctgtgcagacaacaccatcccccacatcttctgcgatgtgactcccctcctgaaactctcctgttcagacacacacctcagtgaagtgatgattcttactgaggctgccctagtcacgatcaccccatttctttgcctcctggcttcctatatgcacatcacctgcgttgtcctgagggtcccatccacaaagggaagatggaaagccttctccacctgtggctcccacctggctgtggttctcctcttctatggcaccatcatgtctccatatttcagaacttcatcctcccactcagctcagagagatatagcagctgctgtgaggttcacagtggtgactcccgtgatgaatcctttgatctacagcctgaggaacaaggacataaaaggggctcttgtaaaagtggttgctgtgaaatttttttctgttcaataacggcaaccctgaccgtgggcacctccccagtccaggagatggtgtgggttgtggtggcttcacccacctacacttaaaaaaacaaaaagctactcaggaagctgaggcaggaggattgtttgagcctaggaggtggaggttgcagtgagccaagatcgtcccactccagccttagcaacagagccagtctcaactaaaga

SEQ ID NO: 658 - protein, 611 aa, Homo sapiens
MSGTNQSSVSEFLLLGLSRQPQQQHLLFVFFLSMYLATVLGNLLIILSVSIDSCLHTPMYFFLSNLSFVDICFSFTTVPKMLANHILETQTISFCGCLTQMYFVFMFVDMDNFLLAVMAYDHFVAVCHPLHYTAKMTHQLCALLVAGLWVVANLNVLLHTLLMAPLSFCADNAITHFFCDVTPLLKLSCSDTHLNEVIILSEGALVMITPFLCILASYMHITCTVLKVPSTKGRWKAFSTCGSHLAVVLLFYSTIIAVYFNPLSSHSAEKDTMATVLYTVVTPMLNPFIYSLRNSWVQTYERDKPVSVSEFLLLGLSRQPQQQHLLFVFFLSMYLATVLGNLLIILAISIDSRLHTPMYFFLSNMSFVDNCFSTTVPKMLANHILRTQTISFSGCLMQMYFISELADMDNFLLAVMAYDRFVAVCRPLHYTAKMTHQLCALLVTGSWVVANSNALLHTLLMARLSFCADNTIPHIFCDVTPLLKLSCSDTHLSEVMILTEAALVTITPFLCLLASYMHITCVVLRVPSTKGRWKAFSTCGSHLAVVLLFYGTIMSPYFRTSSSHSAQRDIAAAVRFTVVTPVMNPLIYSLRNKDIKGALVKVVAVKFFSVQ

SEQ ID NO: 659 - DNA, 3079 bp, Homo sapiens
  source (1)..(3079)
  CDS (201)..(277)
  CDS (1964)..(2879)
  modified_base (1785)..(1884): a, t, c, g, unknown or other
ggaggtggccctctgcctgtcctcagacaagggcctcgagtcacaccctcccatgggaaagcttcagtgtggggctgagctccagggccctagtttgatcccttctatgctttgggaccttaagccatatatcttaccctcagagccttggcctctttcatctctaaaacgggtcagttacatgtaccttacaggcggtcatgaaggctacacaagtattgcctggctccaaggaagtgctggataaatccagcagggcccaggtgtgtttgggcaggttggtggatctctagggagcgccactgacacggttgtgatttgcatatgctgatggcagaagatggggcccccttctccaacccccacaaagacactgaagggggttgtgagtgcccatggttgcactgctgggtcctgcctggggaaggggtccttggtgcccatgtgggagtcccgccactgagagctgctcaccagagcccaggagcttcaggcccctccatgggtccttggggccaagtcaggccagggagaacacagggtgggaaccctttcaacagagggtaggcatggacatttagaaaactaaattcactctgggtcaatgcttactttacctgtgacttctgggagttcttgacaaattgcgccactccctgagcctcatttcttttctttcttttgagacagtttcgctcttgtcgccaaggctggagtgcagcggcgcaatcttggctcactgcaacctccgcctcctgggctcaagcaattctcgtgccccagcttcctgagtagctgggattacaggcgcccaccaccatgtccagctactttttgtatttttagtagaaacggggtttcactatgttggccaggcaggtctcgaactcctgacctcaggtgatctacccgcctcggcctcccaaagtgctgggattacaggcatgagccaccgcgcccggcctcatttctcacaagttggaatggaaggagaatactgccccccactcagggctgctaaggactgaatgggcccagaatacatgaggtcaggcgaaaactcccagcctaaggctgcttacgaccttgaacccgaatgctgaactgggatgcccaaaaacaaccacttcccctgtgaaaattctaccctcctgaagttattgcattagtttgtttattttgttaatgttttaagtgtttcataaatgtgttttcatttaaaaatacaattccatttatttctcaggacctggccagcatcatacgatatcactttttttttttttttttttttttgagatgtagtcttgctgtgtcgcccaggctggagtgcagtggcatgatcttggctcactgcaacctacgcctgctgggttcaagcaattttcctgcctcagcctcctgagtagctgggactacaggcgtgcaccaccacgcccagctaatttttgtatttttactagagacagagtttcaccatgatggtcagactggtctcgaattcctgacctcaggtgatctgcccgccttggcctcccaaagtgctgggattacaggcctgagccaccacatctggctgtaattgaacaacagcaacaacaacaaaaaaaacgacatagaaactataaatgtttctctctttctctcttgtaactgggtccccactggtttttctctcagttgtgaaatttggccagtgattggaacatggcctcctattctacacggggtcacactttgaagttgttaaaactcggtatataagagaaaaaacggtaggattannnnnnnnnnnnnnnnnnnnnnnnnnnnnnnnnnnnnnnnnnnnnnnnnnnnnnnnnnnnnnnnnnnnnnnnnnnnnnnnnnnnnnnnnnnnnnnnnnnngcgtcgctaggaacgtcatttataaatatataattgacaacgcgatcaaaaaataaaaagctgaattgcgttcgtgcaggtccgaattcctccttctgggattctctgacctcaaggccctgcatggccccctgttctgggtggtgcttctggtctacctggtcaccttgctgggtaactccctgatcatcctcctcacacaggtcagccctgccctgcactcccccatgtacttcttcctgcgccaactctcagtggtggagctcttctacaccactgacatcgtgcccaggaccctggccaatctgggctccccgcatccccaggccatctctttccagggctgtgcagcccatatgtacgtcttcattgtcctgggcatctcggagtgctgcctgctcactgccatggcctatgaccgatatgttgccatctgccagcccctacgctattccaccctcttgagcccacgggcctgcatggccatggtgggtacctcctggctcacaggcatcatcacggccaccacccatgcctccctcatcttctctctaccttttcgcagccacccgatcatcccgcactttctctgtgacatcctgccagtactgaggctggcaagtgctgggaagcacaggagcgagatctccgtgatgacagccaccatagtcttcattatgatccccttctctctgattgtcacctcttacatccgcatcctgggtgccatcctagcaatggcctccacccagagccgccgcaaggtcttctccacctgctcctcccatctgctcgtggtctctctcttctttggaacagccagcatcacctacatccggccgcaggcaggctcctctgttaccacagaccgcgtcctcagtctcttctacacagtcatcacacccatgctcaaccccatcatctacacccttcggaacaaggacgtgaggagggccctgcgacacttggtgaagaggcagcgcccctcaccctgaagggactcggatgtctgctcactcactcagtgctcatcctcccactcttcagggactggatttaaaccccactctcacagaaatcacgcagcacctcaaaggaaaaggcttcctggaagaaagtgctgaaattaaaacagagataaatctacatattgcctcttatcccagagtccacactcactatcagagcatgggtt

SEQ ID NO: 660 - protein, 330 aa, Homo sapiens [sequence omitted]

SEQ ID NO: 661 - DNA, 898 bp, Homo sapiens
  source (1)..(898)
  CDS (201)..(698)
aattaagttgcacagagattttccacgttctgtttttgtgccttatgactttgttgcctatctaaacagattataaaatttagtctaaaatatttttaatgctaagaaaatagctgattttgcttatcttcttgtcatcttacaaattgaggacaccttgtaaacatttgttggtgttaatgttgcagagagttggggaaatggatggaggcaaccagagtgaaggttcagagttccttctcctggggatctcagagagtcctgagcagcagcggatgctgttttggatgttcctggtcaggtacctggtcacggtgctgggaaatgtgctcatcatcctggccatcagctctgattcccgcctgcacacccccatgtacttcttcctggccaacctctccttcactgacctcttctttgtcaccaacacaatccccaagatgctggtgaacctccagtcccagaacaaagccatctcctacgcagggtgtctgacacagctctacttcctggtctccttggtggccctggacaacctcaacctggccgtgatggcgtatgatcgctatgtggccatctgccgtcccctccactatgtcacagccatgatccctgggctctgtatcttgctcctctccttgtgttgggtgttctctgccctctatggcctcatccatatcctcctcatgaccaggtgaccttctgtgggtctcaaaagatccactacctcttctgtgagatgtacttcctgctgaggctggcatgttccaacatccacgtcaaccacacagtactggttgccacgggctgcttcatcttcctcatccccttaggtttcatgatcacatcctacgcccgcattgtcagagccatcctccaaataccctcagccactggg

SEQ ID NO: 662 - protein, 165 aa, Homo sapiens
MDGGNQSEGSEFLLLGISESPEQQRMLFWMFLVRYLVTVLGNVLIILAISSDSRLHTPMYFFLANLSFTDLFFVTNTIPKMLVNLQSQNKAISYAGCLTQLYFLVSLVALDNLNLAVMAYDRYVAICRPLHYVTAMIPGLCILLLSLCWVFSALYGLIHILLMTR

SEQ ID NO: 663 - DNA, 1370 bp, Homo sapiens
  source (1)..(1370)
  CDS (201)..(819)
  CDS (962)..(1170)
ggctggtctcgaactcctgacttcaggtgatccgtccaccttggcctccgcgagtgatgagattacaggcgtgagccactgcagccagcccatattaacttcttgactgtagaatataagtgagaatatttctgatatgtttgtaatgcatgcttgtgtcatgttctctttctctctcttttggaagtcacatcaacaagatgaaaccagggaatgagacacaaatttcacaattccttctcctgggactttcagaggaaccagaattgcagcccttcctctttgggctatttctgtccatgtacctggtcaccgtgctcgggaacctgctcatcatcctggccacaatctcagactcccacctccacacccccatgtacttcttcctctccaacctgtcctttgcagacatctgttttgtgtctaccactgtcccaaagatgctggtgaacatccagacacagagcagagtcatcacctatgcagactgcatcacccagatgtgcttttttatactctttgtagtgttggacagcttactcctgactgtgatggcctatgaccggtttgtggccatctgtcaccccctgcactacacagtcattatgaactcctggctctgtggactgctggttctggtgtcctggatcgtgagcatcctatattctctgttacaaagcataatggcattgcagctgtccttctgtacagaattgaaaatccctcattttttctgtgaacttaatcaggtcatccaccttgcctgttccgacacttttattaatgacatgatgatgaattttacaagtgtgctgctgggtgggggatgcctcgctggaatattttacttactttaagatactttgttgcatatgttcgatctcatcagctcaggggatgaataaagcactttccacctgtgcatctcacctctcagttgtctccttattttattgtacaggcgtaggtgtgtaccttagttctgctgcaacccataactcactctcaaatgctgcagcctcggtgatgtacactgtggtcacctccatgctgaaccccttcatctacagcctgaggaataaagacataaacagagctctgaatcgattcttcagagagcagaaacaggagggccattttccagaagttcttgagatttcagagctctaaatcccctagccagaaattatgattcatggatcagattgtgaaagtagaattttctcctagtatttatattctggactttagatttctttaaccttgacgacattagaaaatttacactttttcttaataaagctttctgctctgatatgcaactgtttttgtcctctgtcatttttctaaaattacatccaaactaggtc

SEQ ID NO: 664 - protein, 275 aa, Homo sapiens
MKPGNETQISQFLLLGLSEEPELQPFLFGLFLSMYLVTVLGNLLIILATISDSHLHTPMYFFLSNLSFADICFVSTTVPKMLVNIQTQSRVITYADCITQMCFFILFVVLDSLLLTVMAYDRFVAICHPLHYTVIMNSWLCGLLVLVSWIVSILYSLLQSIMALQLSFCTELKIPHFFCELNQVIHLACSDTFINDMMMNFTSVLLGVGVYLSSAATHNSLSNAAASVMYTVVTSMLNPFIYSLRNKDINRALNRFFREQKQEGHFPEVLEISEL

SEQ ID NO: 665 - DNA, 24264 bp, Homo sapiens
  source (1)..(24264)
  CDS (201)..(243)
  CDS (20427)..(20547)
  CDS (23113)..(24064)
tttcatctttatttttaaggttatactcctctaaataacccttaagcctcatcaagaaaggtttgtttatagtatttttactatagcttcatccttgataacgtcctaatttccttctggacaacctccttgaccaatggcatattgagatctatgtgacatgaggatatttctcagtaccactttgttactggtacctgatgcacacggattgcgaccagagcatgatgcctccatcaagtggtaatatgtttgcagcctgctgtccagccaagagtgacagatacttctagtgacttccccggtatccactctcatcttcttccaatatcaagagaatccaggttctgtcagattagtaaggtgtgctaatctaaattttaaaaaatctcttacaggttttcttgcagctggtaccatccatgtctcacagccctggccactgacagatcagcagatgtcaccacatgggcttctgagaaagctcttgaatggggatcgttcttaaacatgaattcctccctgtatgttttgttctttgctttacttttcaccttgcaaagagatccagtacctagtattggaagatccaccttaacgaccgtgcatatgaaaaccacagtctaaggaagtgactgcagaaagctcacagcgaccctggcctcccctgtggcctctttgagtgtctgcagcagccctggacttccagacttctatcacatgagaaaaaataaaactgattattggtttaagctgctatggatatttcattgtttttcttttaaatttatttattttaagatgggggtctccctatgttgcctaggctagattcgaactcctgggctcaaacaatcttcctgcctcagtctcccaagtagctgagaatacaggcatgtgccaccacacccagcttgtttttctatttcatttgtttattggtgggagggggtttctacacccagctggatgctgcctggagcccatacacctggtcattggtcagttgtgtggtttttttttgtttttttttttttgtttgtttgttttttgagacagagtcttgctctgtcacccaggctggagtgcaatggcgcgatctcggctcactgcaagctctgcctcccaagttcatgccattctcctgcctcagcctcctgagtagctgggactacaggtgcccgccaccacacccggctaatatttttttgtatttttagtagagatggggtttcaccgtgtgagacaggatggtcttgatggcctgacctcatgatccgcccaccttggcctcccaaagtgctgggattacaggcgtgagccaccgcgcccggccatgttcagatgactgattagcctatcaaaggcattcttccgtttctttatggtggctttgatttctgatctttccttctgattctttgagtctctatttttctgctgatgatgtagggcagatgagcccccaaactgggggttagcccaggagggttcttggctttgctcaggaaagaattcaagaggcagccagcagtaaaagaaattgggtttattgaagcagcagggcacagcagagtggctgccccttgtggagcagggctgactcataggcagtatacccagggtagcagcatataggctgttggctagcagtatttatacccagttttaattacatgcaaattaaggggtgggctattcagacagcactcctcattcaccttccaccatgattgtgaggcctccccagccatgtggaactatgagtccattaaacctctttatgaattaggcagtctcaggtatgtctttattagcagtgtgagacacagttgctccggcctataaatgacacatagttttaagtctgtttcctgcagttctcctatgattggccagggttttgattctgttttgtttttttgcattttcaaattaagggtagatgattctgagggtcttgctccagctctgtctcaggcccccccaccagctatccctctttcttgcagtttacctaacagagccttggggtgggcatgtgtgggaccgtggtgctaagatttaatgctttttctcattttactcatagttatgttgcaattttggcattctctatgtcttaaaggcagtgttgaaggtatagttttgtgtagaagattcataggtgtggagttacttcacagcatttgaaaggggatttggggaggttgcttaccactcactggccattgtttttagttacctggaagtctcctcaccttagtttttggagatactttggctgaatatgttattttattttattttaatttattttttgagacagagtgtcgcccaggctggagtgcagtggcatgatctcagctcactacaacctccacctcccaggttcaaacgatcttgtgccttagccacctgagtagctgggattataggtttgcaccaccatgcctggcaaatttttgtatttttagtaaagttgaggttccatcacgttagccaggctggtcttgaactcctgacctcaggtgatctgcctgcctcagcctcccaaggtgctgggattacaggtgtgagccaccgcgcctggtctggatatgctttaaaggggtcatttctttgtcttctggcctccattgttgctgactaaaagttagcgttattcttaacattattcccctgtaagtaatgtaagtaatgtgttgcttgtcactggctcctcttcagataattatcttgggttttcaacagtttgactctgtgtcttggtgcagtttcctgtgcatttactctgcttggggatccttcagattcttagatacgtgagtcactgtctttcacaaggaagtatttggccattatttcttcataattttttaattgtggtaaaataaacataacatgaaattcactgggtttttttgtttgtttgtttttgttttttgaggcagagtctcgttctgttgcccaagctggagtccagtggtgcaatcttggctcactgcaacctccacatcctgggttcaagcaattctcctgcctcagcctcctgagtagctgggactataggtgcgcaccaccatgcccagctaatatttgtatttttagtagaaatggagtttcaccatgttggccaggatggtcttgatctcttgacctcatgatccacctgcctcggcctcccaaagtgctaggattacatgtgtgagccaccgcgcacagccccattttaatcattttttaggtgtactgttcggtggcattaagtacattgacaatattggctaccaccactatccattttcagatctttctcttcattccaaaaaattatgtacccattaagcaatcactcctcaacacttctatcttcagcccctggtaacttgtaggtagtgtccatgaattttgtcagaagtagaataataaaatacgttgttttgtgtgcgtctgccttatttcattaaaagtaatgttttcaaggcttatccatgttgtagcatgtatcagaatttcattcccttttatggcttaataaattctgttgcatgtatgtgtcacgttttattcattcatctattgatgaacatttgggctgtttctacctcttggctattgtgaatcatactgatattgatgatttttttttcttttttcttgagatgcagtcttgctctgttgcccaggctggagtgcagtggcgcgatctgggctcactgcaacctctgcctcctggattcaagcaattatcctgcctcagcctccaaagtagctgggtactcgccgagtagcctgccaccatgcccggctaatttttgtatttttagtagaaacggagttttaccatgttggtcaggctggtcttgaactcctgacctcaggtgatatgcccgcctcagcctcccaaagtgttgggattacaggtgtgagccactgcgcccagcctgaagacagcattcttagcatgaaggatgcaaagttgaggcaaaggagatctatccaaaccaacctcattacactacggcttctgagccacttctctacctgattaaccaccctagcccacacccttggttttatcccattagcgcagtttacttgtctgtccaattcagtttataagtgtttggctcttaactgcttttctggcttgtttccttatgaggaaccccatgccacataaaactttcattaaacaaatacatgtgtatgctttaatcttgttaacctaatcgtatgtcggtgtaattatcaggcccagcaaggatcctaagatgatgaaggtgaaatcttgttgcccctacaatatggacattggatgcaagtgtctgtgtgagttcctgctttcaattctcaggaattttccgaagttgttttcttcctcattttctccttttgggactccagctgcgccacaggactctgaagttcctgtttcatttttctaatgtgtttgttttccagtttgtatgacttctactgatatatcttaaagttcactaactcttctgtcctcttcatctgtggaatccatttagtgactccttaaaatccagatgtctgaggtccttaggaaaacaggtgcttctccctgttgtagcttgaatttgctctgaatgtggtggtcccctaagccaataacacaatgcctcctggcctgccctggccacccagggaggaatgaagggagaggtaggtgtagtggtaataagccttgctgtgcacagctttgtgtaataactgaaaagggtgatgtgttttcctgctcccatccccaagcctgatttcttcaagatgcagtaactgggacgggtgcagtggctcatgtctgtaatcccagcactttgggaggccaaggagggaggatcacgaggccaagagttcgagatcagcctgaccaacatagtgaaacctcatttctactaaaaatacaaaagttagccgggcgtggtggcgcgtgcctgtagtcccggctactgggaagctgaggcaggacaattgctcgaacccgggaggcagaggttgcagtgagccgagatcacaccactgcactccagcctgagcgaaagagtgagactcggtcaaaaaaaaaaacaaacatgtagtaactgacaccccccacacatgccctcccctccacctcctgttatttcattagaaaccctgccaaggaacaaggaaatcctacaaagaaggtgtctcaggtacccatcagcagccatgcagtgatgacaagtgggtctgatgccattaaaaggttgttttcaaaccaccttctgttgcaagcagaacccaattgcacaggaatccaagctccatgatggagctttggccattgtttttagttaccaggaaggaaaatggcaagattgagattaagcctggaggcccggcggggacctcatggctgtgaagaccctggactcctgtgttgctggagatagtgtttgtgctctcacatggtctgctcagccgtctttctgccattcagcacaacggaaggacctagtgtgtttccagggtgggagcctacgagtggtggactctgactttgacattcgggacagatttattccttaattttcttccttacatacttggttcatctgagggcctcagactccctctccaacagccttctaccctctcccatttccacattttcatttttgagcttccttagctaagtggttttactttcttccctttccatctctctctctctctttatatttctttctctagatttttaaaattctgtctctctcttttctccaatttctccatttccctcttttttttttttttttttttttttttttctttttctaagtcagggcctgactctgtcgcccaggccaagtgcaatggcatgatctcagctcactgcaacctccacttcccaggttcaagggattctcttgcctcaccctccaaagtagctgggattacaggcacacaccaccacacccaggtaattttttgcatttttagtagagacaaggcttcaccatgttggccagactgatctcgaactcctgaccgcaagtgatcctctcccattttggcctcccaaaatgctgggattacaggcgtgagccactgcgcctggccttacattgttattctgcacacattggccattgcgggcatcgttccttacctgagtgaacacatccatgcattcctaatatgtgtgtcctgggaaacctgggtttggagtttggagtttggagtagagaggccaagggtttgcagtcaggcaggttacttgcaaaatatttacgtatcagtcagatacattggctcatgcttgtaatcccagcagtttgggaggctgaggctgggggatcacatgaggtcaggagttggagaccagcctggacaacatggtgaaatcccgtctctactaaaagtacaaaaaaattagctgggcatggtggtgcatatctgtattcccagctacctgggaggctgaggcaggagaatcacgtgaaccagggaggcggaggttgcagtgagccgagattttgccactgcactccagccttggtgacacagcgagactgtgtctcaaaaaaaaacaaaaacaaaacaaaaaaaaattatatatatatatatatatatatatattatgtattgtgctaagtttcttctttgtaaaagcccttgggggactgttaagtgtgtgtctcagcttggatttgggtttttttagaccagagatccctggtccctttggaggtgtgagtatgagggtatttgtgtctcttgagaaggtctaagagttgccatcagtttggtggcagggtatgttgtacttagagatcttgtcagaatggataactcattttacctccatcacttacgaaatgacttttatcagctacattaaaatgctagcaatgtcatactacattctcataaatactgggaattaactaatgactttcttgtccaggtatttataggctttggcaaggcagcagtacacaaaactggtcccattcatagtaatcttgacgttaaactttggagccagagtacaagcgaataaataaacactaggaagaaaagtaaatgcggagaagaataaatgctgtgaggaagagtaaagttgaggaggggaacagacagatgggattgacccgttcaacctgtgcagtgtacagcgtatactcttttttttttgagatggagtctcgctctgtcgccaggctggactgcagtggcggcgatctcggctcactgcaacctctgcctcccgggttcaagcggttcgcctgtctcagcctcccagatagctgggactacaggcacctgccaccacgccctgctaatttttttgtattttagtagagacaggggcgtacactcatttttggccactttacctttttaggaaacaaaatcatcacagaaatcctcaagaggcagctttcctgtacatttcagtttctcctaaaacagaacagggctgggaatgcttactgaggaatcatcaaagcatttctttctgtcatgacaagagcaattccagcttgctccatgagaccctgcttctctcactgtatttggttttcaggttgcaagatttgaagaacacttgtcaaaactcgacggttatttctgttttcaaggactgtttgatctgcattttcttccagtccattcatttctatctggtttggcctccaaggtcttaatcttttgcccaagaaaacgcttacatttaagcaacatgagttccttgatttgtctgtagcccaatgctactttcttgagttcagaataaaagctgattattattattatttattgttattattattttgagacagagtcttgctctgtcacccaggctggagtgcaatggtacgatctcggttcagtgttacctctgcctcccaggctcaagcaattcttctgccttagcctcaggagtagctgaggttacaggtacccaccaccatgcctgacaaatttttgtatttttactagacagaattttgccatgttggccaggttggtcttgaactcctggcctcaagtgatctgcccacctcggcctcccaaagtgctgggattacaccagccttgggacttgacagtttttttttttttttttaagatggagtttcgcccttgttgcccaggctggagtgcactggcgcgatcttggctcaccataacctctgcctcccaggttcaagtgattctcctgcctcagccttcctgagtagctgggattacaggcatgtgccaccatgcccggctaattttgtatttttagtagagacggggggtctctccatgttggtcaggctggtctcgaactcccaacctcaggtgatccgcctgcctcggcctcccaaagtgctgggattacaggcgtgagccaccatgctgggcccttgacagttattttgacctaacattggtgataatttttctctacctcaaccaagaagatggcggattggagcacttttttcatagattgaccagtcttcccaacaacactggaggccagtcatttactttctgcagagaaagagacatgtcaaagagtcaacttaccagctggaaactgggactagtgtcaagtgcttactctgacattcagctcttgtttcacctcttgacccctttcatgcctgcatcaaccagtggatctgctgggctcagagcacatgacaaaggggcttgtggtgttccacttggcttcctgaaatcccttcctttcccctggcagtgcttccacgcaggactttgagtgtgtagtcggggcagtttacatccccaagtgaaaatgctgaacgttcagcaagccttggtcaaaagttttcctaggctcactagtgaagaaatagcaattactcactggctattgccaggattgagaaaaagaatgtgtaccctagaggccgggcccaaggggaagagagtactttctctcagcattgagtaaaatcggccattttttaaatgagccttgggaaccagcataactggtccctttgtgcccaatttctccatcccgataatgaattccatggataacctcagtggcccatgacagttgcctctcattgcacttccctgccagttctcagaaagaaagtgtcacacagtctctggagggaacttctaattacaggaacacagtctgcttgtctgagtcttgttttcagttcttggaccctctccagcagggaaaatctctgtcttgtgtaacctttgggtaacatccaatccactcaggaattcttccctgctagggaacctattgtatatacccaatgaatattagctaagtgccttacacttttaattaggttttgggaagaaagatcaataagacaaagtactgcccttaagaaagtaaaggtctaggagaagagcgatattaacagtaaataagacacctagtatggcaggtgaatccatttgggaggccccagatgaggaagatgttgaactgggggccatcaagaaaatctaagtagaagagatgatgcaagctcagtgtagaaggatgattatgattgtgattatgattatttggagatggagtctcgctctgttgcccaggctggagtgcagtggcgcgatctcagctcactgcaacttccgcctcccgggttcaagcggttctcctgcctcagcctcccgagtagcagggactacaggcacacgctgccatgcctggctaattttttgtattttagtagagacaggttttaccgtgttctcaggccagtctcaaactcctgagctcaggcaatctgcccacctcggcctcccaaagtgctaggattacaggcatgagccaccgaggcctgccttgtagaaggctcattaagagttcaggagcagaatcaaataagcatgctaatcctgagtgcaaaggcactgaaaaaatgacagtatattacattctgtagataaaagacaatctttggagtaagaggcagacttgaaaggtaatatgggacagattggagaacacacacatttcctttattctctctctttttttaaagactcggtctcattctgtcacccagattggagtgcagtggcatgaccatagctttctgcagcctcaacctcctgggtttaagccatctgccaacctcagcctcttaagtacctggactataggcacacactaccatgcctgactaattctattttttttatttttgtagagacacagtcttgttatgttgcccaggctagtctcaaactcctgggctcaagcaatcctcctgcctcagcctaccaaagtgctgggattacagtcatgagccactgtgcctggctcacacacatatatctatatgttagtctactagtttcaatgtaaatgttagttggaaatcgatggaaacaaattgatattcaatgaagtttgcagttgagcaaggtaactggttcccagttgcggaatggaatgaagggtcctgtttctatgagcttttgtttcatagccacccaaaacatggtggtttaaagcaaccaccaggccgggctcagtgtctcataatcccagcagtttgggggccaggcaggaggattacttgagtccaggagttcaagaccagcctgggcaacatggtgaacccccgtctctcaaacaacaacaccccaccaccttttatttagggtttgtttgttgacaatttgggctgtgcttagcctgagagttctcttgactggcttctgcagtcactgtctaggtggggtggggtttattgttcttcgttcaaggtctcattcctccagtcgtccaggtaaggcctgttcacacattgctggagtgttccagcagagcttgtattgggaatgcctatgccccatcagccagtgcaatcatgggtgagcccaaggtggaagggcactcagttacacaaaaggggcttggatatagggaagaaaagacacagtggccattcttttctgcagttggccacaaggccagtatattattgcaagagtctaagtaaggggaacatctttattgagaagtgatgaacatgtgggaaattcacatatttatttatttatttattttttattttttttttttttgagacagagtctcgctctgtcacccaggctggagtgcagtagcgcgatctcggctcactgcaagctccacctcctgggttcacgccattctcctgcctcagcctcccgagtagctgggactacaggcgcccaccaccacacccggctaattttttttgtattttttttagtagagacggggtttcaccatgttagccaggatggtctcgatctcctgacctcatgatccgcctgcctcggcctcccaaagtgctgggattacagacgtgagccaccgtgcccggccgaaattcacatatttaaagtatacaacctgatcaattcccttctctctgtcttatcataatactttccctggaaacttttttttttttcttgagacagagtctcaccctgttgcccaggctggagtgcagtggcacgatcatggctcactgcagcctcaacctctcaggctcaagtgattctcctgcttcagcttcctgagtagctgggactacaagacacatgccaccatgcctggctagtttttgtattatttgtagagatggggtttcgccatgctaccctggctggtatcgaactcctgagctcaagcaatcctcccatctcggcctcccaaagtgccgggattacatgcatgagccaccgtgcccggcctgattccaggtctgatagaaaaactcaaccaactgcctattggaaaaactttgaatctgcatatgacctggaagccccacttccagttgtcccacctttctggactgaaccaatgtacatctttttttttttttttttgagacggagtctcgctctattgcccagactggagtgcagtggcacatcttggctccctgcaagctccgccttctgggttcatgcccttctcctgcctcagcctcctgagtagctgggactacaggtgcccgtcaccatgcccggctaattttttgtatttttttctggtagagacggggtttcaccgtgttagccaggatggtctcgatttcctgacctcatgatccacccgcctcagcctcccaaagtgctgggattacaggcgtgagccaccgcgcctggccgaaccaatgtacatcttatacgtattgactgatgtttccctaaaatgtgtaagaccaagctgtagcctgaccactttgggggcacatgttctcagggtctcctggggttatgttatgggccattggtcactcatatttagctcagaataaatctcttcaaatattttacagactttgattcttttcaccaacatccatatgagaatttagttcatcatacagacatatcacaagtcaagtcagaaaaggcaaattatgtaaaaaaaaaaagtgcttaggaaactagaaaactagaaaatttttttttaattaaaaaattttttaaaaattcctaaataaataactgatagaaaagagaatgagggctgggtgcagtggctcacacctgtaatcccagcattttgggaggccaaggggggaggatcacctgaggtcaggagttcaataccagcctggccaacatggtgaaaacttgtctctactaaaaatataaaaattagtccagtatgctggcgtgcgcctataatcccagctacttaggaggctgaggcaggagaatcgcttgaacccaggaggcagatgttgcagtgagccgagattgtgccactgcacaccagcctggatgacagagtgagactccatctcaaaaatatatatatttttatatatttttattatatatattttatttttatatatatttattattatatatatacatatatatatatatatagcaagaattagatgccattttaatagactttatttttttagaacgtccaccaatgctgctttgattcaagtccacatgatctgtcatctgggctgtaggtagcctggcacccttcctgcccattctgcaggggaacatcattgtacacattttttttttaacacccggtgctcttacttccctccagaaggaaacctaaactccagtgtcctccatgatctgactcctgttttttgctccaactccatctcttgttccatcaccctcctgtcttctaatccatcctttgtattaagaagcaaattacctaaaccttttaaataaggcaaaaggatgaccgcattactgttcagtatcatgctgaagcattgtctgacaggcctagctagttctttccttctcaaggcaatgttcgtttgtttgcttgagacctggactctgtgaagttattgccaacccacagggaattaatcaattgcaaatgatttttgtccagtcgagttgcaaattacttcaattgcttctgttcagttaaaaagattacccctaaatggccaggcgtcatggctcatgcctgtaatcccagcactttgggaggccaaggtgggtggatcatttgaggccaggagtttgagactagcctggccaatacggtgaaaccccatctctactaaaaatacaaaaattatctgggtgtggtggcacatatgcctgtaatcacagctactacgcctcaggaggctgaggtgggagaatcacttgaacccgagaggcagaggttacagtgagctgagattgcgccgctcactccagcctgggtgacagagtgagactgcaccaaaacaaacaaatgaaaaaaaatgaaataatgtgttaataattttatattaaaaattatatttcagaaaaaatatttaccccttttttttttagacggggttcgcttttgttactcaggctggagtgcaatggtgcaatctcggctcactgcaacctccacctcttgggttcaagcaattctctcgccttagcttcccaagtagctgggattacaggcgcccacaaccacgcacagctaatttttttttttttttttttttgtatttttagcagagacagggtttcaccatgttggccaggctggtctcgaactcctgacctcaggtgatccacctaccttggcctcccaaagtgctgggattacaggcatgagccaccgtacccggccaagcacattttgttgtatatttgaagtactcgaaatttattcctgcaaaccacacagatttttgtacatttaattttaattttaaaagatctgtcagtcattgacagatgaatggataaacaaaatgtgtgtatatacatataatataatgaaatattttgtggctttaacaaagaacattctcctgagcatggtgcctcatgcctataatcccaacactttgggaggctgaggcgggaggatcactcaaggccaggaatatgagaccagcccggccaacatggtgaaaccccatctctactaaaaatacaaaaattagccggacatggtggcgcacacgtgtaatcccagctactcgggaggctgaggcaggagaatcgcttgaacctcggaggtggaagttgcattccagcctgggcgacaagagtgaggctttgtctcaaaataataatataaaaataataataataataaatagaaaaacaacaaaaaataaaaaacaaattagctaattgggagactgatgtgggaggattgcttgatctcaggtctttgggattgtaatgagctatgattgtgccactgcactccagcctaggtgacagagtaagaccctgacaaaaaagaagaaagaaaaaaaaagagagaggagagagagagagaaagaacattcggacacatatacagcatacatgaaccttggcaatatttcacttaaatgaaataagtcagtcacaaaaagacaaacagtgtatacttccgtctatgaagtaggtaccacagtcagaattatagagacagaaagtggtatggtggttcattaggggctggggagggtgaatgagggatgagtgttacgggacagagtttcagcttggggagatgagaagattctgaatatggaggatagtgatggctgctgtgaatatacttaatgccactgaatagtacacttaaaatggttaagatggtgaactgtatgttatgtatattttaccatcattttaaaaattgaaaaaaacttttttcttattgttcagttcctcccaaacttgccatcaatgaaattttccccatcactctacccagatcgctgtttctaatgttttccatgccattaaatgtgatggatattcttcagcctttattttgcttagccttatagcatcgttttacatggttgttagaaataaatcttggagtcataaagaaaaatgagcactcaaacaaaggatttctcagcaaagcaaatttacttctgcgcagaagggtgcttctcgtagggttggctgctacaagagcaccctgaacaaaggagagtagcaacttttattcttaatgcgactcttgactttgtgtgtcctttccccattggctggggtcggacagcacaatctaaactagacttgattggttacacatttaaactgtcttagataaggtgggtgtgtgatgggagacagaggagaggaggaaggggtcttctacagaggaatagacagctagtctattcttaaataaggaaagaaatgtgagctggggctatggcatatctgggcatgcagcaaaatcagaaagaagaaaaggagaagaaagtgtgtggggggggtacttggaattagagaataagaagctgagcaggctgtttgaagagaaatcttgctgtatctcgcaatggttgactctccctctcttgaaacaggacttacgacatgtccacagcctgtttaacgccctgcagccaacgcgatcacaggggattcacggaaatagttgcatctctattttcttctgtgttaccttgagacccttaggcactgggattacagagagatgggtctttgtagcttctgcgacacattccagaggggaaaacctctttatctcaaagccaaaccaatagtgatgaaagctcttccaagaataaagaggccccaagagggtgggaggtgcagagagagtcacctggcttcagagctgccttcttggaaacagaattagaacacatcatacctttctgccatttgctcttgatcccaagggagccgaatgggttggagagtagaacatcactggaacagtggatttaatgaggaaggatgagacatcagctccctggggcttgagaaaccataaatacttccctaaaacacctcacctggacagtttcctgacgccacactcatgcatcttagagaggagagttaggatgacttcatgacaagttccatctccccgcctttccctgctagattctgtcttcagcattcaacagtcaggggaggaagacgtcataccagcatttttttttttcaagcaatgtcagttgagtgactcacactatccttgttagtaccgtgtgtgaaaaggatttaaaaagtagtgtggggaggaacagagatggaggtaacagggttgataatgtctcatgatttttaaaatgtctctaggattcccttacctggttatagatgtcttaaggcattgcaacttttgggaggctgaggcaggcggatcgcttgaggccaggagtctaagacaagcctggccaacttggtgaaaccccatctcatctaaaaatacaaaaattagctgggcatggtggcggatgcctgtaatcccagctactcgggagcctgagtcaggagaatggcttgaacccgggagacagaggttgccatgagccaagatcacgccactgcactccagcctgggtgacagagtgagtgagacgctgtctcaaaaaaaaaaaaagattctattgcaactgtttctgtcacctccacctctgatggcctttcattctggaaactagtgactttctcaatgtcagtaggaactggcacttccttgagtggattcctttcagtctacctgctaacaccttcctttttcttctctagtataatataatagttctcggccgggtgcagtggctcatgcctataatcccagaactttaggaggccgaggcgggtggatcacaaggtcaagagatcgagaccatcctggccaacatggtgaaaccctgtctctactaaaaatacaaaattagccgggcatggtggtgtgtgcctgtagtcccagccatttgggaggctgaggcaggggaatttcttgaacctgggaggcagaggttgcagtgagctgagattgcaccattgcacttcagcctgggcaacaagaacaaaactccgtctaaaaaaaaaaaaatcaacaaagcaaagcaaaacaaaacaagtatgtattaaatgttcactctgcaccagatgttacatatattatcattgcaattgtgaatggactttttttcctcttattttttctcatggctgtttgcagatacataagaaagctgatgacactgattagttgtaattaattgtgtttaagttgactttttttttttttgagacagggtctttctgggctcaagcaaacctcctgccttggcctcccaagtagctaattttttaaaaatctatttttgtagaggcaagtgtctcattttgttgtctaggctggtctcaaactcctggcctcaagaatttctcctgccttagcctctcaaagtgctgggattacaggcaggagtcacagcacccagccaggctgttacattttattaaatgaattttagcttatgttaaaaccatggtttctttttctgccttgctctattcacgcatatactttgttatctgacttgccgatattaaattttttacactcttaggataaatattcattagtaatggagtgtgttattttatccaaaagataacttcatttcactcccctttcaggcttttgcatctgttgtcaacatgagattaatttgcagatttcttgtttgtcttatatgtgatttttttttttttttaccttcattcagctttccatgatgagtacaaagccttggggaatatctggataaagtaaaattttctagaatgtgatctggacttgccacaaagaaacttcaggttcgtcgggcttcatggtgtatttgtctaaatatttaagtaaaaaataatgctggctgggcacagtggttcacgcctgtaatcccagcactttaggaggctgaggcgggtggatcacctgaggtcatgagtttgagactagcctggccaacatagtgaaaccctatctctattaaaaatacaaaaattagccgggtgtggtggcgagcatctgtagtcatagctactcaggaggctgaggtgggaggatcgcttaagcccaggaagtggaggttgcagtgagctatgatcatgctactgcacttcagcctgggcaacagacccagaccctgtcaaaaaaaaaattgtttcacataactacagtgcaatgatcacaatcaggaaattggcattaataccatattatatatagtattatagatatataatacactatttgctatatactatattagtaatatagtaattagtatatagcattaatataatactataaaatttacagagctcatttatattttatttttttatttcttctcatttatattttaattatcccaataatgtcatctatagcaaaagaaagactcaagtcatccattacatttgattgatatgtcttttttgcctcctttaatctggaacatttcctagacttttttttttttttttttttttttgagatggggtcttgctctgtcaccaaggctggctgggttgcagtggtgcaatcatagctcactacagcctcaacctcctgggctcaggcaattctcctgcctcagcctcccaagtagctgggacaacaggcatgtgccaccatgcccagctaatttttgtattttttgtagagaaggggtttcactatgtttcctaggctggcctcaaactgctaaactcaaacgatactctcacagcctcacaaagtgctgggatcccaagtgtaagcctccatgcctggcatttctttgtattttatggcactgacatttttgaagagcacaagtgagatattgtgcccctcaagctcagtttgtgtgatgttccctactctttaaagttctgcgtctttggcaggaatcccacagaaatgatgtttcgctgtttccagtgaatcctatcagaaagcacatgtttattatgtcccattaagaatctccttgaccatgtaataggggtgctataaaatcagtgttaagatagatggttgggattagagagtccattttctagaattctattttgtttgggacgttataaaatggatatttaatatgggtggttaactatgagatatttcctcacgcctgttagaattgtttattattattattcttttacctatgaattggcatttttgtttatttatcagtttgtgaaaatgtccttaatttgttgaggtagcaaacaaatttcaactttgattgctatgcaaaaccagaagataatctgctttgcaatgaactttatacagttcagctgcatataggcaacatgctatatatgaaaaaaatactaactgaactacaggtattaaatactgaaatgagttaacagtttattataatttattgtatttaacaatctaggaagttcgcagccatcagcagttctagtgcaatttcaggcgcaactgggaattcgggaatctcggtggagctgttagcgtagcgaaccttgtacataaaatacatgcatactttatttatttatttatttatttattatcattattattattatttttgagacggagtctcgctctctcgcccaggctggagtgcagtgtcgcgagatctcggctcactgccagctccgcctcccgggttcacgccattctcctgcctcagcctcacgagtagctgggactataggcgcccgccaccacgcctggctaattttttttgtattgttagtagagacggggcttcactgtgttagccaggatggtctcgatctcctgacctggtgatccgccctcctcggcctcccaaagtgctgggattacaggcgtgagccaccgcgcccggccacatgcatatacttttgatagcacatgtgaagggatctctctaaaatggacctcatcggcttcgttctcagcaaattgacctgggccactcaacatggcttttatcgtgcccgatgttaatgcacgttcttttttgacaataaattcatggccatcagataatatcaatttgacatacacggcatcagggccttcacagccaccgtaggttttcttctcaccatccattttgttcttacgaaattctactttgcttccccaggaactttagtagtttctcgtcaggcccacagccagcgcagcagggtccgtgtgtactgccacagcccctattccaaggccgccccaccccgccccgccaacccagctgcctgctcccgtgggtgggttccggggcagtggaaagaattacttcagctgggtcagagccgctttctgtgactggtgggagatccgtgtaattttttattttaagacatggtctcgccctgtcacctaggctcaagttcagtgtcacaatctcagctcactgcatcctcgaacactgtggctcaaagcgatcctcccgcctcagcctcctgagtggctgggactacaggcacatgccaccatgcccagctaatttggtttatttttttgtagagagcaagtcttactgtgttgttcgggctggtcttgaactcctggcctcaagcaatcttttcatctcagcctcccaaagtgctggtattacaggcgtgagccaccatgcctgaccttagaattattaaccattactagcggttagctaacaattggctctattattagctaactattaactaactattcactattattaaaaagacaagagttggccgggcgcggtggctcacgcctgtaatcccagcactttgggaggccgaggcgggcggatcacgaggtcaggagatcgagaccatcctggctaacacggtgaaaccccgtctctactaaaagtacaaaaaattagccgggcgaggtggcgggcgcctgtagtcccagctactcgggaggctgaggcaggagaatggcgtgaaccccagggggcggagcctgcagtgagccgagattgcgccactgcactccagcctgggcgacagcaagactccgtctcaaaaaaaaaaaaaaaaaaaaaaaaaaaaaaaaaaaaaagacaagagttggcaagggtgagaagaaaagggaaccccttgtgccctgtcggtggtaatgtagattggagcagacattatgggaaatagtgtgagggttcctaaaggaattaaatagaggccgggtgtggtggcttacgcctgtaatccccagcactttgggaggccaaggcgggtggatcacttgaggccaggagttcaagaccagcctggtcaacaaggtgaaaccctgtctctactaaaaaaaagaaaaaatacaaaaaatacaaaaattagctaggcgtggtggcacatacctgtaatcccagctactcaagaggctgaggcacaagaatcgcttaaacttgggaggtggaggttgcagtgagctgagatcacgccactgcactccagcctgggcgacagagaatctgtctcaaaaaataaaaaggaaaaagaaattaaaattttgagactctttctcaaaaaataaaaataataaaatcaaaaagaagaaatttaaaataaaagaaatttaaaataaaaagaaattaaatatgatccagcaatccctcccctggatatgtatccaaagaaaatgaaattgccactcgtaaagatatctgcatgctcatgttcattgcagcattacttgcaaaagtcaagatatggaaacaacctaagtgtctgctgatggagaaatggctaaagaaaatgtgatatatatgtatatgtacatttgtgtgtgtgtatatatttgtgtatatatattccattgtgtgtatatatatgtatgtgtgtgtatatatatgtatgtgtatgtgtgtgtatatatatttttacacaatttttacaatcaatattattccactgattgataaaataggaatagatcctgccatttgccacaacatggatgaatctggaggccattatgttaagtagaataagtcagatgcagaaagaaaaatattgcattttttcacttctatgtggaatattttttttaaagtcaaatatagagaataaaacagtggttaccagaggaggggtgcggctgggggagaaaatgaagaagatgtaggataatggatataaagtagcagatatataggataaacgagtctagagatccagtgtacccatgaaaattatagtcaataacagtatgtagtattccggatttatgctacatcagtagactgtagctgttcttgctataaagaaaatgggtaactatgtaagacgatggatatgttcatttgtttcactacagtaaccattttactatctatatgtatctcataacatatatagtatacgttgaatatacagaatataattaatttttaaataattaaatatatgggtggttgagatgagagacttcattttttagaattccatttacgtatgaaagattagacaaaatgagtccataaatcacaagtaaatagtatggacaacatttctattacatgaaggatgcccgttggatgttaactgatgtttctcttaccgcttccttttaaataaataaataaatataattttaaataaatatgtatattttaaaataaatacatatatacatagttttatttttattttattttttatttttattttttgagacagttctccctctattgcccaggctggagtgcagtggtgtaaacatagctccctgcagttgcaaattcctgggctcaagtgatccttccatctcagcctcccgagtagctgggactacaggtgtccaccaccatgcctggctaatgacctcttcttttgtagatacatcagctacatggaagcaggaaaccaaacaggatttttagagtttatccttctcggactctctgaggatccagaactacagccgttcatatttgggctgttcctgtccatgtacctggtgacggtgctgggaaacctgctcatcatcctggccatcagctctgactcccacctccacacccccatgtacttcttcctctccaacctgtcctgggttgacatctgtttcagcacttgcatcgtccccaagatgctggtgaacatccagaccgagaacaaagccatctcctacatggactgcctcacacaggtctatttctccatgttttttcctattctggacacgctactcctgaccgtgatggcctatgaccggtttgtggctgtctgccaccctctgcactatatgatcatcatgaacccccacctctgtggcctcctggtttttgtcacctggctcattggtgtcatgacatccctcctccatatttctctgatgatgcatctaatcttctgtaaagattttgaaattccacattttttctgcgaactgacgtacatcctccagctggcctgctctgataccttcctgaacagcacgttgatatactttatgacgggtgtgctgggcgtttttcccctccttgggatcattttctcttattcacgaattgcttcatccataaggaagatgtcctcatctgggggaaaacaaaaagcactttccacctgtgggtctcacctctccgtcgtttctttattttatgggacaggcattggggtccacttcacttctgcggtgactcactcttcccagaaaatctccgtggcctcggtgatgtacactgtggtcacccccatgttgaaccccttcatctacagcctgaggaacaaggatgtgaagggagccctggggagtctcctcagcagggcagcctcttgtttgtgatggatcccttggccccaggactaagaagttttgtgagcaccaatggcaaaaatgttttattttgaaattcttactctttaaaattaaaaacatttttttatactttgagagtacaaatgcagatttcttaacatgcatttgcataagggtgaagtctgagcttttggcgtaccaattacctgaatagtgaacataaggca

SEQ ID NO: 666 - protein, 371 aa, Homo sapiens
MHTDCDQSMMPPSSGTLVVSRQAHSQRSRVRVYCHSPYSKAAPPRPANPAACSRGYISYMEAGNQTGFLEFILLGLSEDPELQPFIFGLFLSMYLVTVLGNLLIILAISSDSHLHTPMYFFLSNLSWVDICFSTCIVPKMLVNIQTENKAISYMDCLTQVYFSMFFPILDTLLLTVMAYDRFVAVCHPLHYMIIMNPHLCGLLVFVTWLIGVMTSLLHISLMMHLIFCKDFEIPHFFCELTYILQLACSDTFLNSTLIYFMTGVLGVFPLLGIIFSYSRIASSIRKMSSSGGKQKALSTCGSHLSVVSLFYGTGIGVHFTSAVTHSSQKISVASVMYTVVTPMLNPFIYSLRNKDVKGALGSLLSRAASCL

SEQ ID NO: 667 - DNA, 1078 bp, Homo sapiens
  source (1)..(1078)
  CDS (201)..(878)
tgctggggaacctactcatcatcctggccgtcagctctgactcccacctccacagccccatgtaattcttcctctccaacttgtcctttgtggacacctgtttcatctgcaccacagtccccaagatgctagtgaacatccaggcacggagcaaagacatctcctacatggggtgcctcactcaggtgtatttttaaatgatgtttgctggaatggatactttcctactggctgtgatagcctatgaccggtttgtggccatctgccacccactgcagtacatggtcatcataaacccccatctctgtggcctcctggttctggcatcttggttcatcattttctggttctccctggttcatattctactgatgaagaggctgaccttctccacaggcactgagattccgcatttcttctgtgaactggctcaggtcctcaaggtggcccgctctgatgctctcctcattaacattgtcttgtatgtggccatggcactgctgggtgtgtttcctgtagctgggatcctcttctcctactctcagattgtctcctccttaatgagaatgtcctccaccgagggcaagtacaaagccttttccacctgtggatctcacctctgtgtggtctccttgttctatggaacaggacttggggtctatctcagttctgctgtgacccattcttcccagagcagctccatggcctcagtgatgtacgccatggtcacccccatgctgaaccccttcatctacagcctgaggaacaaggatgtgaagggggccctggggagactccttagcagggcagcctcttgtctcttacggtacacaacctcagaactaagaggatgctatgggtcccttaagcaaatgtgaatgcgcatatcctagatcttgctctcccctaaaatatatgttgcagtttcctattttcaaagcacctacgactttgcttaaaatgtttttgtatggccgggcacggtggcttacacctgtaatcgcagcactttgggaggcagaggcgggcagatcatgaggtcaagagatcgagaccatcctggccaacaggtgaaacc

SEQ ID NO: 668 - protein, 225 aa, Homo sapiens
MFAGMDTFLLAVIAYDRFVAICHPLQYMVIINPHLCGLLVLASWFIIFWFSLVHILLMKRLTFSTGTEIPHFFCELAQVLKVARSDALLINIVLYVAMALLGVFPVAGILFSYSQIVSSLMRMSSTEGKYKAFSTCGSHLCVVSLFYGTGLGVYLSSAVTHSSQSSSMASVMYAMVTPMLNPFIYSLRNKDVKGALGRLLSRAASCLLRYTTSELRGCYGSLKQM

SEQ ID NO: 669 - DNA, 11850 bp, Homo sapiens
  source (1)..(11850)
  CDS (201)..(402)
  CDS (2391)..(3247)
  CDS (11075)..(11650)
  modified_base (4837)..(4936): a, t, c, g, unknown or other
  modified_base (11219)..(11318): a, t, c, g, unknown or other
taggtagttttttttttatggtgaaaagatatacatatatttagaattagccagctggactcagtttagatgatcccaattttgttggcaacatccaaagcatcataatcaggagccagtcgaacatatgccttcttctcttcatcaggctgaatcagggtgttgaccttggccacatccatgtcatagagctacttcacatgctgtttgatctggtgcttgttggcttcaatgtccacaatgaacaaaagtgtgtcattgtcttctatcttcttgatggtggactcagtggtcagcggcaacgtgatgattgcagagtggccaagcttgtttctcctgggggtgctctttcgaggatatttgggctgcctccggagtcacagtgtcttgggctgctggaaggtgggtgacatgtgggatcttttttttagtggctgtggacacctttcaacactgccttcttggcctttaaagccttcactttggcttcggctttaggaggggcaggagcttccttatttgctttcggcgccatcttgtgaaaagggcccaataggtagttttttaacccttgcttccctctgaagtccccagtgtctgctgttcccctatttatattcctgcgtacccaatgattagcttccactgataagtgagaacatgtggtatttggttttgtttctgccttaattcacttaggataatgggctccagttgcgtccatgtcactgcaatgaacaggtttttttttttttttctaagacaaggtcttgctcggtggcccaggctggagtgcagtgatgtgatcatagctcactgcagcctcgacctcccaggctcaagtgatcctcctgccgtagcctccccagtagctgagactacaggcagtcaccaccaagtcgaactttaaattttttgtagagatggtttttttttttttgacggagttttgctcttgttgcccaggccagagtgcaatggtgcgatctcggctcactgcaacctccgcctcctgggttcaagcgattcttctgcctcagcctcccgaatagatgggattacaggcatatgccaccacgctcagctaattttgtatttttagtagagatggggtttctccatgttggtcaggctggtctcgaactcctgacctcaggtgatccacccgcctcggcctctcaaagtgctgggattatagccatgagccaccatccccgggctccaagatggggtcttgtcatgtcacccaggctggtcttgaactcctgggctgaagtgatcctcctgtcttggcttcttaaggtgctaggattacaggcatgagccactgtgcccagccaattgtattcttttttatggctgcatagcaatccatggtgtctatatactacatttaaaaaaatccagtccaccactgataggcaccccggttgattcaatttctttgttattgtgaatagtgctgtgataaacatgctcatttggtagaatgatttattttccttgggcattccctcaatttgattccagtgctggctcatcacagatttctctttgcttcagattctcatccacgcatttagacccaagcaagcccttctctctgttttcttacttagcttgttgcttcagtttcatcatcccgtttcacctcccagcccttttggtatctgacctcagctttggttaaggacccctgggatgaggggtattgaagcattccaccatctatgtggctgtctttaacttgaaccgcatttttttttttgagatggagtctcgctctgttgcccaggctggagtgcagtggcatgatctcggctcactgcaacctccaccacccgggttcaagcaattctcctgtctcagcctcctaagtagctgggattacaggcgagtgccaccacacccagctgatttttgtacttttagtagagacgaggtttcaccatattggtcaggctggtctcgaactcctgacctcgtgatccacctgtctcggcctcccaaagtgctgggattacaggcgtgaggcaccacgtccggccgaacctcaaatttttcactatagggagcagtgggtagctcttcattggagtgtggccaagcgtctcattcagagatgccagctgcttctttcccatcccatgccttggatagacactaactgattaagttttctccctccagcctactgattctagctgcagcctcattactcttctcaagacaccatcccaggaagccactaccaatcaatgatgattggcatgtgagatgaaaattatttgccaccccatgcaggcttcttgccatagttcagctgttcttcctgcagctaaagtgcattgtgtaaaacatgggggatgtgaatcagtcggtggcctcagacttcattctggtgggcctcttcagtcactcaggatcacgccagctcctcttctccctggtggctgtcatgtttgtcataggccttctgggcaacaccgttcttctcttcttgatccgtgtggactcccggctccatacacccatgtacttcctgctcagccagctctccctgtttgacattggctgtcccatggtcaccatccccaagatggcatcagactttctgcggggagaaggtgccacctcctatggaggtggtgcagctcaaatattcttcctcacactgatgggtgtggctgagggcgtcctgttggtcctcatgtcttatgaccgttatgttgctgtgtgccagcccctgcagtatcctgtacttatgagacgccaggtatgtctgctgatgatgggctcctcctgggtggtaggtgtgctcaacgcctccatccagacctccatcaccctgcattttccctactgtgcctcccgtattgtggatcacttcttctgtgaggtgccagccctactgaagctctcctgtgcagatacctgtgcctacgagatggcgctgtccacctcaggggtgctgatcctaatgctccctctttccctcatcgccacctcctacggccacgtgttgcaggctgttctaagcatgcgctcagaggaggccagacacaaggctgtcaccacctgctcctcgcacatcacggtagtggggctcttttatggtgccgccgtgttcatgtacatggtgccttgcgcctaccacagtccacagcaggataacgtggtttccctcttctatagccttgtcacccctacactcaacccccttatctacagtctgaggaatccggaggtgtggatggctttggtcaaagtgcttagcagagctggactcaggcaaatgtgctgactacatagaaactgctggtgagattccagcggtcctcgatcccacccaccttcccaaagtatgcatttggcattcaattgccaatttgtgcaactggccaaatatccagccattgcccaaggtgcaactttttgagaaaatgtctgccttttaaattgaggtagaatacacgtaacataaaatgagccactttgaagtgtaaaattcagctgctaagtgcttatgtccaaggctaagtgtctgcccagttcctccctgctcacgccgagttcctccctgctgatgactagctgggttcatgttttccctcatggacttgtggaaagcaatggtaatcatcccaatcacattcagcatatttttttctctctcttttttttctttttgtaacggggtctcactctgtcgcccaggctggaatgctgtgacatggtcatagctcaccgcagactagaactcctaggctcaaggggtcctcctgcctcagcctcttgagtatctgggactacaggcatgtgccaccacgcccagctaattttgttcattttttgtagagatggggtctcatgatgttgcccaggctcgtattgaattcctggactcaagcaatcctcccatctcggcctcccaaagtgctgggattacagatgtgagccattgtgctcagacagtatattatttctgtaacaatgtacccccccccccattttttttgagatggagtctcattctgtcatctaggctggagtgcagtggtacagtctcggctcactgcaacttccacctcccgggttcaagcaatcttcccacctcaacctctcaagtagctgggattacaagcgtgcgccaccatgcctaactaatttttgtatttttagtatggatggggtttcaccatgttgaccaggctggcctcaaactcctgacttcaagtaatctgcccttcttggcctcccaaagtcctgggattacaggtgtgagccaccacacctggccagaaatatcaatatattataaagctaatatttaaacattataaagctaacaaaactctgaagaagtgtcagcaccaaagctggccctgagaagaaaacagaaaataaatcaggtgtaacttagatattttattaaaatatgtatatttacagtgtctactgggtgataagtaaaatatacaaattaattaaaaatatacaaggagctccagtaactcagtaggacaaaatcttttttttttttttttttttttttttgagacagagtctcattctgttgcccaggctggagtgcagtggctcgatctcggctcacctccacctccacctcccaggttcaagcaattcttctacctcagcctcctgagtagctgggattacaggtgcctgctaccatgcccggctaatttgtgtatttttagtagagacggagttacaccatgttggccaggatggtttcaaatgcctgacctcaggtgatcttcccacctcagcccctcaaagtgctggcattacaggtgtgagacaccgtccttgnnnnnnnnnnnnnnnnnnnnnnnnnnnnnnnnnnnnnnnnnnnnnnnnnnnnnnnnnnnnnnnnnnnnnnnnnnnnnnnnnnnnnnnnnnnnnnnnnnnntgccaccacccctggctaatttgtgtatttttagtagagacggagttacaccatgttggccaggatggtctcgaactcctgacctcatgtgatccgcccacctgggcctcccagagtgctgggattacaggtgtgagccaccacaaatcctcaccctgaagccccacaaattcactccatctcctcacctttcattcaaggtcacagacttgttatctacttcctgtgagacctgctcccaatctgtcctaactcccagctgttcttgttctcaccccgtctacctgtggtggtgtggtggctcatgactatagtcccagcactttgggaggccgagatgggcatatcacttgaggtcaagagttcgagaccagcctggccaacatggcgaaaccccatctctgctaaaaatacaaaagttagctgggtgtggtagcgggcacctgtaatcccagctactcaggaggctgaggcagaagaattgcttgagcccaggaggcggaggttgtagtgagccaagatggcaccactgcactccagcctgggcgacagagtgagaccctgtcttaaaataaaaaaagttataaacatggaatcaccacacaacccaaccattccgctccttggtgtatacccaaaagaagtgtgcttaaacaaattcttgctcatgcatgctcacagcggcctacctctacagccaaaggtggaaaaaacccaaacgtccactaatggaggaatgcataaacagaatcaatataatggaatgttacttggtcataaaaaggaatgaaagactggctgtggtagcttgcacctgtaatcccagcactttgggaggccaaagtaagaggattacttgaggccaggagcttgaaaccagcctgctcaacatagtgaaactccatctctacaaaaagtaaaaaaaaaaaaaaaaagtccaggctgtggtggcacgcacctgtagtcttagctgcttgggagactaaggcaggagaatcacttgagcctggaagcagaggttgcagtgagccaagatcacaccactgcattccagcctgggtgatagagtgagaccctgtcttgcaaaaaaaaaaaaaaaaaaaaaaaaaaaaaaagaaaagaaaagcaaaaaagatatctgctaccatgtatataaaccttgaaaatattataataaatgaaagaagcctgacacagtagatagcatgtggtataaattcatttatataaagtatctagaatagttaaatcaatagaaagagaaagcagattgatgatggccggtcgtagtggctcatgcctgtaatcccagcactttgggaggctgaggtgggcggatcacctgaggtcaggggtttgagaccagcctggccaacatggtgaaaccttgtctctcctaaaaataaaaaaatacaaaaattagccgggcgtggtggtgcatgcctgtactcccagctactcaggaatctcaagagaatcaactgaaccgggaggtggaggttaaagtgagtcgagattgcgccattgcactccagcctgggtgacagagccagactctgtcttaaaaaaaaaaaaaagaaagaaagcagattgatggctacatgatcttagaggtgggtgcagaggggaattggggttgattacttaatgggtaagagtctgattttgggtggcaaaaatgacttggaactagagagaggggacagctggggcatcacttcatgaatgtaccagatgctgctgatttgttcactttaaaataattagtgttttattatgtcaattccacctcaataccaaaaattattctcaagtttgatattaggaaaagaaaacttagagcaaaagcaataacacaaagcagtaaatcgatggaggaacatttgtttttagaaccatttctgtcctgaaaacctagtgtgtgataaagatagaatttcaaaacatctcgacaatgatgatttaataagagtcctgtggacaatagattacacatgtgtaaaagaattttgctcgactaacttttgaatttaggaaaactcctcaatatgttagaaatattaatatatcatcaagctaatatttaaacattataaagctaacaaaactctgaggaagcaagaagaaaacaaactaaatcatgggcaacttagatatttgatcaaaatatgcacatttacagggtctatcaggtgataagtaaaatatagaaattaatttaaaatacagaaggagctcaaaaaactcaatagaacacaatctttttttttttttttttttcctgagacagagtctgttgcccagtctggagtgcagtggaacaatctcggctcaccccaacctccacctcccaggttcaagcaattctcctgcgtcagcctcccgagtagctggccctacaggcacctgctaccatgcccggctaatttgtgtatttttagtagagataggatttcaccatattggccaggctggtttcaaatgcctgacctcaggtaatcttcccacctcagcccctcaaagtgctggcattacaggtgtgagacaccgtccttggcccaataggacaaaaatctaataattaataatttgattttgaaaatgggcaaaagacatgaatagattttttttttcaagacagagtctcactctgtcacccagactggagtgcaatggcacgatctcagctcactgcaacctccgcctcccaggttcaagcgattctcctgcctcagcttcccaagtagctgggattacaggcaccagccaccacgcccagctaatttttgtacttttagtagacaaagggtttcatcatgttggccaggctggtctcaaacttctgatctcaggtgatccacccaccttggcctcccaaagtgctgggattacaggcatgagccaccgcgcccggcctctgaatagacgtttttcaaaagaagatatacaaatggcaaacaggcttatgagaaggtactcaacatcactgatcatcagagaaatgcaagtcaaaactgtgaggagatatcatcttaccccagttagcttacatccaaaagacagacaataatacatgctggtaaggatgtggagaaaaaggaacgcttgtacagtgttggttaattcaatcactatggagagcagcaagggccacacagtgagaccctctctcttaaaaaaaattacaaaaacaggcctggtatagtggctcacacctgtaattccagcactttgggaggcctaggcaggcagatcgcctgagctcaggagttcaaaatgagcctgggcaacttggcgaatccgattctctaataaaaatacaaaaattagctgggtgtggtggagcacgcctgtaatcccagttacttgggtggctgaggcacgagaatcgcttgaggctgggatgcagaggttgcagagagtcaagattttaccactgcactccagcctgtgcgccagagtgagactgtgtcaaaaaaaaatggtgaatagaagaataattgaataactgcctcagacatttatacagttctcatctcattctgggcacacggaagatcatgttggcctcatctccttgattttaaaaacagtattctaaaatcaaggagactagatgtatcacttctaggccaaatcatgaaggaaaatgtgtaagagtttcatgtgctcttcatctctgtgatcagaattgaagaaggcatgagtttgagatgctgcatcaccaagatcgtggtgattccattatcattacccttgtaacttgtgagcatccttactgccagcaatcattattagatatcaaatttgagataggagttcatatttactgtatgaatatcttggtctgggagtggtggctcatgcctgtaatcccagtgctttgggaggcagaggaaggaggctcacttgagcccaagagtttgagaccacccaggacaacacagggagaccccatctctacaaaaaatgtaaaaatcagccaagtgtggtggtaggtgcctgcagtcccagcaatttgggaggctgatgtgggaggatcccttgagcctgggatgtcaaggctgcagagagccgagatcatgccactgaacttcagcctgggcaacagagcaagactctctctcaaatacaaaacgctttttcctttaggcttaaattctaaccctcaaacctccaatgtgaaggtattaggaggtggggcccttgggagatgatgaggttgtgaaagtggaaccctcgtaaatgggattagtgcccttctgaaagtggcagaagagagctcgccaacaccttccatgtgaggagacagggaagatatgacagtctccaacctggaagagggtcctcaccagaccctgatcatgctggcaccctcatcttggaattccagcctccagaacagtgataaacaaatgtctgttcttaaaaaaaaaaaactgtggaaagcaatgttaatgttcccaatcacttttggtacattctttccttaactatgtcttaatgcatagttgtgttggatggcctactttgtaatgttagaatatgcatgttagtgaattaacaaatacagcagtaaagaatgctcttcgggttgggaatggtggctcacgcctgtaatcccagcacattggaaggccaaggtaggcagataacctgaagtcgagagttcgagatctgcctgatcaagagaaatccgactctactaaaaatacaaatcagcctgtcacagtgtcgcatgcctttaatcccagctactggggaggctgaggcaggagaatcacttgaacctaggaggcagaggttgtggtgagccaagatcacaccattgcactccagcctgggcaacaaaagccaaactctatctcaaaaaagaaaaaaaaaaaaaaaaagaaatgctgtttgttgaccatttgaatggctagtcttggtgcttcctggtgggtgaggagagccctgccccattcctacccattcaagtagacatggcataagagtgattctcactttctcctatagcctccttatccattggctgaaaagattgttttttaacgtgtcttataaatgcttccatagcaaaaaaaatgaattgacttttatagtgactctttcggggattgttacccataattccgtaatttgtttgaactcctaaaaaagggaagtatgccgagcacaatggagatttcgtctcaaaaataaataaataaataaataaataaataaataaatagaaaagaaagaaaaggaagtaaagggaaatatacaaatatacaaggtgttatgagagagttgctaattgtgattccctcttaattgtccaaagagaccacctctggggatctattcctaaaagactcgttagaagtgcagactcgctctctccctctccctctccctctcccgtctccccacagtctccctctccctctctttccatggtctccctctgatgcccagccgaagctggactgtactgctgccatctcggctcactgcaacctccctgcctgattctcctgcctcagcctgcggagtgcctgggactgcaggagcgcgctgccacgcctgactggttttcgtatttttttggtggaaatggggttttgctgtgttggccgggctggtctccagctcctaaccgcgagtgatccgccagcctcgcctcccgaggtgcccggattgcagacggagtcttgttcactcagtgctcaatggcgcccaggctggagtgcagtggtgtgatctcagcttgctacaacctccacctcccagctgccagccttggcctcccaaagtgccgagattgcagcctctgcctggccgccaccccgtctggaaagtgaggagcgtctctgcctggccgcccatcgtctgggatgtgaggagcccctctgcccggccgtccagtctggaaagtgaggagcgtctctgcccggccgccatcccatctaggaagtgaggagcgtctctgccaggccgcccatcgtctgagatgtggggagcgcctctgccccgccgccccgtctgggatgtgaggagcgcctctgcccggctgccccgtctgagaagtgaggagcccctctgcctggcagccaccccgtctgagaagggaggagcccctccacccggcagccaccccgtctgggaagtgaggagcatctccgcctggcagccgccccgtccgggagggaggtgggggcgtcagccccccgcccggccagccgccccatccgggagggaggtgggggggtcagccccccgcccggccagccgcccnnnnnnnnnnnnnnnnnnnnnnnnnnnnnnnnnnnnnnnnnnnnnnnnnnnnnnnnnnnnnnnnnnnnnnnnnnnnnnnnnnnnnnnnnnnnnnnnnnnnggtgggggggtcagcccccctcccgggccagccgccccgtccgggaggtgaggggcgcctctgcccggccgcccctactgggaagtgaggagcccctctgcccggccagccgccccgtccaggagggaggtgggggggtcagccccacgcccggccagccgccccgtcagggagggaggtggggggtcagcccaccgcccggccagccgtcccgtccgggagggaggtgggggggtcagcccccgcccggccagccaccccatccgggaggtgaggggcgcctctacccggccagccgccccgtctgggaggtgtacccaacagctcattgagaacgggccatgatgacaatggcggttttgtggaatagaaaagggggaaaggtggggaaaagattgagaaaccggatggttgctgtgtctgtgtagaaagaagtagacttgggagacttttcattttgttctgtactaagaaaaattattctgccttgggatcctgttgatctatgaccttacccccaaccctgtgctct

SEQ ID NO: 670 - protein, 544 aa, Homo sapiens
  MOD_RES (402)..(435): Variable amino acid
MLFDLVLVGFNVHNEQKCVIVFYLLDGGLSGQRQRDDCRVAKLVSPGGALSRIFGLPPESQCLGLLEDFILVGLFSHSGSRQLLFSLVAVMFVIGLLGNTVLLFLIRVDSRLHTPMYFLLSQLSLFDIGCPMVTIPKMASDFLRGEGATSYGGGAAQIFFLTLMGVAEGVLLVLMSYDRYVAVCQPLQYPVLMRRQVCLLMMGSSWVVGVLNASIQTSITLHFPYCASRIVDHFFCEVPALLKLSCADTCAYEMALSTSGVLILMLPLSLIATSYGHVLQAVLSMRSEEARHKAVTTCSSHITVVGLFYGAAVFMYMVPCAYHSPQQDNVVSLFYSLVTPTLNPLIYSLRNPEPPRLGSEEHLRLAAAPSGREVGASAPRPASRPIREGGGGVSPPPGQPPXXXXXXXXXXXXXXXXXXXXXXXXXXXXXXXXXXWGGQPPSRASRPVREVRGASARPPLLGSEEPLCPASRPVQEGGGGVSPTPGQPPRQGGRWGVSPPPGQPSRPGGRWGGQPPPGQPPHPGGEGRLYPASRPVWEVYPTAH

SEQ ID NO: 671 - DNA, 1355 bp, Homo sapiens
  source (1)..(1355)
  CDS (201)..(227)
  CDS (265)..(1155)
aacaaacccacagctgtgtttggtacatagtaggcactaaatgaatatctgtttaattcataaataaagagaagtacatgatccacctaaagcatatttttcatttgacttttatataagctaacacatctgactttgtcaatttcttctaggaaatgagctgtgtctttctatccatagctgttaaggttgctgagaccatggtgagtattaaccaaactgctacagtaagtaacagagtttctcttctctggattcccacagtttgaagatggtagcctcctcttcttcattccattgtttgttatctacatattcattgtcattaggaatcttattgtattttttgcagtcagggtggatacccgtctccacaaccccatgtataattttatcagcattttctcatttctggagatctggtacacaactgccacaattcccaagatgctctccatcctcatcagcaggcagaggaccatctccatggttggctgcctcttgcagatgtacttcttccattcactgggaaattcagaggggattttgttgaccaccatggccattgataggtacgttgccatctgtaaccctctccgctacccaaccatcacgacccccgggctctgtgttcagctctctgtggggtcctgcatctttggctttcttgtgttgctcccagagattgcatggatttccacactgcccttctgtggacccaaccaaatccaccagatcttctgtgattttgaacctgtgctgcgcttggcctgtacagacacgtccatgattctgattgaggatgtgatccatgctgtggccattgtattctctgtcctgattattgccctttcttatatcagaatcatcactgtaatcctgaggattccctctgttgaaggccgccagaaggccttttctacctgtgccgcccatcttagtgtctttcagatgttctatggcagtgtatccctcatgtacctgcgtttctctgccactttcccaccgattttggacacagctgttgcactgatgtttgcagttcttgctccctttttcaaccctatcatctatagctttagaaataaggacatgaagattgcaattaaaaagcttttctgccctcagaagatggttaatttatctgtagattaatgctagctcataggcacctttcactgtggatgttactctaacacaataaaccatataattaacatataattcattcattgtcacatggatattttgtgtctctttataccggttcttcccatgtacatgtatatcctgcttacacatgccaaattaagatagcatggactacctgtctagacttatacaggtggataaaa

SEQ ID NO: 672 - protein, 305 aa, Homo sapiens
MVSINQTATFEDGSLLFFIPLFVIYIFIVIRNLIVFFAVRVDTRLHNPMYNFISIFSFLEIWYTTATIPKMLSILISRQRTISMVGCLLQMYFFHSLGNSEGILLTTMAIDRYVAICNPLRYPTITTPGLCVQLSVGSCIFGFLVLLPEIAWISTLPFCGPNQIHQIFCDFEPVLRLACTDTSMILIEDVIHAVAIVFSVLIIALSYIRIITVILRIPSVEGRQKAFSTCAAHLSVFQMFYGSVSLMYLRFSATFPPILDTAVALMFAVLAPFFNPIIYSFRNKDMKIAIKKLFCPQKMVNLSVD

SEQ ID NO: 673 - DNA, 1276 bp, Homo sapiens
  source (1)..(1276)
  CDS (201)..(706)
  CDS (833)..(1076)
gaaagttctgagatgtatctgtgtatcccatatttcagggatcctggggtcttttactgctaacatgaggaacaggcagagaactgcaactacctagttgaaaaacttgaattttgtttcacattttatcgtgttagtgggataatgaatacctaactcaaattttcttcttctctttctacataaaatttccagagaaaatggtaaaaggaaatcattccacggtgactgaatttaatctcgctgggctaacagacaaaccagagctccagctgcctcttttcctcctcttcctgggaatctatgtggtcacagtggtgggcaacctgagcatgatcactctaatagggttcagttctcacctgcacacccccatgtaccatttcctcagcagtctgtccttcattgatctctgccagtcttctgtcattaccccaaaaatgctggtgaattttgtgtcagagaggaatattatctcctacccagcatgcatgactcagctctacttcttccttgttcttgtcatatctgaatgtcacatgttggctgcaatggcttatgaccactacattgccatatgtaacccactgctttaccatgtcgccatgtcttatcaggtctgctcctggatggtagttgaggtgtattttatgggctttattggtgctacatgctcacacagtctgcatgctaagagtgcttttctgtaaggctgatgtaatcaaccattacttctgtgatcttttcccactactggagctctcccgctccagtatttctatcaatgaaatagtagtttgtgcttcagtgcatttaatatccttttccgcagcctcaccatccttagctcttacatcttcatcgttgccagcatcctctgcattcgctccactgagggcaggtccaaaaccttcagcacttgcagctcccacatctcggctgtttctgttttctttgggtctgcagcattcatgtacctgcagccatcatccgtcagctccatggaccaggggaaagtgtcctctgtgttttatgctactgttgtgcccatgctgaacccccaatctacagcctgaggaataaagatgtcaaagttgccttaattaagttccttgaaaaaagaagtttcctgtgaaagttgccttaaataagctccttgaaaaaagaagtttcctatgaaggggggtattttgctttagcaaaaacttttaatttctggaaaaggtttgataaggaaacaatctagagacagtaaggtatgtccacaagtaatgag

SEQ ID NO: 674 - protein, 249 aa, Homo sapiens
MVKGNHSTVTEFNLAGLTDKPELQLPLFLLFLGIYVVTVVGNLSMITLIGFSSHLHTPMYHFLSSLSFIDLCQSSVITPKMLVNFVSERNIISYPACMTQLYFFLVLVISECHMLAAMAYDHYIAICNPLLYHVAMSYQVCSWMVVEVYFMGFIGATCSHSLHAKSAFLLTILSSYIFIVASILCIRSTEGRSKTFSTCSSHISAVSVFFGSAAFMYLQPSSVSSMDQGKVSSVFYATVVPMLNPQSTA

SEQ ID NO: 675 - DNA, 9254 bp, Homo sapiens
  source (1)..(9254)
  CDS (201)..(470)
  CDS (8131)..(9054)
  modified_base (6171): a, t, c, g, unknown or other
agggggtatgcaaggtcatgtgtaaaagtctaaagtgcccaagctgaagatcacctgtactctgctccttggagttcaaacccagacaccacttactaggtgcatgccctggagcaaggcttcctttgtaccgtcagtggtggaatgaagacacccataacggctgcttcacagggttgttgagaagatcaaatgagacaatgtctgcaggaacacgtgatatagctgttattgccatgaagtacagcaagggacaaaggaaaaggactatgtcatttcttgagtccttggcactagaggtgatgcacatccttgggtgggtggagaagtcagggaagctggtcttggtgacaaagagatacaagattccgggccaggcacggtggctcacacctgtaatcccagcactttgggaggcagaggtgggcagatcacgagttcaggagatggagaccatcctggccaacacggtgaaaccccgtctctactaaaaaatacaaaaaattagccaggcgtggtggtgggcgcctatagtcccagctactcgggaggctgaggcaagagaatggcatgaacccgggaggcagagcttgcagtgagccgagatcgcaccactgtgctccagcctgggcgacagagcgagactccgtctcaaaaaaaaaaaaaaaagagagagagagagagatacaaaattctatgtttattgaagtgtcccaatgtcatattaaaaatttttcatagctgatatacagaattacaaattgacaacaaatatttttgtcatttatacacacacatattccctttatgtatgtgcatatatatacatatatgtgtgtgtgtgtgtgtgtgtgtatatatatgtatattttccattttataattgtaaacagatccctgatttctcattttggttcacccagtatcttaatgctgaggccctggccatttcgtttttctaaaaatagatgtgtttttctactttggtattcctcttatttttcatttatgagaaaacaacaagacagtggacctatttttttttccctcctgggtggccagaggtaacaattctttgctcattttctttgttcctgaattgcctgcgtctaaaacagtcggtgcccaactccctgtttcttctccctcttctcctcactccagcttgcaaatcccagggctgccagggctgcactgagctttgtgcccacaggagacaggagagtgtgagacagagcagtcacagttcctaggaggcccctgtggactcacagttgctgcctgctcccaggagctcacattccccaaactgaggatggtcctgggatgtggccaagtccctagtagaagcaactgctcactgggaacaaccatcatgttcctattccagaccctgctggggcacaccatcagcactgaagagggtgggaaacttcgatctttctgaatccctttcagttccaggtctcccactgggagttcctgaatagcgggaggaaagaggtaaagagagcacaccaggcagagtggagcatctccattctggggtcgcgttgttgctctttcctgtgggctgccccagaggacccagatttgggactgtgcctgcagggagtctgagaggaacctctttgccccattcaacccgttgcactggccctgttgtccacagggtctgagctccaggtcctgcatttggacctgggtggcaggatgtgacctggcactggtgagtccccctccccttccttccctttctgtcatgcccctttcattgcacctatcacagtttgttgttttaaacttacttgctgtctttttttgcaattggatggcaaaacccaggactgtttttagcactggattcctagaacaccagcagtatttggtattgtccatgactttctgaatgaatgagtgagtaagtgaacgaatgattcagttgctatttcctcctgttcactgtgctactgctgacatcaggtgcagcattacatttcatcatgacaggactgcatcctctgcattggtcccattttgtcctccccctggggaagaagccaaggatctctgtcccacccacttcttttgtcccttcctgaggctggggctgggaaagctcagcctaggtctagtcctgcggtgtctctttttctatttgagcctccctagacctttctctgcttagtgcatggtgcttttgcatcattcattgcttttaattcttgctgttagctggcctgctagccccagggtgctgttcacctctatgtcctcccctggccacctgccccttgcaaagacctgccaaaagtgaggggtgttcaggtactttccttgctctctcctctttctcattcctcaccctgctctttccctcagtaaagagctcagcatgcccccaggacactgatgatggaaattactgccacaaagaaccagggtgacagtactgctaccccctctgcattcccggtgggtgaaaaacagtcatttttctggagcagaaacattgtttcaagagtcaaaatgcacaaggataattcagttaggaggattgagagagttaatatggagagggagaaagatacaccatcaggagagaacattcaaatcctccaagtctctggaggattattatattatatggggatgtggaagctctccgctagttggcattttaacagagctgtgaactgcaaaacctgcagcatgaaggacttagaaagataaacaggatctcttctcagcaaggatccttaacaggaatgagtgaggggagctgagggcactctggggagtccaggctgcaagtacagttaacgtgggatgctgtccaaagcatatgctaaatagctaaacacagccttgactaggccactgtcaacaggctgtgcttggcctgttttgattgagcactggatggtctactggttggacaagttgagtttgcctgaatctcaggaatgcaggactcctgggcctgagagagatctgttctatagcaaagagaggctgcactgagggaaacatattctatcaaagactctgatgcagaaaaaagtctattcgacattcaagttacactttgcttatgttaacttcacttgtaactaacaatcagttttctaaaataaaaacttggaatgtaaaattattgaacaagcacgaaaagtcctaagacatactccagggacttgccctgagttgcaggcttgctgaattggaaggggtcggggggcgtattgtgactcagagtcttgaagcctcatgaagaagtgactggcatgaattttgtatgaagaaaggagcatcagtcatcaaacctgagaggagaggtgagatcttgaacagggaaaaaacaaactaagtgttaaaagtttaagtgtctggacagaggttgggaagataaatgcaagagggtttgggatgaggggtgaagggcaagggcacaaaaatgggggctgtggtggaggccagtttgaaaaggatgccagcgatgtggtatgaagctaagcctgccgcatgaactggggtactcctgactcaaagtttatcttagaatccccatttgacctctgattccaagacttgagatgttttagattggagagcctcaaaacatgatgtctctgaaacctggtagaaagatgttgctttctgagtggcaggtggcaaatgaaacacaaaataggcccatgggttgaatttctcattctggcttaggaatttatgacacctgaagaatatgaaggacatcaatatgggggctgaaaagggtgaggtcacagtctgggaagtggtaattggaggaacagcagcttcctggatttctggattgtcatggattcccaataagagatggagggctgaggactgaccctgtttggagcaccgctaaccagtcttgcaatagcatttgagactcaagttagatctttctgctgggaaagggacaccctccccatctcctacctatcactgatagtccatagctgatagtgggactttaatgcattcattcatttgccatgcattaaatagtttttttgtagatataagcatttttattcatagatataagcaataagctttgagtcctgtgttcagagattgatatggcactgtgcttgattcaacactgcagatttcacatacttgaagttttgattactacaaacaaatagatattggagttagaaaactctagattcaaatcctaactcaacatttattgacctaactcaacatttattgaccataaggattaagatccttaaacgttccaagcctcagtttttatcatctatgatatgaagttggtaacgatttcacagcatcattgtggcacgggagccagtgcatggtgggccctcagtggatggggtctagccattcccaaccctttatccacaattctataatcaaaatgctttgaatgctgaaagttctttcttaaatgttgagtcaaagcacttagacggcttaacttgttttgaactaaacatgaggccatttctgcctttatttcattgagtgtgaatatttgtgtactttgctacagaaataatagtgtgcttgattccaggatgctgccttgctggtattggtctcattttagctttctgataagaaattgtggggtcgtgattgccccattacattttgttaaagtccacattacacatacacatcatcattaaagaaaatgtgagtttccatttggcaaaactttccttctcaggactagaaatgaaaacccaacatgtgtgctcattggtttaaccaaaattgttattattttgagagagcatcttcctctgtggcccaggctgtagtgcagtgttgtaatcacagtttactgcagcctccacctcctgggcccaagtgatcctcccacttcagcctcccaagtagctcagactacaggcattcggcaccacaccaggctaacttttttattttttgtagtgatagggtctctctatgttgcccagtctgggtctcgaactcctggcctcaggcagtcctcccacatctgcctcccaaagtgctgggattacaggtgtgagacattgcacctggcctgtttaaccaaaatgtaatgagtagttacactgtgtaagacatgttgcttggtattctgaaggttataaagatgaaaaaagagccctgacactgagaaactaggaatccaggatttggaatctgactgtacacaattataatgcaaggcagatcttgttaactttcctgattgggaactccaggcaggatgacttcacatctggatgaggatgaagcttcataaaggaggggacatttgagatagtccctggtgggtgattaagaatttgccaggcaaagatggcagaacaaagtattctaagcacaggaataaaaagggaagtgtgtgaaggcaaagtggaattaacttatggagaatatcaagggttcagttcagtggtatcacaaagtgtgtgacaaggaggtgggggtgaagctatggggggtggtgaatggtgagagtcatgtagggcaggagttgccagggagaatctgtgcttgatttgactgaaaaaggaagagattattgttgttaatttttttatcactaaaataatatatgaagagaattcaaatttaaatgaagagaatttggaaatgaatgtggacatatagaagaacagagggtacaaggtttcagttgggcaggaagaataagttctagcgaactaatgttcagcatggggattacaggtaatgatactgtattgtatacttgacatttgctaagagggtagatcttaggtcatctcactacatgtgaaaaatggtaactatatgaagagatggatatattaattagcttgactgtcgtaataagtttactatgtatatttctatccaaacctcatgatatacatttcatatggtttggctgtgtccccacgcaaatctcatcttgaattgtagttcccataatccccacatgttgtgggagggacccagtgggaggtaattgactcatgggggtggttacctccatgctgttctcgtgatagagagtaagttctcacgagatctgatagttttataaggggctttttcactcctgtgctctgcacttctccttgctgctgccatgtgaagaaggacgtgtttgctccncccttcggccatgatcataggtttcctgaagcctccccagccatgccaaactgtcagtcaattaaacctcttttctttataaattacccagtcttgggtgtgtccttatagcagcgtgagaacagactaatacaacagtttaaatatgtataatttcaatacaagatttttaaaagtaaactcctataacccacacccagatatagccattgttaatattttaaaatgcatccttttactctttttctggatgaagatagatggctagctagtttgattgattttgaaagtaattataaatgaaatctcattgttacaggttatttttatttatttatttatttttgagatagagtgttgctcttgttgcccaggctggagtgcaatggcatgatctcagctcactgcaacctccacctcctagattcaagcgattcttctgcctcagcctcctgggtagctgggattacaggcacacaccaccacactcggctaattttgtatttttagtagagatggggtttctccatgttggccacgatggtctcgaactcccgacctcagatgatccacccgccctcagcctcccaaagtgctgggattacaggcgtgagccaccatgcccggccttgttacagattattaaaaacagttgattgacacaataacttaagaaaataaaatataatagcagcatggtgcctggataggttggtgattgagcaatctaccaataaaaaaaaaattaagagtgttgttgcaatggttaagaggaaacagatccttgaactagggtggtggatatggataaacaaaggagggctagatgcttccagtttccagcccagatgactggggaattgggagccataaacatggcctttgcgggaggggaggactaggtgtgtatctttagatgtgttgaatgtgtggtggtggtcaatctggtggttagagatgtgggccgggactcagaggaggacaaaatccagatttgaaattcatttacattttaaagattgctttggttaaagaaggtgagatttctgaaggagaaaatagagaatttttttaaacaaagataagaaaagaaatgtggggtcatccatgtttagaaaatggcagaaagacagggagctagagaaggagacagacgagggaacccaggatggtaggagaaattcaagagtgcagggtccttgcagtcaagggtggaagtcacttcaaaaacgggttatttgtagcctgaaatgttatagagaagaaaatgttatagagaagaaaagaggatgaagattcagcaaaaaagatggaaggaaataatgtgtaaggtatctagcgcatcttctggcacagggaaagaacagtaaatatcagctattatttgaacaacagaccattacatttggcagttaggaagtgtttaccccttcatcctcagacccagccaaatgtcttgcacagagttggagcttattaagtgtgttgtacaatataatcaatgagtagaagacagaagaggaagagcttaagaatggtgataatgtagaggtggccaagtcataaatctgctcatcccagccagtaatccattcctcgccccagggaaactcctgccttttgggaatgtgtctcctggggtcaactgtgcacacaggctagtgtgcatggggagccaggccagcactatggggacctgattgagagagaggttgatggcaatctcctgctaacagttctcaacctctcacaggtgtcacatagaatgggcatcaagtgcaatgggtaactacagcattgtcagggagtttgtgctcctgggattttcttttttttttttttttttaattgatcattcttgggtgtttctcgtggagggggatttggcagggtcataggacaatagtggagggaaggtcagcagataaacaagtgaacaaaggtctctggttttcctaggcagaggagctccttggattttcttatctccatgagttccaggttctgctgtttgctctgatcctgttgatatatgtgctgatgctgctgggcaacctggccatcatcagcttcatttgccttgattcccgccttcactcacccatgtacttcttcctctgcaacttctccctcatggagatggtggtcacctccactgtggtacataggatgctggcagacctgctatccactcacaagaccatgtccctggccaaatgcctaacccagtctttcttttacttctccctgggctctgccaacttcctgatactcatggtcatggcctttgatcgctacgtggccatctgccaccccctgcgctacccaaccatcacgaatggtccagtgtgtgtgaagctggtggtggcctgttgggtggttggtttcctctccattgtctctcccacactgcagaaaacacgactctggttctgtggccctaacatcatcggccactacttctgtgactctgccccgctgctcaagcttgcctgctctgacacccgccacattgagcgcatggacctcttcctgtccctgctctttgtgctgaccaccatgctgcttatcatcctctcctacatcctcattgtggctgcagtgctgcacatcccttcctcctctggatgccagaaggccttctccacctgtgcctctcacctcacagtggtggttctgggctatggcagtgccatcttcatctacgtgaggccaggcaagggccactccacatacctcaacaaggcggtggccatggtgactgcaatggtaacccctttcctcaaccccttcatcttcaccttccggaatgagaaggtcaaggaggtcattgaggatgtgactaaaaggatcttccttggagacccagcagcctgtaggtgagagggtgagcccttgacagggctagagagcacctgacaagtcacgaggagtagacttgctgcaggtgggcacccacatgcctaagctgagctcctcactctctattttctcattttctcctggtccctcatcttcatgcaagtatcttctcctgcactgcagagaactaatggacacacattggtagaatgtctcaaagg

SEQ ID NO: 676 - protein, 397 aa, Homo sapiens
MSAGTRDIAVIAMKYSKGQRKRTMSFLESLALEVMHILGWVEKSGKLVLVTKRYKIPGQARWLTPVIPALWEAEVGRSRVQEMETILANTAEELLGFSYLHEFQVLLFALILLIYVLMLLGNLAIISFICLDSRLHSPMYFFLCNFSLMEMVVTSTVVHRMLADLLSTHKTMSLAKCLTQSFFYFSLGSANFLILMVMAFDRYVAICHPLRYPTITNGPVCVKLVVACWVVGFLSIVSPTLQKTRLWFCGPNIIGHYFCDSAPLLKLACSDTRHIERMDLFLSLLFVLTTMLLIILSYILIVAAVLHIPSSSGCQKAFSTCASHLTVVVLGYGSAIFIYVRPGKGHSTYLNKAVAMVTAMVTPFLNPFIFTFRNEKVKEVIEDVTKRIFLGDPAACR

SEQ ID NO: 677 - DNA, 2869 bp, Homo sapiens
  source (1)..(2869)
  CDS (201)..(1088)
  CDS (2478)..(2669)
attacactgttacaatttcttgttttcacatccatgttcttcagtggaccatttaaagagcaaagactacacctcaatcacctttatgttccatgtgaccgatatgaaaagagaatcagtaccatgagaaaactgtctggagtaatcttgacttggctgctatgattttacgagttatttctagggagtagcctttgtaaatggccttggggaatcacagcaccatcaccgagttcctcctccttgggctgtctgccgaccccaacatccgggctctgctctttgtgctgttcctggggatttacctcctgaccataatggaaaacctgatgctgctgctcgtgatcagggctgattcttgtctccataagcccatgtatttcttcctgagtcacctctcttttgttgatctctgcttctcttcagtcattgtgcccaagatgctggagaacctcctgtcacagaggaaaaccatttcagtagagggctgcctggctcaggtcttctttgtgtttgtcactgcagggactgaagcctgccttctctcagggatggcctatgaccgccatgctgccatccgccgcccactactttatggacagatcatgggtaaacagctgtatatgcaccttgtgtggggctcatggggactgggctttctggacgcactcatcaatgtcctcctagctgtaaacatggtcttttgtgaagccaaaatcattcaccactacagctatgagatgccatccctcctccctctgtcctgctctgatatctccagaagcctcatcgttttgctctgctccactctcctacatgggctgggaaacttccttttggtcttcttatcctacacccgtataatctctaccatcctaagcatcagctctacctcgggcagaagcaaggccttctccacctgctctgcccacctcactgcagtgacactttactatggctcaggtttgctccgccatctcatgccaaactcaggttcccccatagagttgatcttctctgtgcagtatactgtagtcactcccatgctgaattccctcatctatagcctgaaaaataaggaagtgaaggtagctctgaaaagaactttggaaaaatatttgcaatataccagacgttgagttaaaaaacaaacattgttggccgagcactgtggctcatgcctgcagcaggaggattgcttgagctcaggagttcgagattagcttggccaacatggtgaaaccctgtctccaaaaaaaaaaaaaaataggccgggcatggtggtgtgcacctgtaattccagttacttggaaggctgagggaggaggatcacttgagcgtgggaggtcaaggctgcagtgagctgagattgcaccactgcactccagcctgggcaacagagcaagaccctgtctcaaaaaaaaaagattttggaaaatttaggtcaagctgcatacaacatgacactggataagtttatagtagtaagtattcctggctaccctcagtgtctgatactgcaagctgtaaattagaagtgcatgagagaatggtacaaagttattacaagtaggaaggttaactttaatccctcttagtgacaaagcaaattattaaattattacctcaataaagttttgttatgaacatattgattcatttttctcattctaaaacattcatcttgggctttgcatttagtaaaatcattagcgtcgcaaatctatcatttttaatttactttggtgaacacactaaaagtcatggcatttaataagaacacagtgtcatggatgcgtgggagagaaaagtcactagataagacttgatgggaagaaagagaaagatttccaaccgtgtggccatagaagacataaacacctaagagaacttcagagagggaatcaacatactgaggcagaacttggactcagataaaattcccaagaacttcactgtgtgtgcagcttggtggccagctctccggtgcaaaagattgcaaggaggctctgtggctctagaaacttcattcctcacatggtcttcattcactgtatacgggatttatattttttccaattagctgatcttatcagtgtgtcttttccttgtagagtgcaggctatgtaccctagacaaataatcttgttttgacctcatctcaagtgaatcctgaaactatctttgtctcatctttcattgtttagtgtcaggtggtttgccggttctaagggcactgaaaaactctcacgtaataaacattttttcctataaaacaaatgcttctgatttgtttaagctatattttacaattgcctaacttactgtagttaactgaaaaggtgcaaaaactatctacaaattattgaatttattgaatattaacttgcacttttctcaagcttctttcacaaactctcttcgttctaattgtcagttttaaaagcttttcatgaaaaaaacgtatctgttacaagggggaaagaagcctccgggacagcagtcatttgcctcagctgcacaaaggccaggccagatggaagagaccagccttcaccgaaggccgcagggagcccggacacccggagctgagcattccggtcacgcctcaaccccaaggggcctgcgcatgctccgcgctgcgcgcggcgcccacggccctgccctgatacgcaggagccccgggatagagaaacccagatgaaaacacaagcccagtgagatgttggcctcctcatctgctaccctcgccgtcacctctgcgcaccaagccttctgtcccggagaagaagccgtatttggtctccctcgatgggcgagaccggggccacgcgggcaccgtgatcccgccactgcatcccggggaccc

SEQ ID NO: 678 - protein, 359 aa, Homo sapiens
MALGNHSTITEFLLLGLSADPNIRALLFVLFLGIYLLTIMENLMLLLVIRADSCLHKPMYFFLSHLSFVDLCFSSVIVPKMLENLLSQRKTISVEGCLAQVFFVFVTAGTEACLLSGMAYDRHAAIRRPLLYGQIMGKQLYMHLVWGSWGLGFLDALINVLLAVNMVFCEAKIIHHYSYEMPSLLPLSCSDISRSLIVLLCSTLLHGLGNFLLVFLSYTRIISTILSISSTSGRSKAFSTCSAHLTAVTLYYGSGLLRHLMPNSGSPIELIFSVQYTVVTPMLNSLIYSLKNKEVKGERSLRDSSHLPQLHKGQARWKRPAFTEGRREPGHPELSIPVTPQPQGACACSALRAAPTALP

SEQ ID NO: 679 - DNA, 1299 bp, Homo sapiens
  source (1)..(1299)
  CDS (201)..(314)
  CDS (389)..(1099)
atcggtcctcgacgtgaaaggatggccaaaacagggactttgtccttcagaacctctcagaatttggtttagtgtcagaaaccaaatgtccttttctccaagacctttgcattccctcctaaccacctagattgaagaagtgaggttcaatgtcccaactgggaagggacaacataacctgggtgagtgagttcatcctaatgggtctctccagtgacaggcagacccaggctggactctttatcttatttggggctgcctacctgctgaccctgctgggcaatgggctcatcctgctcctgatctggctggacgtgagactccacctgcccatgtatttcttcctctgcaacctctcacttgtggacatctgctacacctccagcagggtccctcagatgctggtgcactgcaccagcaaagaaagaccatctcctttgcccgatgtgggacccagctctttttctccctggccctcggagggaccgagtttttgttgctggccgcaatggcctatgaccgctacgtggctgtttgcgaccccctgtgttacatagcagtgatgagcccaaggctctgcatggcactggcagctgtctcttggctagtgggcctggctaattctgctatggagacggcactgaccatgcacctgcccacctgtgggcacaacgtgctgaaccatgtggcctgtgagacactggcactggtcaggtcggcctgcgtggacatcaccttcaatcaggtggtcatagtggcctccagtgtggtggtgctgctggtgccctgctgcctggtctcgctgtcctacaccctcattgtagttgccgtcctgcagatccactccacccaggggcaccgcaaggcctttgggacctgtgcctcccacctcactgtggtctccatatcctatgggatggccctctttacctacatgcagcctcgctccatggcctcagctgagcaggaaaaggtgatggtactctcttatgctgtggtgacccccatgttgaatcctttcatctacagtctgcggaacaaggatgtgaaggcagctctgagtcgagctctgatgaggagctctgaattaaaacattagagagtggtttgagtaacaagaaggcctcactctgaaaacagtgggcattggactgtgctctccagtataacgtgtgtacgcatgtgtgtgtatgtgtgtgcatctgtgtgtgtgtgcatgtgtatgtgtgtgtgtaagggaacaggtgggaggaccacaatttgtactactctcttttgaggtaatagaaaaatggattt

SEQ ID NO: 680 - protein, 274 aa, Homo sapiens
MGLSSDRQTQAGLFILFGAAYLLTLLGNGLILLLIWLDGPSDAGALHQQRKTISFARCGTQLFFSLALGGTEFLLLAAMAYDRYVAVCDPLCYIAVMSPRLCMALAAVSWLVGLANSAMETALTMHLPTCGHNVLNHVACETLALVRSACVDITFNQVVIVASSVVVLLVPCCLVSLSYTLIVVAVLQIHSTQGHRKAFGTCASHLTVVSISYGMALFTYMQPRSMASAEQEKVMVLSYAVVTPMLNPFIYSLRNKDVKAALSRALMRSSELKH

SEQ ID NO: 681 - DNA, 898 bp, Homo sapiens
  source (1)..(898)
  CDS (201)..(698)
aattaagttgcacagagattttccacgttctgtttttgtgccttatgactttgttgcctatctaaacagattataaaatttagtctaaaatatttttaatgctaagaaaatagctgattttgcttatcttcttgtcatcttacaaattgaggacaccttgtaaacatttgttggtgttaatgttgcagagagttggggaaatggatggaggcaaccagagtgaaggttcagagttccttctcctggggatctcagagagtcctgagcagcagcagatgctgttttggatgttcctggtcaggtacctggtcacggtgctgggaaatgtgctcatcatcctggccatcagctctgattcccgcctgcacacccccatgtacttcttcctggccaacctctccttcactgacctcttctttgtcaccaacacaatccccaagatgctggtgaacctccagtcccagaacaaagccatctcctacacagggtgtctgacacagctctacttcctggtctccttggtggccctggacaacctcaacctggccgtgatggcgtatgatcgctatgtggccatctgccgtcccctccactatgtcacagccatgatccctgggctctgtatcttgctcctctccttgtgttgggtgttctctgccctctatggcctcatccatatcctcctcatgaccaggtgaccttctgtgggtctcaaaagatccactacctcttctgtgagatgtacttcctgctaaggctggcatgttccaacatccacgtcaaccacacagtactggttgccacgggctgcttcatcttcctcatccccttaggtttcatgatcacatcctacgcccgcattgtcagagccatcctccaaataccctcagccactggg

SEQ ID NO: 682 - protein, 165 aa, Homo sapiens [sequence omitted]

SEQ ID NO: 683 - DNA, 1393 bp, Homo sapiens
  source (1)..(1393)
  CDS (201)..(674)
  CDS (756)..(1193)
aaaacaaacgagaaatgtattttaattaccttatgttgtatctcgcacactttctagcatagtgtatttcagtaaaaatttacagtgcaacatagtagatggccaataaaagtactttctttctttcttcttcttcttccttaaagctcagagaatagcatgctcaccaatctaaagtaaaacatttttatagaattctaatggggctcactcaagatttttttcctccgacctctgagctcctggaaggagggaatcagactagcacctttgagttcctcctctggggactctcagaccagccacagcagcaacacatcttcttcctgctgtttctgtggatgtacgtggtcactgtggctgggaacctgctcattgtcctggccattggcactgacacacacctccacacccctatgtacttcttccttgccagcttgtcgtgtgcagatatcttttccacctccaccactgtgcccaaggccctggtgaatatccagacccagagcaggtccatttcctacgcagggtgtttggcacagctctacttcttcttgacttttggggacatggacatctttctcccggctacaatggcctatgaccgctatgtggccatttgccacctgctccactatatgatgatcatgagcctccaccgctgtgccttcctggtgacagcctgctggaccctcacaagtcttctcgccatgactcgcaccttcctcatattccggctttccttgtgctcttagatccttcctggcttcttctgtgatttgggaccgctgatgaaggtgtcttgctctgacgcccaggtcaatgagcttgtgctcctcttcctagggggagcagtcattttaatcccttttatgctcatcctggtctcttatatccgcattgtttcagccatcctcagggccccctctgcccagggaaggcgcaaggccttctctacctgcgactctcacctcgttgttgttgctttgttctttgggacagtgatcagggcttatctgtgcccctcatcctcttcctccaactcagtaaaggaggatacagcggctgctgtcatgtacacagtggtgactcccctgctgaacccctttatttacagcatgcggaacaaggacatgaaggcggcggtggttagacttctcaagggcagggtctccttctcacagggccagtgacttctgctgagaaacccaaggtgttctccatcccctccagtgaggggcttgacagaaatttctacctcaagtgtgtaatttcggaatcccacatatcccttctcagcactcccctccctgaatgcgcactgcaagtttgaaggaaaatcaagattttgcttcgtgcttcatctgtgaagagcgccttatttgctcattta

SEQ ID NO: 684 - protein, 303 aa, Homo sapiens
MGLTQDFFPPTSELLEGGNQTSTFEFLLWGLSDQPQQQHIFFLLFLWMYVVTVAGNLLIVLAIGTDTHLHTPMYFFLASLSCADIFSTSTTVPKALVNIQTQSRSISYAGCLAQLYFFLTFGDMDIFLPATMAYDRYVAICHLLHYMMIMSLHRCAFLILPGFFCDLGPLMKVSCSDAQVNELVLLFLGGAVILIPFMLILVSYIRIVSAILRAPSAQGRRKAFSTCDSHLVVVALFFGTVIRAYLCPSSSSSNSVKEDTAAAVMYTVVTPLLNPFIYSMRNKDMKAAVVRLLKGRVSFSQGQ

SEQ ID NO: 685 - DNA, 1371 bp, Homo sapiens
  source (1)..(1371)
  CDS (201)..(616)
  CDS (709)..(1171)
agagattaattttctgtccaatatcatacagatcattaatactgaaacccaggatttcaaatgatcctgaagtaggtgatcttttcttgatctcacgctgcttctgacatactattcctggtgggctcttcctacatatcaggtcgttaaataagctgccagatttctgcctttacagcccaaggagcttgtcatggaccatgggcatggagggtcttctccagaactccactaacttcgtcctcacaggcctcatcacccatcctgccttccccgggcttctctttgcagtagtcttctccatctttgtggtggctataacagccaacttggtcatgattctgctcatccacatggactcccgcctccacacacccatgtacttcttgctcagccagctctccatcatggataccatctacatctgtatcactgtccccaagatgctccaggacctcctgtccaaggacaagaccatttccttcctgggctgtgcagttcaaatcttctacctgaccctgattggaggggaattcttcctgctgggtctcatggcctatgaccgctatgtggctgtgtgcaaccctctacggtaccctctcctcatgaaccgcaggtttgcttattcatggtggtcggctcctgggttggtggttccttggatgggttcatgctgactcctgtcactatgagtttccccttctgtagatcccgagagatcaatcactttttctgtgagatcccagccgtgctgaagttgtcttgcacagacacgtcactctatgagaccctgatgtatgcctgctgcgtgctgatgctgcttatccctctatctgtcatctctgtgtcctacacgcacatcctcctgactgtccacaggatgaactctgctgagggccggcgcaaagcctttgctacgtgttcctcccacattatggtggtgagcgttttctacggggcagccttctacaccaacgtgctgccccactcctaccacactccagagaaagataaagtggtgtctgccttctacaccatcctcacccccatgctcaacccactcatctacagcttgaggaataaagatgtggctgcagctctgaggaaagtactagggagatgtggttcctcccagagcatcagggtggcgactgtgatcaggaagggctagcagggactcccagagtatcagagtggtgactgtgatcgggaaggattagcggggactcccagagcatcaggggtggtgactgatcaggaaggactagcagggactagtgcaaacatctgcggtgctgcggccaataacgcagctattacagaaaatatggtattggttctgaagaatgttcagtgtcactttcagcaatt

SEQ ID NO: 686 - protein, 292 aa, Homo sapiens
MGMEGLLQNSTNFVLTGLITHPAFPGLLFAVVFSIFVVAITANLVMILLIHMDSRLHTPMYFLLSQLSIMDTIYICITVPKMLQDLLSKDKTISFLGCAVQIFYLTLIGGEFFLLGLMAYDRYVAVCNPLRYPLLMNRRSREINHFFCEIPAVLKLSCTDTSLYETLMYACCVLMLLIPLSVISVSYTHILLTVHRMNSAEGRRKAFATCSSHIMVVSVFYGAAFYTNVLPHSYHTPEKDKVVSAFYTILTPMLNPLIYSLRNKDVAAALRKVLGRCGSSQSIRVATVIRKG

SEQ ID NO: 687 - DNA, 1357 bp, Homo sapiens
  source (1)..(1357)
  CDS (201)..(1157)
tcgtagttcactttagcttgtggccaacatgcgacttgacctaagatttgaacttatgattttatgtcagtttaactcaatatttagaaaaataattcaaagcacatgtcttaccagaaaaaggttaggaaagccatgtacataggaaagatttaaaattaatgacttttttttcctcagggggaaactgtgagccagtcatgtgctcagggaatcagacttctcagaatcaaacagcaagcactgatttcaccctcacgggactctttgctgagagcaagcatgctgccctcctctacaccgtgaccttccttcttttcttgatggccctcactgggaatgccctcctcatcctcctcatccactcagagccccgcctccacacccccatgtacttcttcatcagccagctcgcgctcatggatctcatgtacctatgcgtgactgtgcccaagatgcttgtgggccaggtcactggagatgataccatttccccgtcaggctgtgggatccagatgttcttccacctgaccctggctggagctgaggttttcctcctggctgccatggcctatgaccgatatgctgctgtttgcagacctctccattacccactgctgatgaaccagagggtgtgccagctcctggtgtcagcctgctgggttttgggaatggttgatggtttgttgctcacccccattaccatgagcttccccttttgccagtctaggaaaatcctgagttttttctgtgagactcctgccctgctgaagctctcctgctctgacgtctccctctataagatgctcacgtacctgtgctgcatcctcatgcttctcacccccatcatggtcatctccagctcatacaccctcatcctgcatctcatccacaggatgaattctgccgccggccgcaggaaggccttggccacctgctcctcccacatgatcatagtgctgctgctcttcggtgcttccttctacacctacatgctccggagttcctaccacacagctgagcaggacatgatggtgtctgccttttacaccatcttcactcctgtgctgaaccccctcatttacagtctccgcaacaaagatgtcaccagggctctgaggagcatgatgcagtcaagaatgaaccaagaaaagtagtggacaagcattgtcccctcctctttctataattccgttactccctatctctcctctcttttgccctcaggtctccgggtccccagcacaaagcccactcatattttccttctttcttatacgtggcgttttccctccatactgcttattgctcccatttatctcattagatttaatatctttagagtgtttttaactgc

SEQ ID NO: 688 - protein, 318 aa, Homo sapiens
MCSGNQTSQNQTASTDFTLTGLFAESKHAALLYTVTFLLFLMALTGNALLILLIHSEPRLHTPMYFFISQLALMDLMYLCVTVPKMLVGQVTGDDTISPSGCGIQMFFHLTLAGAEVFLLAAMAYDRYAAVCRPLHYPLLMNQRVCQLLVSACWVLGMVDGLLLTPITMSFPFCQSRKILSFFCETPALLKLSCSDVSLYKMLTYLCCILMLLTPIMVISSSYTLILHLIHRMNSAAGRRKALATCSSHMIIVLLLFGASFYTYMLRSSYHTAEQDMMVSAFYTIFTPVLNPLIYSLRNKDVTRALRSMMQSRMNQEK

SEQ ID NO: 689 - DNA, 7084 bp, Homo sapiens
  source (1)..(7084)
  CDS (201)..(587)
  CDS (728)..(1262)
  CDS (1338)..(1581)
  CDS (1668)..(1901)
  CDS (2003)..(2633)
  CDS (2681)..(3034)
  CDS (3091)..(3168)
  CDS (3283)..(3491)
  CDS (3538)..(3740)
  CDS (3867)..(4821)
  CDS (5735)..(6040)
  CDS (6142)..(6330)
  CDS (6476)..(6884)
tgctgttttcgtgtatgtgccatgcacgtatgtgctgcgtgttggccgtgcacgtgtgccacgtgcatgtgtgccatttgtgtatgccgtgtgtgctgtgagcgtatgctgtgcgcatgtgcgtgccatgtgctttgcgtgtaccatgtgtgtgctgtttgcatgtgccatttgtgtcatgcacgtgccatttgcgtgcgatgcgcgtgtgccacacgtcgtttgcttgcgtgccatgcatgtgtggcatttgtgtatgtgccgtttccgtgtgtattgtgtgtgccgtgtgtgtgccatttgcatgtgccgttttgtgtgtgccatgcgcgtgtgccatgcacttgccgtgcgtgtgccatttgtgtgtaccatgcgcatgtgccattcgtgtgcaccgtacacgtgtgccatttgcatgtatgctgtgcacgtgtggcatgcatgtgtgccgtttgcatgccatgcatgtgttccttgcgtgtgccgtgcgtgtcccatgcacgtgtgccgtgcatgtgccattcgcgtgtaccatgcgcatgtgccgtttgtgtgtgtgccgcattcctgtgctcgtgtgccaggttcgcatgtgcgccatattcacgtgtgctcagcatgtgccatatgcatgtgcggtggtagtgtgtgtccctcacaggtcctcctcacaacaccatggggaagaagcaccagccagggcacacctcctggtatctgctaggtctgccaggccctagctgaagctgagtgccccccagttcccctgggagggcctgcgcctggagtctgctgtgtccccgagggcacccccaaagcaacacagaggcagaggagtcccggccctgcacacctggtgctgctccagctgccgctcatttgcctgtggcccttcctcccttgtttgcgtgcccccctggcaaacaaactctacccccagcaggagccacctgtgtgcctgccacgcaggagtggcccagacgggggtcagcagtgtgagtacagctggccatgcggttcctacagcttccaggcgtcagactctggcagaagggctgagaccctcaaggaactctgctcccaagcagactgggagggcagcaccaccaccccagggccctccccagctgcagggtggaggcctggctggccggctgcccactggcctgactggtctgcaggcctagggggcccatccctgctgcccccggctccggccagcacagccttgagtgggagccagaagctcccggggctgggtaggaggcatttctgtgctttgtgcttatgaaaagccccagggctggcgatgtctctgcatccctcccacgcagctgagacctcagagccctggaggccctttgccccctctcctctccacagcctgctgggcaactccaggaatcggggggtggcaaggggctcagccacaggcagggaacaaggccacggccagcgactgagcagagcctgcctgccggtcaacgctggccatagagcctggcagtggcctcaggcagagtctgacgcgcacaaactttcaggcccaggaagcgaggacaccactggggccccagggtgtggcaagtgaggatggcaagggttttgctaaacaaatcctctgcccgctccccgccccgggctcactccatgtgaggccccagtcggggcagccacctgccgtgcctgttggaagttgcctctgccatgctgggccctgctgtcctgggcctcagcctctgggctctcctgcaccctgggacgggggccccattgtgcctgtcacagcaacttaggatgaagggggactacgtgctgggggggctgttccccctgggcgaggccgaggaggctggcctccgcagccggacacggcccagcagccctgtgtgcaccaggtacagaggtgggacggcctgggtcggggtcagggtgaccaggtctggggtgctcctgagctggggccgaggtggccatctgcggttctgtgtggccccaggttctcctcaaacggcctgctctgggcactggccatgaaaatggccgtggaggagatcaacaacaagtcggatctgctgcccgggctgcgcctgggctacgacctctttgatacgtgctcggagcctgtggtggccatgaagcccagcctcatgttcctggccaaggcaggcagccgcgacatcgccgcctactgcaactacacgcagtaccagccccgtgtgctggctgtcatcgggccccactcgtcagagctcgccatggtcaccggcaagttcttcagcttcttcctcatgccccaggtggcgccccccaccatcacccacccccacccagccctgcccgtgggagcccctgtgtcaggagatgcctcttggcccttgcaggtcagctacggtgctagcatggagctgctgagcgcccgggagaccttcccctccttcttccgcaccgtgcccagcgaccgtgtgcagctgacggccgccgcggagctgctgcaggagttcggctggaactgggtggccgccctgggcagcgacgacgagtacggccggcagggcctgagcatcttctcggccctggctcggcacgcggcatctgcatcgcgcacgagggcctggtgccgctgccccgtgccgatgactcgcggctggggaaggtgcaggacgtcctgcaccaggtgaaccagagcagcgtgcaggtggtgctgctgttcgcctccgtgcacgccgcccacgccctcttcaactacagcatcagcagcaggctctcgcccaaggtgtgggtggccagcgaggcctggctgacctctgacctggtcatggggctgcccggcatggcccagatgggcacggtgcttggcttcctccagaggggtgcccagctgcacgagttcccccagtacgtgaagacgcacctggccctggccaccgacccggccttctgctctgccctgggcgagagggagcagggtctggaggaggacgtggtgggccagcgctgcccgcagtgtgactgcatcacgctgcagaacgtgagcgcagggctaaatcaccaccagacgttctctgtctacgcagctgtgtatagcgtgcccaggccctgcacaacactcttcagtgcaacgcctcaggctgccccgcgcaggaccccgtgaagccctggcaggtgagcccgggagatgggggtgtgctgtcctctgcatgtgcccaggccaccaggcacggccaccacgcctgagctggaggtggctggcggctcagccccgtcccccgcccgcagctcctggagaacatgtacaacctgaccttccacgtgggcgggctgccgctgcggttcgacagcagcggaaacgtggacatggagtacgacctgaagctgtgggtgtggcagggctcagtgcccaggctccacgacgtgggcaggttcaacggcagcctcaggacagagcgcctgaagatccgctggcacacgtctgacaaccaggtgaggtgagggtgggtgtgccaggcgtgcccgtggtagcccccgcggcagggcgcagcctgggggtgggggccgttccagtctcccgtggcatgcccagccgagcagagccagaccccaggcctgtgcgcagaagcccgtgtcccggtgctcgcggcagtgccaggagggccaggtgcgccgggtcaaggggttccactcctgctgctacgactgtgtggactgcgaggcgggcagctaccggcaaaacccaggtgagccgccttcccggcaggcgggggtgggaacgcagcaggggagggtcctgccaagtcctgactctgagaccagagcccacaggggacaagacgaacacccagcgcccttctcctctctcacagacgacatcgcctgcaccttttgtggccaggatgagtggtccccggagcgaagcacacgctgcttccgccgcaggtctcggttcctggcatggggcgagccggctgtgctgctgctgctcctgctgctgagcctggcgctgggccttgtgctggctgctttggggctgttcgttcaccatcgggacagcccactggttcaggcctcgggggggcccctggcctgctttggcctggtgtgcctgggcctggtctgcctcagcgtcctcctgttccctggccagcccagccctgcccgatgcctggcccagcagcccttgtcccacctcccgctcacgggctgcctgagcacactcttcctgcaggcggccgagatcttcgtggagtcagaactgcctctgagctgggcagaccggctgagtggctgcctgcgggggccctgggcctggctggtggtgctgctggccatgctggtggaggtcgcactgtgcacctggtacctggtggccttcccgccggaggtggtgacggactggcacatgctgcccacggaggcgctggtgcactgccgcacacgctcctgggtcagcttcggcctagcgcacgccaccaatgccacgctggcctttctctgcttcctgggcactttcctggtgcggagccagccgggccgctacaaccgtgcccgtggcctcacctttgccatgctggcctacttcatcacctgggtctcctttgtgcccctcctggccaatgtgcaggtggtcctcaggcccgccgtgcagatgggcgccctcctgctctgtgtcctgggcatcctggctgccttccacctgcccaggtgttacctgctcatgcggcagccagggctcaacacccccgagttcttcctgggagggggccctggggatgcccaaggccagaatgacgggaacacaggaaatcaggggaaacatgagtgacccaaccctgtgatctcagccccggtgaacccagatttagctgcgatcccccccaagccagcaatgacccgtgtcttgctacagagaccctcccgctctaggttctgaccccaggttgtctcctgaccctgaccccacagtgagccctaggcctggagcacgtggacacccctgtgaccatctgggccccagagccaagctgtgtccctgtccctctgtgcccagaccaggcctgcccaggtaacccagacccactgttctggaaagaggcccggaggctcccagggtacccgcaacccacaccgtgagctcaggaaaaggacgcagggaggccccggccagatggctggaagcccaaatcaggccctgccgacctgaccatgtcccaccagggcccccatcctgcaccctgccaggcaccacagcagtgggaggccaggtgggggcacacaggcatatgcccagggcagagcccgccgaggtgggggtggcacccagcttcctactctgccccttgcccagtgggtagacagcatcatgactgtcaccagtaccagggacagagcccaggtggggtgggggcggggtccagcaccacggccagcaccgaccaccaggaccccggagccagcaccatggacagaaaactgcccaccaggatctgacgccagcacgccgccaggcccacacagggtctccggtcagagtcccagggtcagctcccagcagggcctaggggaggctggaccagctccctgtgcctcattccaaggcagcccagccggagagaaggggcacaggccacacatctgtcccataaaattaaacgctttttagtgtttaaaataagcagcatttacacagaagcagctctatgttaaccatctaaacgctgggactttgatacagtatctacagcacagacacgtgggggccagagaagccaggaaggccgcgatgtgtgcgcgcagtgtgtgcactcaccaaggacgggccacctgactgcccatctccccaagacctccctccctgtggcagctgtgcacatcggggccccttgaccctgcgggccatggtccctccctgccctggctgggacacggtgggcaggatgtccagccctctctcgtcttccggtcccgtcctccacgtactttcagactgttgccggatgggaggagagaaggtgcaggctgctccaaggggcagcagcaggtgggacagatgacagggtcgcctcctcccccgagtcaccggccaggcaataaataaataaattagatccctactccagacagggggcctgtgcaccgcagggggttgccccgcgtggaccaccctgggggcctgggcacagctgtgcaggaggtgggggtcagccgagagcccgagggggtcttcctcatcccaggagggatccccaccagacacaaggggttgggaggtccgaggctctcgctgaggggcagagagggagcgcccccaacacggctgctcagacacaggtgctgtcaggagctggagcagccaggctgcagggcagatggtggtggtccagcctgccccccaccctgcctcccgtcctggcccccacgaaggcaagcccacgcgagctctgcatgcggcaggaccgccagctccccacctcaggcagggctggggcatgcgccacgagtcacatgatgtccacgaagaactcgcaggggttccccatagccttctggaaggactggcggctgcctgtcaattccggggggacggcagccagctcccggacagggggtcccccgggtggcccccccaccactgtataggccttggtcgtggggtggggcggggggagccccggggcggtagccgaggcctgactgcgtgggctgctgccacggctgagctggccggccggacgctctcgccagctgctccccaccccactcggtgccgtgtgatccgattcactgccactgcccccagctcccgccgcccgacgctccttctcacggcccggggcccggcggctgctccgggtggacccactgcttttgctccctgggagtgagaacaggatggggaaggagcctgtcagcaccaggcccggccacgtccagaacaaccgcccccgccaggtgaccgggcaggaacggtggcccgtgcaggacgggtgggtggggcagccatgcaggcgcgaggacagggccggcacccccagggtcgcaggggcagctgcggcaggcatgggctggtgggggcagtgggagg

SEQ ID NO: 690 - protein, 1577 aa, Homo sapiens
MRVCHTSFACVPCMCGICVCAVSVCIVCAVCVPFACAVLCVPCACAMHLPCVCHLCVPCACAIRVHRTRVPFACMLCTCGMHVCRLHAMHVFLACAVRVPCTCAVHVPFACTMRMCRLCVCRIPVLVCQVCQALAEAECPPVPLGGPAPGVCCVPEGTPKATQRQRSPGPAHLVLLQLPLICLWPFLPCLRAPLANKLYPQQEPPVCLPRRSGPDGGQQCEYSWPCGSYSFQASDSGRRAETLKELCSQADWEGSTTTPGPSPAAGWRPGWPAAHWPDWSAGLGGPSLLPPAPASTALSGSQKLPGLAETSEPWRPFAPSPLHSLLGNSRNRGVARGSATGREQGHGQRLSRACLPVNAGHRAWQWPQAESDAHKLSGPGSEDTTGAPGRGSHLPCLLEVASAMLGPAVLGLSLWALLHPGTGAPLCLSQQLRMKGDYVLGGLFPLGEAEEAGLRSRTRPSSPVCTRFSSNGLLWALAMKMAVEEINNKSDLLPGLRLGYDLFDTCSEPVVAMKPSLMFLAKAGSRDIAAYCNYTQYQPRVLAVIGPHSSELAMVTGKFFSFFLMPQVAPPTITHPHPALPVGAPVSGDASWPLQVSYGASMELLSARETFPSFFRTVPSDRVQLTAAAELLQEFGWNWVAALGSDDEYGRQGLSIFSALARHAASASRTRAWCRCPVNQSSVQVVLLFASVHAAHALFNYSISSRLSPKVWVASEAWLTSDLVMGLPGMAQMGTVLGFLQRGAQLHEFPQYVKTHLALATDPAFCSALGEREQGLEEDVVGQRCPQCDCITLQNRAQALHNTLQCNASGCPAQDPVKPWQLLENMYNLTFHVGGLPLRFDSSGNVDMEYDLKLWVWQGSVPRLHDVGRFNGSLRTERLKIRWHTSDNQVRAQPGGGGRSSLPWHAQPSRARPQACAQKPVSRCSRQCQEGQVRRVKGFHSCCYDCVDCEAGSYRQNPDDIACTFCGQDEWSPERSTRCFRRRSRFLAWGEPAVLLLLLLLSLALGLVLAALGLFVHHRDSPLVQASGGPLACFGLVCLGLVCLSVLLFPGQPSPARCLAQQPLSHLPLTGCLSTLFLQAAEIFVESELPLSWADRLSGCLRGPWAWLVVLLAMLVEVALCTWYLVAFPPEVVTDWHMLPTEALVHCRTRSWVSFGLAHATNATLAFLCFLGTFLVRSQPGRYNRARGLTFAMLAYFITWVSFVPLLANVQVVLRPAVQMGALLLCVLGILAAFHLPRCYLLMRQPGLNTPEFFLGGGPGDAQGQNDGNTGNQGKHDIYSTDTWGPEKPGRPRCVRAVCALTKDGPPDCPSPQDLPPCGSCAHRGPLTLRAMVPPCPGWDTVGRMSSPLSSSGPVLHVLSDCCRMGGEKVQAAPRGSSRGLPRVDHPGGLGTAVQEVGVSREPEGVFLIPGGIPTRHKGLGGPRLSLRGREGAPPTRLLRHRQGWGMRHESHDVHEELAGVPHSLLEGLAAACQFRGDGSQLPDRGSPGWPPHHCIGLGRGVGRGEPRGGSRGLTAWAAATAELAGRTLSPAAPHPTRCRVIRFTATAPSSRRPTLLLTARGPAAAPGGPTAFAPWE

SEQ ID NO: 691 - DNA, 1327 bp, Homo sapiens
  source (1)..(1327)
  CDS (201)..(1127)
agatgattttggcatggaggtaaagcttaagagatatttctaactggtttcttcaggattccagaatcagcttgagtaactcattacagaaaggaatgaagcaatattcagtgggtaatcaacattccaattataggagtctcttgtttccttttctgtgttcacagatgacacagttgacggccagtgggaatcagacaatggtgactgagttcctcttctctatgttcccgcatgcgcacagaggtggcctcttattctttattcccttgcttctcatctacggatttatcctaactggaaacctaataatgttcattgtcatccaggtgggcatggccctgcacacccctttgtatttctttatcagtgtcctctccttcctggagatctgctataccacaaccaccatccccaagatgctgtcctgcctaatcagtgagcagaagagcatttccgtggctggctgcctcctgcagatgtactttttccactcacttggtatcacagaaagctgtgtcctgacagcaatggccattgacaggtacatagctatctgcaatccactccgttacccaaccatcatgattcccaaactttgtatccagctgacagttggatcctgcttttgtggcttcctccttgtgcttcctgagattgcatggatttccaccttgcctttctgtggctccaaccagatccaccagatattctgtgatttcacacctgtgctgagcttggcctgcacagatacattcctagtggtcattgtggatgccatccatgcagcggaaattgtagcctccttcctggtcattgctctatcctacatccggattattatagtgattctgggaatgcactcagctgaaggtcatcacaaggccttttccacctgtgctgctcaccttgctgtgttcttgctattttttggcagtgtggctgtcatgtatttgagattctcagccacctactcagtgttttgggacacagcaattgctgtcacttttgttatccttgctccctttttcaaccccatcatctatagcctgaaaaacaaggacatgaaagaggctattggaaggcttttccactatcagaagagggctggttgggctgggaaatagatacagatcctggagactctaaaaagcctcttggaagagcaaaatttcactgttatttatcttttccatgtctatcctctttctgtattgctgcaactacttgttctattatttttaaaaagaatgataaactgctgtatacaggctgtggatggtaagtggatggccagtttacatcaatgcctctaccatgcttgtta

SEQ ID NO: 692 - protein, 308 aa, Homo sapiens
MVTEFLFSMFPHAHRGGLLFFIPLLLIYGFILTGNLIMFIVIQVGMALHTPLYFFISVLSFLEICYTTTTIPKMLSCLISEQKSISVAGCLLQMYFFHSLGITESCVLTAMAIDRYIAICNPLRYPTIMIPKLCIQLTVGSCFCGFLLVLPEIAWISTLPFCGSNQIHQIFCDFTPVLSLACTDTFLVVIVDAIHAAEIVASFLVIALSYIRIIIVILGMHSAEGHHKAFSTCAAHLAVFLLFFGSVAVMYLRFSATYSVFWDTAIAVTFVILAPFFNPIIYSLKNKDMKEAIGRLFHYQKRAGWAGK

SEQ ID NO: 693 - DNA, 2700 bp, Homo sapiens
  source (1)..(2700)
  CDS (201)..(248)
  CDS (1342)..(1796)
  CDS (1889)..(2320)
  CDS (2368)..(2500)
ccaggagaggaacaggggccacagggagctgatcatgaaacacactgagggtgtttcatcagggaagtgacaggagcatagtcacattcaggaaagatcactgcctctgggaagacagagggtcagggcagagcctggaggccaggagagtgccaccttcaaacagggtggaggaggcacaattctggacagggatgtccatggccagaggagtgatccagctcctagaagatgaggagagaccgaaggtgaggatggctcttcagtttcaggtttaggcacctggacagatggtcttgccttctccagcggcagaaagcactgaaggggaaagaggttgggggaagggactgtgtaggctgagcagcctaagtctgagaagctgggccacttgcaggtgttggtccagggtgcaagtgcatttggtgaagggggagactaggaagggaggagaaagtctagtctgttactagacctcaccatgctgcaggtgtctgggccagcaggtcgcagccggagctgtgcagctggctgctgtcacatccctttctctcccagctgccttcagctgagcttaacgccagcagaggccgaaacacttcacaaatgcaacttgtcagctgggaggtgcactcagagctcaggaacactgttttccctctttattgttttccatcatttttttttttcagtctgggttttgggccccgtcagttccttttctgttcaacactgagctatgtatccacccctctcaaggttgaaaaagagaaagactgtaaaagtgccctgcaaagaagaggcttccaactctctgggggtgggggggggtggggggctctcttcctcctcttgtcttctgggttcattccaaattattccccaaaggaaaaatcactgaaggactgggggcggtggtggggaaaaggacagtctcccaagaggtcaggtgaagccccagcctcatggtgttgagggaggggctgggggaagcgggagcctgttcctaggagacactgtctactggacacctcatcctagaaggcttccctgagttctgacactgttctaggagtaggaatcattatcccacgctgtggagaaggaaaccaaggccgggtaaagtaatgtagggcccttaaagttgcagagccaggaataaagtccggattgggactcaggtctgtgggcaatccaaggccgtcccctttacacttcaaatgctctttccccctccggaagccctcgcgtcctcatccctaccccacctcttgttccccaagcgtggctagggctagggctccagggctacaccaagcacccttcggtcttcccgggaagaattttccccggcccggggctagggtctggcgctggggcgctcctgggacctgcgggatcaccactacactctggcgcgccgagcgcggtgagctagggcgccaaggcacaggtggggctggagtccagcgcggaggcgcggggggcgggacgcggggccggggagcggccagggaccgcggcagcgccgcagtgccagcccggcgctggcgactgcctgccccagcccctcagtggcggcttgctctcttctctcgctccgaaccagacacagccgctgtcgctgccatgtggcgcgccgcagactcccgagaacagccctggctgtcagcgggcaccagccgcttcctgtgcccatcgcgtagactggaggggcgcaccacggccaccgagccagaggcgcttcaggaagcaagagaagtccccgcgcgctccgggacccggcgcagctcatggtgagcgccctctagggctcgagggtcccttggctgagggggcgcatcctcggggtgcccgatggggctgcctgggggtcgcagggctgtagttgggatcgcgcacaaaccgactctgcggcccagcccgaaatgctgccgccaaggagcaacggcaccgcgtacccggggcagttagcgctgtaccagcagctggcgcaggggaatgccgtggggggctcggcgggggcaccgccactggggcccgtgcaggtggtcaccgcctgcctgctgaccctactcatcatctggaccttgctgggcaacgtgctggtgtccgcagccatcgtgcggagccgccacctgcgcgccaagatgaccaacgtcttcatcgtgtctctacctgtgtcagacctcttcgtggcgctgctggtcatgtcctggaaggcagtcgccgaggtggccggttactggccctttgaagcgttctgcgacgtctgggtggccttcgacatcatgtgctccaccgcctccatcctgaacctgtgcgtcagcaggtcatcagcgtggcccgctactgggccatctccaggcccttccgctacgagcgcaagatgacccagcgcatggccttggtcatggtccgcccggcctggaccttgtccagcctcatctccttcattccggtccagctcaactggcacagggaccaggcggtctcttgagagctggactgcgagggggagatttctttagacaaaataacacctttcaccccaaatggattccattaaactgcattaagaaaccccctcatggatctgcataaccacacagacattgacaagcatgcacacacaagcaaatacatggctttccagtactgctccctttatcatgtgtttctgtgtagtagctggtgtgc

SEQ ID NO: 694 - protein, 355 aa, Homo sapiens
MARGVIQLLEDEERPKNFPRPGARVWRWGAPGTCGITTTLWRAERGELGRQGTGGAGVQRGGAGGGTRGRGAARDRGSAAVPARRWRLPAPAPQWRLALFSRSEPDTAAVAAMWRAADSREQPWLSAGTSRFLCPSRRLEGRTTATEPEALQEAREVPARSGTRRSSCWDRAQTDSAAQPEMLPPRSNGTAYPGQLALYQQLAQGNAVGGSAGAPPLGPVQVVTACLLTLLIIWTLLGNVLVSAAIVRSRHLRAKMTNVFIVSLPVSDLFVALLVMSWKAVAEVAGYWPFEAFCDVWVAFDIMCSTASILNLPFRYERKMTQRMALVMVRPAWTLSSLISFIPVQLNWHRDQAVS

SEQ ID NO: 695 - DNA, 25554 bp, Homo sapiens
  source (1)..(25554)
  CDS (201)..(271)
  CDS (1805)..(1937)
  CDS (4060)..(4213)
  CDS (12949)..(13075)
  CDS (14002)..(14268)
  CDS (19308)..(19434)
  CDS (23873)..(23914)
  CDS (25214)..(25354)
  modified_base (8292)..(8391): a, t, c, g, unknown or other
  modified_base (17463)..(17562): a, t, c, g, unknown or other
  modified_base (20911)..(21010): a, t, c, g, unknown or other
cttttccaatgccaggatgttacggtgttatgtgtctgtgaattggcgtccttgaggtatggacagaatagcagcgtcggtgggttcaagctgcctgaagcggatgcagtgaggcacagaaggcagagctagccaggagggccggcggggctgacacgtgcctctctctgcagcactcctacctgctgaagctgaaagtcatgtacaccgtgggctacagctcctccctggtcatgctcctggtcgcccttggcatcctctgtgctttccggtgagaacacactgccagctctccataccccagccctcctcaggtacagactttgggtctcttctcaaccacccaggacagaaagaggaaggtctgagtgaactaccttgtcgtctcttgatctaaagctgacctatggcaaaacatcgaggttcctgtgacctcattcatccctttattttttcaacatttactaagcactactgagaacttgcggccggtcgctttatatgtattctaattttcacacaatgctatgagataggtaacaggaaccccattttacagtagtactagcgagattctgttgcaagagacagaaatccacctcgaaacagcataagaaaaacaaaggcgacctgacccatgtaagtggcaagttcatgggcatctgctgtaggcatggctggatctaggtgttcagtggcatcagcagctaggtccgtctccctccattccactgctctgggttggcctcatcctctgggaggctttctgcagaagtggcagagacaaccaccagcagttgctggcattcatcctgctagctcagcaacaccagggccaacaagagcctcttcccctctggttccagtaaaagtcctcagagttctcataggccgggcttaggtcacatgcccaactctgagccaatcactatggacagcgatggagcactctgattgatcaagtctgtcatgagggtgagaagggtggagccctcccaatccagagctggaatgggtttcccagaagaaagcctgtttccggtaccagaagaagcagaacaagtaactgacttctgtcccctgcagcagaggaggacactgaggctccgggaagtgaaaagtcttgctcaaggtcatatagctgctaagtggcagagccagggtctgctttctccccgcagcctgtgttccttctgtgcccctagccctctcccgttctggttgccgtcctcacccctcccccaaaacaattctgggagctggagatggtggtaggtcagggcagaatacaatgttgcccctacagccccagctttttatttattcatttagagacaaagtcttgctctgctgctgaggctggagtgcagtggcaatggtagaactcctgggctcaagcaatcctcccacttcagcctcttgtacaaggaatacaggcaggcaccaccatgcccagctaattaaaaacaaaaacaatttttttgtagatacagaagtctcaatatgttgaactcatggcctcaagtgatcttcctgccttggcctccctaagtactgggattacaggtgtgagccacactgtggctggcctttttttttttttttctcactgcagcatgtagcaaattagactggccacctggagacccagttcctcattcaggttatgctcacagaatgtgttacccggaaagagctgaagtctagggcctcagtttccccagtgcactggtggcaggtgggcctggctgagtcccagcccctcaggctctggcctctatgtccctacattctctccctgcaggaggctccactgcactcgcaactacatccacatgcacctgttcgtgtccttcatccttcgtgccctgtccaacttcatcaaggacgccgtgctcttctcctcagatgatgtcacctactgcgatgcccacagggtaatatgtctgggtgccccaggatgtcgccaggcccgcctgccttccccagcctagctttggagaggggagtagcctagttgtccttcccccaagcccctgctgaggctgcacttaataccaaggataaagcagccagtgctgacactgggccaggaggttcagggagattccacagccacatgtgcacaatctgggtcatgtaggagagaagctcatgggggttgccgtaaactcccagtgtccaggagtgaactggtcactctaggaattagatatatagggagactcctcttttccctacttctgccagttcccagctgaagaaagatgacccagtctggagagggtgggggttggtcataaaaagaaaagggtgagcatgggccagtatgtctgtataaatgtatttgcaataaaacgttgtgttttcttaaatctaaccccctttctccttccaaatgcccagatgactcaattcattgcaatcaccctgtgtgtcagttgggattccttttgctgcgaataacagaaaactatatattggggtcttaaacaaatgggggctgtttcctacgtaagcagtccacagatgaggtggtgcaatggctgtgtgataccatgagggacacagtcttttcccctgtttccgcactgccatccttagagtaggcctttgatgtcatgctttataccacatggttgcaatatgactgctgcaaccccaggcctcctgtctgtgttccaggcaagaaggagaaaggtaaaacgttaaacatttttttatcttttgggcagctttgcctttctattgagaaagggcaccttccccagaaactcctacctacatctcattggctagagttgagtcatgtaaccacacttaatcgcaaaggaagcagggtgatagagttttttactatcacaatctctatagtagaggcgagcaagggagaaaagagattggaaattgagattagttcagccaacctgcctgccacttcctaccactcacctgtttgtattgttcagagttgtgtgtgtgtgtgtgtgtgtgtgtattttctgactcagactgagaggttcttcaggtaggatccatgtctctcaaggaggtctccaggatgaaacaagagtacctgctgggagtcaggagccttaaatcctagccacgcttcattactgaccagcagtggacaaggccagcaatgccccagcagggaaccttctcaggttttactaaacattagactcacaagtcaaccatgggccttgcctggagtcagagcctctgggaaggccataaggcaggaaccaccactgtccccaggcagcaccgggcgctcctccttctcgggcttgtctttgcagcagccctacggctatcccgggagctgtcccatccccaggggacagcccaatgcaaagaaaaggacaaaggccctaccatggcagaggtacaggagctgtgctggtgtagaagcctggtgccccacaattctacaggcataacttccggggatccctgcaggggacatgcctgttaaaagagtcagtcactgcatcagggaagtccaactccatgacatccccatcagatatgtggagagtgcaatgtaccagccagggccatttttaccataatcagtggtacctcctaacagagttggcacatcccttcattatgtgtttgcaagggaactgagcttagaaaagatttttttaaccctttgctcagaaatctcttccctttctaggccttggtttcctcatctgaaaaaatgaggggattgggcagtatccgacacagttctgtagttgaaggactgcctcctcatctagcctggcagccagtgctaggatttgaacctagttcctgctcctatgatggctcattgattggccagcttgactgaacccactaggcctgtggactcctactctctagagaatgctgcaggcctgatggaggaaggccacagaagatggccttgaaccccagaggcccgctcttgtggcctggctcctgcccctacaacaccctgttgctccctttggggccactcaccagagggaaccccactgccacccggcctgggttcagctgcctctctctctccaggcgggctgcaagctggtcatggtgctgttccagtactgcatcatggccaactactcctggctgctggtggaaggcctctaccttcacacactcctcgccatctccttcttctctgaaagaaagtacctccagggatttgtggcattcggatggggtatgtttctccctgggtctgatatctgcatggtatgtgggaaggggtgctgagtcgagagtcggagggttcggcttttagttccagctccacacttaactaacttgtgtaatctttttttttttttttttttttgagttggagttttgctcttgttgcccaggctgaagtgcaatggcatgatcttggctcactgcaaccttcatctcccaggttcaagtgattctcctacctcagcttcccaagtagctgggattacaggcatgtgccaccacacccagctaattttgtatttttagtagagacagggtttcgccctgttggtcagactagttttgaactcctgacctcaggtgatccgcccgcctcggcctcccaaagtgatgggattacaggcgtgagccaccgcatccagctaacttgtgtaatcttagacaagttccttgatgtttaaccctctggtctcagtttacttatctgtcaagtgggaaatcctagctcaaatttagccccagtttctggcatctagagctttttacagttcgttcccacccaatacttgttgcctcgtctgcctttagacggtgcattcctacgtcctctttcttgcttcctttctgtattagaacgcttttgactgctggcatcagaaaatctgtaaacctttaaacataaacgaaattaattggctcatataactgaaaagtccagtgatcaccaacttcaggagaggctgaatccagcagcgtcacactgttgctttctgtctctactttgcctttcgtaacatcggctttgtagttaagctggtgttcccaatggaatggccaacagcttctgggctagagacttccttgtaccgaactccaacgagagaaagaaagagactccatccagcattcttagcaaatattctgaggtgcactctggttggactgcttgaatctcatagacacccttgaactagtcagcagagagtcctgagagaatgaaatatgcatgattggccttagctactcaaaccacatgacttcctaaaggaaattcgggattcattgtctaggaaagagggagaatgagagcgagacagccaagtgcgggcccccattccatctctgtcccttttccttttcggtcaatgaagacgacaaacaacttccattttaggggcacttgctatgtgccaggcattggattcagcactttacatgtatcatttaatcatcgtagcaatctccagaggcctctcagagacctcagctcacagacacaacgtaacataccaactcacatggtaaacaaggacagacctcaggattcaagccaagacttgtctgtttccaaagccctttaacttttaccctgccattaacacccatccatccatccatccatccatccatccatccatccacccacccacccatgcacacatccacccactcatccatccattcctctatccattcatccattagttgctcatttgataaacatgaacgttaccctaaggagttctagacagagagccaggttcctgtgagtgactcaaaggcttacagagatagtcatgtgcaccaagcattagcttcttttggtttcttcctggtgcctttaagaagtgtccctgccaggaatgccctgtgctgccttttctgcttgtctaaatccttatttacaagggccctgtctcccgatcaggggagctgcctgagctggcagagcttgctgagccctcctgcttgctgagccctcctgcttgctgagccctcctgcttctgaaccttggcagcccagtcagcacctgaccccgggccatcgggaggttgcagagttatgccgacgtctctagaggccagcaatcccagagtgcctggggaccagggacttgccttatgcagctggctctgccaaaaaagcacccaactcactgagcccagttcactaagctttaaatcccagatacgccaagattcagctgtatgaacatggaccgttttcccatctataatatcaggaccataatttattcaacattctttgagcacttcctgtgttcagggattacaaagctgcattgtgatagtatctctgtcacaggattttaagatgttggaatgaaataataagaaccttcctttcttcttcaaatctttgtggagcatctactgtacgccagccctgtgctgggtgctgagaattgagtgacatataaaacagcaatggttctcttcctcctggcctgtttgcctgccagacaccaaagagaccctgaaggtccctagaaggcctgaagcccctctatctgtgagaagcccttttcatgcgaaggtaacggcccctgcttgaaattatactgatttcatcaaagataggttgcttaaatgggtacacccctactgtaaaaccttgtaaaaaaaatttttttaagtagaaaaaaaaaaattaccctagtcccacagattgaactttttctgagatttccttccaacctttttttctacttgcagtttttcctcacatagctgtggtcattctctatgaagaattttgaatttcgcttcttcccattaacacataagcatgttctgtattatgtcaaatctttcataaacattttaaactaccacatagatagatagatgtgatatagatgtatttaaccacatacctattgtttggacatttaggttgtctcactattataaatagcacagtgatgaatacctttatgggcaaagtgttttctgtatgtaatacagaatcccaggatatggattcctgagtggaaaggagtgagcacgtttaaggtttttaacacttacccaaagctttgactttttcagagcggctgaggtgtgagtctgtatccagaaaatagtgacagcgcaggctttatagatgagccaggctgccactcagcgagtgagagtgagcggctggcactggcggttctgcctcagcatgggtgaaggtctgccaaacccagcttgctgcactccccgcccagagactctgaggcagtgggtctggggtggcccgagactgcatttctgacgtgttcccaggtgttgctcatgctgctggtccaggggccacactgagccaccaacttaaaccattacaaattttgcaaactttcccaccaacttgccactaaggatggaagataatgaacaagtgcctctcaaaacccatgttctttgcccaaagcactaagaattgaggcaagactttttttttttttttgagagagagtcttgccctgttgcccaggctggagtgcagtggcgcaatctgggctcactgcaagctccgcctcccgggttcacaccattctcctgcctcagcctcctgagtagctgggattacaggtgcccaccaccacacccagctaattttttgtgtttttagtggagacggggtttcactgtgttagccaggatggtctcaatctcctgacctcttgatccacctgactcggcctcccaaagtgctgggattacaggcgtgagccaccacgcccggcttttttttttttttcaagatagggtctctctttgtcacccaggctggagtgcaactgttcaatcttggctcactgcagcctcaacgtcctgggctcaagtgatccttctgcctcagccgcctgagtggctgtgactacaggcatgcaccactgtacctagctaatttttatttacttatttttattttttgtagagacagtgtctcactatgttgcccaggctggtcttgaactcctggcctcaagtgatcctcctgcctcagcctcccaaagtgctgggattacaggcatgagccaccacacccagccaaggcatttgtttaattgttatttttatcaaagtcattcatgtacttggtttaaataattaaacaaaagactacaaggtttataataaacaaaagctaaatctcctgccttcacttcttattcccgagctcagcctccagagttaatgcctttcactcttttaacttgttcctcctaagatttactctcgtgtttctaaaatcaatacactactatttcttgatttgtctgtttgaagcannnnnnnnnnnnnnnnnnnnnnnnnnnnnnnnnnnnnnnnnnnnnnnnnnnnnnnnnnnnnnnnnnnnnnnnnnnnnnnnnnnnnnnnnnnnnnnnnnnntggcccaagctggagtgcagtggttcaatcacagcccactgcaacctcaagctcctgggctcaagcgatcctcctggctcagcctcctaactagctaggactacaggtgcatgccaccacatctggctgattttttacatttattgtagagacagggtcttgccatgtctcccaggttggtcttgaactcctgggcccaaacgatcctcctgcatcaacttcccaaagtgctgggattatagttgtgagccattgcgcctgaccaagaatataaaattcttaatcctctacctccattcttcctttacagtttcttatcatttttggctaaatcagattcagtgtatacattattatatctatgtaaatagtgtttaccactgagacaagtggtgtacaataattttactttcaatcttattaactttttattttcctggaatcatttttcctttgctttttatatatatatattgccagcatcaattctctcaaattctttggacagccttccaatgctatttattttccaaatcatcaaatgcaataggaaatctatcagttcctatttgtttgtttcctgctgtattagttcctaaggctatcttaacaaattgccacaaacttggtggcttaaaacaacagaaatttactctctcacagttctggaggccagaagtctgaaatcaacgcgttggcagggttggtttcttttggaggccctgacggaggatccctcccatatctctttcctaccttctggtggtggctggcaatgcttggcattccttggtttgtagttgcatcagccccattcctgcttatgtctttacatggacttcttcctctgtgtcttctctctctgtgtgtctctcatggccttcttataaggatgccaatcatgctggagtagtggcccaccatactccagtatgactttatcttaaccaattacatctgcaaagaccctatttccaagtaaggttacagtctgaggtgctgggttgacatgaattttagggagacactattcaacctggtatacttgccagtgtttttttctagagctttctgccttcttgcttgacttggcctggctgttctccagatttgctcagctcccttagctttcaccttcttccacaaatcctgtttcctttctttctcatctccctgtctttggttcactctctagttgtgttggagcacatcctccagtatctgtctaaccaagagcacctgaaaggaacatttttttaatcccatgtctgaagatatcttcgttcaaccttcatacctaattcattattttgctggacataaaacaagctgaagtccaggcacagtggctcacacctgtaatcccagcaatttgggaggccaaggtgggcagatcacttgaggtcaggagttcgagaccatcctggccaacgtgttgaaaccctgtctctactaaaatacaaaaattagtcaggggtggtggtgggtgcctgtaatctcagctattcaagaggctgagacagaagaatcacttgaacccgggtggtggaggttgcagagagctgagaccactgcactccagcctgggcaacagagtgagacttcatctcaaaaaaaaaaaaaaaaaaaaaagttgaaaaatcattttccccagaattttgagggtcttgtgttttggcatcagtgttatgggatgtgccatgccattttgcttcctgaactttttactcctttctacataagctgcaggatcttctctctgtgttctgaaatgtcacagggatgtgctgtgatgcaggccttttttcatcgtttttcctggcatacggtgtccctttcatctgaaaattcatgtctttcatttcttgaaaatgttcttacattatctatttaattgttttttccttctgttttttatcctctgttttctgaaactccctttagtctaatgttgtacatcctggaataacctctaatgttcgaatttctttttcctacttttcattccactgttgtttattctgctgagagattcctagtctttatcttccaacccgtctattgcgtgtttaattgtggttatcatatgctccgttcctaagccccctttcttgttctccgggcactccctgttgacagcatcctgtttgtgtcttgtagatacgaccttttatctctccgatggcgttccttagagttgttttgttccaagttccttctgcttcctgtatggtctgtttcctctgagttccttttctctgattgttttggtctgtgtcttttatgtaataagatgttggtgaccttggctgtctgttcctatttaagaatgaatcacttcagagccggctaatggctgttgggggtgtggggtttgtctctcaagggacactggactggaagtgttggggggtcccccatggctatctataggctctttgtctggggctgttcagttcctctagagaatcctttcatctccagcgtgcagtggcagggaggtgggcagagggtagagggctggggtaggggtagaagcccattcagtagaggcctgaaaactgagcggcccggggaccagggcttttaccattcagcttgagcacgtccactagaaatagaatctgatttaagtatttctgcttaaaaaaaaaagaatctgagccatacatctagcttaaaattttctagtagccacaatcaacacagtaaaatgaaacaggcagtatttgtttcaacaatctattctgttcaacccaaggtgaccaaaatagtatcatttcaatgtataatcaatataaaaattggtaatgacatattttacatttttttttttttgagatggagttcctctcttgtcacccaggctggagcgcagtggcgcaatcttgactcactgcaacctccgcctcccgggttcaagctattctcccacctcagcctcccgagtagctgggattacaggcatgcaccaccatgcctggctagtttttgtttttttaatagagacagggttttgccatgttggccaggctggtctcgaactcctgacctcgggtgatccacctgcctcagcctcccaaagtgctgagattacaggcatgaaccaccgcgtctggccatgttttacgtccttttatttgtaccaagtcttcaaaatatggtatctatcttgcacttagtgccaactcagtaggaccagccacataccaggtgctcaagagccaccttgagcgctggtgtagactgtcactccattcctgctcagctgagcaacccctccaaccctctgctggctgcagccctgttctccttggttcagtaattccagagaataaactctgttggaagttgactattcagtctggtgagggtagtgctggccgcctggggtgcttatctgtttcttatccagacttcaaaccatcctcctgccccagccccactctgccgcctgcctcctgggtaccgggtgccctggccctagagcatccttgggcacttccccagcggcattgccccagacagcacttctgtttcagcttcctctgctcgggacatcagctgccactcctctggcaggcttctgtgtgcctaagcgtgttgccgtctctcctctactctgcccttccttctcagtctttgtccttacgggcttttaccatttctatttctttattatcattttagaggggcttcaggggaagtagggataaatgtataagttcagtttgccacgtttaactagaagtcaggaaatgttattgtattttctcttctaaattcttgtggacttgatctcatctctagtccaaattatatttttgtttaaacatgacagtgatggcttaccttagctgttaaatggccaagctttttacaaaccaatatttgaataaaatcaacgtttctttcatgacctgtgtccaccccttctccacttcctcctccccgctgcacgtggccaggcagatcacagtatgagaagggggctctccagctgcctccatgtgtccacgagcctgcccaggagtcccagcccctctatactttgcagtggtcctctggagtctggcctgggttcccaggagacccctaacaccaagtggcctttgggatccttctgattctgccatagtccccagggcatgcccggcacccttgaggcacatggtgccacattcacacaagatggcacaagatggcagaggggtttctgtggaaaccaaatcttggcacctgctcagtagctgggctggggtaaccaattgtcctgttctgatatgtgtgttgaaaattgagtcctctctcttctgcccctccctttgtttttaatcctcaggttctccagccatttttgttgctttgtgggctattgccagacactttctggaagatgttgggtaagctaacggaaggaggataacaagaatgtatctgacatcgtccagcttttcaaacagcatagttacttctttggagctatctaggaaaggcctttttctcaaagtagaggccacagatgagttccctggactgatgctcactgcttcccaggtgtgtttccaggtgggccgagcagccttggccatgcctgcactgtcctggccttcctgtcttcttgctgcctgtccgctctgcatgtgggtcagatgccagacaagagctacggggctccaggcaggtgttgctccatggaagaaactcaaggaagggccagtccagctttttcttcctcctgggatctccctcctggatgcctctctacccctgggtgtttaggagccctgcagagccagactctaaagaagtcaggcattgagggtggcagtgagcccaggggacgcacctgggagtaggtacatgggaagcaagcttaaaagaagctggggaagaggagaggcagcagggcagcagcgaggcagcggggcagcatgggagttgatttctcaggggcataatgacacaaccaggccaataagtggatgaggtcaaatgagacatccaagtgtctatagtccaaatttagcccgaaataattgcttcaaagtaatttttgtattgggtgaattcactttttcaaaaaatctggattttcagcttgtctagaaaaaaatggagaggtcctttaacacgttccatttttccttgtggcaaaaataagctggagcagagctgcggctgtcttggacagggcacatgctccccagtttgctcagtaccctccaggcctgatgtccccagatcctgaggtcacatgtcagccatccaccacttctcttactgatgtcatcttcctggcttctgttggtagctgagtttgccaccgtgctcgctggtgaattctgacagtaagctaacttttggatctgggagtctcccggctctcaggttctcgcagggagacaggtggccactccctcagccccagcagtgctcctgggtggcaggagggggtgttctaatggtgctgggcacaccactgcaggggctcagtgccacaaacacaggtccttcataccaagggccacctcagggaacatgtccttgctggttagcccagctcccacagctcctgctcataaccatgcccagctgtccctcccttaggtgctgggacatcaatgccaacgcatccatctggtggatcattcgtggtcctgtgatcctctccatcctggtgagtggccctcctctccctagctggggatcagtgggagagacggaaatggtgaccagcccacaggggcagagggtggaaggacagggctccctgcaggtgccaggagggataaaccacagtgtttgtgaggttggtgagcagcgtggggtgtggaagctctgccccctgcagaatgtgtgggagtgcagtgaggggtaagctggaggcaagagcctgcgaacctggttctttcccacaagcagcagctcaagtgtggtgagcagagctccttgttctaaactggctggctcccattggcctgaaattccaccttcactggttcagacctgtgggccttgaacatttttctagggatttgcttgttaacttgggatgagtcgctaagctgagatcactgaagagggtgggagtgcagatcggggaagctcagtggggtcatggtcttgggactttgcagtgctgcgagtgggctcaggcctggaggggcggccccagggaagagatgctgggtgaccatcttggacaggagcttgtgagtgtcaaccctggtggcccttttgaatcacctgggagcttttagaaaatactgatagctattgattccatttctttttctggcaagaggcctgggtactggtccccaggcgattctgctctgtgccagggtagagtcctgtagcccagcccatgggtatggttcagcatagggggacagaggagggaaggcacatggggacacacaggaatcatctcatggatggaagcagtcccttggctggaagtaacatccacacggacagcccagggatgcccaaggctgcagaaccagttgaaagtgagtgtcctgtgcaggctcacctgcgtggggtagggggagagggcacaggacagggccccttctcttccagtagctgcctgggtggcatcttgggattggttgagaggagaggaccattccatgacaaccttcttttattcttttttaattacataatctgagcaaaaaatgcaaaatacaaaatgtttgttttggttttactttttgagacagggtctcactctgtcacccaggctggagcgcagtggcgcaacccatgactcactgcaacctccacctcctgggctcaggtgaccctctcacatcagcctcccgagtagctgggactaaaggctcccaccaccacgcctagctaattttttgtagagatgagctttcactgtgttgcccaggctggtcttgaattcctggactcgagtgatctgcctgcctcagcctcccaaaatgctgaaattgcaggtgtgaaccactgtgcctggcacaaaatgtattttttaaaaaggaaaaaaaaaatcattcatcattctcccagctacatatatgttatgaccatgtgttttccttcctccttcttctttgagcagacatacttttctttttcaaaatccttaattaggttttttttttgtttttttgttttttgtttttcacttagcaatagatgtgagctttcctgtttcatgtggaattccttgataaactgatttgccatggcttcataatatcatgctggaggctgtttcctcatttagttaagcaagcccgctgttattctgggactcggagagcccagcccaggacaaccctggatgaaggacggccagctccagtgtccagggctggtttcagagggctgtggtttattcagcaattgaggatgttggatgagcactcctgatgcaaaatatctccctaccaacctagcatggggcctggaattccactatttaaaaatggactcattcttgggaacttaaagactttctttctttccttgttttctgcttgcttgcttgcttccttgcttccttccttccttcctttccttccttccctccctccatttatttatttatttatttatttatttttctttctttctttctttttctttcttttttctttcttccttccttccttcctgccttccttccctccctccctccctctttcttccttccttccttccttccctccctccctccctccttccttccttccttcttttttttgtcttcaagtgctccctattaaattaaatacaactctaaggcaaacaaaattaaactaaatagccttaatgagttgatagcatgcatagccagcttacaacaagatgcataagcaagttgcagagaagcagggttccccgaaaagcagtgctgggccaggagtcctagacagccactaatcctgtgtcttttggcaagcattcccaggccccaggctgcttgtgtgaacaatgcgggtgtgaggctgggtgattccactgatccctgcttctataaaatggctggagcaggtgtgtgagggagggagagatgctaccatgtgggcaacttcctaatgttgttggcactgggcactggggttgggggaggggacaccaaaatgaataaaaagactgcgttcctgtccttcaggaagttacaattgaattggcagataactaggcacatacatgtttgacagacacatgcatttgaccttttaagatattttctcttccaatcatagttcgcaagaaaaaaaaagatattttaagtgctcttacacagcaatattatccctaaatacggtgaatcaggaaagggaagtaatcaagggtggcttcttgaagctggcgattgagctgcaaactggtcctcacaccagcagcttcagcatcacctgggagcttgttaaaaataattcttgggccccacgccagacttactgaaccataacctgtggggttagagcccagcaatgggtaccctaaactttgagaaccactgctgtaaaggctttcagctttggcattgtattacctgggagcttgttagaaatgcagaatctcaggtccaccccaaacctgcattttaacaatatccccgggggcttccaatgctctgcacgggtgagtgatctgccttgcaactaagcagaccttagagcttctgcagcccaggggcaggagggagtgctgcctccagccatggactctagacagtgtttcaccaggactgggggtggggaggggatggagaggagcggcagcactggtgggccatcctggctgtggtgtctgcaatgtcttctctgccctcaggtccaggggacagggccaggagaggtggctggaaaagcaagatgccttcagccccacctctgccttgtgttttgcagattaatttcatccttttcataaacattctaagaatcctgatgagaaaacttagaacccaagaaacaagaggaaatgaagtcagccattataagtaagtgaagggcaaagactgaggcatggtcagtcagcaagcatttactgagcacctactgtttacttaannnnnnnnnnnnnnnnnnnnnnnnnnnnnnnnnnnnnnnnnnnnnnnnnnnnnnnnnnnnnnnnnnnnnnnnnnnnnnnnnnnnnnnnnnnnnnnnnnnntactgtttacttaactggtgctagctattggagacggaggaaacgttgtagacctagtcgtaagaagtttaccaggtacatgggggcggttgcggggaatggtctgattttagagcctcagacactgtatgggggtggaaacactaagaaatctcaggcaggaacgtgacggcagagagatcttatccttggggcaaggctagggagtctccacatgggcttcaaagactgaaattcacacaaatgtgtgtaggtacagtatgtgtattttcagaggaggatgacttcggtttcatcagattttagggaagtgcgtgatccaaaaacacttaagacctttcaaatgttaaagagaaatacgttcgttttctagggcttccataacaaaatatcacagactaggtggcttaaacagctgatatgtattttctcagagttctggaggctgaaagtccaagatcaaggtgtcgacaggtttggtttcttctgaagcatttcttgctgtgtcctcacagggtctttgctctgtgtgtgggcatccctggtgtccctctgtgtgtccatatttcctcttctaaggacaccagttgatttgattaggccccactccatccttgttgtaacttagcctcctctttcaagacctttctccaaatgcagtcacattctgagatactgggggctaggacttcagtgtaaaaatttggcagtgggtgtggacataattcagcccataaattatattaaagacaaattagcatccaggcgcggtggctcacaccaataatcccagcactttgggaggccaaggtgggcagatcacttgaggtcaggagttcgagaccagcctggtcaagatggtgaaacctcgtctttgctaaaaatacaaaaattagccaggcgtggtggagggcgcctgtaatctcagctactcgggaggctgagataggagaatcacttgaacctgggaggcagaggttgcagtgagccgcgattgcgccactgcactcctgcctgcacaacacagcaagactctgtctcaaaaagaagaaaaaaacaaaacaaaaacaggacaaattagtgtcccccagagaccttctccatggtgtttcgtgttttgagaatctgacagtgcctcagattacttggtgtcagattcctggggacctgggataaagttgccaggtaaaatacaggatgcccagttacatttgaattttggataaacaacaaatcgtttttcaatatttatacccccacatggtgtccattgtttatctgaaattcagatttaactggggattctgtatttttatttgctaagtttggcaaccctaatctgggaagaaaatacaagaatttgtccctacagatatttattatctagcaaatgagaaagccggctttgcttgtatgatgttagacatagagcagcagtgatataggcacgtaatttataaataaagttaatggtgtaggtaccgtttttttttctttttactgatggaggtgcatgatcagaaagtttggggctttgccatgagtcaaaaattgttgtatctgagtgatggatatgagggagttagaaactttcaaaataaaaaatgaaaacaaaaaagtttggggtactgctagccagcctcagcagtcagtcccgagctggggagtggcacagctgtgtgcctacaggaggagaaagggcgcagggaggcagagtggaggctacaggctttctgtgtccccaggcgcctggccaggtccactctcctgctgatccccctctttggcatccactacatcgtcttcgccttctccccagaggacgctatggagatccagctgttttttgaactagcccttggctcattccaggtaagtttccaggactggggctgccagctgaaaagaggagttctctgtgtccttagggagaagtggagggcatagagactgcgagccagatgccttatctggcagagacccaggggaagaaggggtcggacctgacagtgctacaggtccctgagtgggatccctggtccccaccagtcaaatgggggtgggagataaaactaagagagacagagagactgacttcagggaaaataaaaaggaaaagtagccccagtacactatattgtacaactctcaataacatatacatggtcaaaataacgtaagcgcggatggccaagtcatcaaacactggggcgggaagatgagcctcgcgggagcgtgggccgcgggtgtttggaagagaacactgtcctcatcttcacactgggaagtccatagaaaatgccctagactgaaaactcctcaagtggcgacaccagcatattttttagaagcagttaagagagtttcaaggagcagtcgcatgtgaggaaaaggaagtgagggtggggtgtcaggaggctgctggttctgtaacaggaatcctttgattctctgaaaccatgtgcatatgcaaattattaaaactaaaaactgactttaaaaaataaagtgaggtggaaaagcgcttacctactaattccacaagatgctgtgaacttaaaaacaacaacagtaaacgtgtttgggcagagggagcctgaacgtgaatcccaaacttcacaatgccgtttgtttatttactcatagctatttccttccaaaaataatgcaatgtcgcttttgggaaaaacatacaaaggacaaaaaataagtcgatgaaggatcagtgaaaaaaagaatgtacaactggttgggttgctacacagaaacaaatacgataaagttctatacaggagggagagatgggtcataagtatgatagggagcttcccagtagccaaagcaaagacaaaacaattgtttcaaaatttcgcatatccataagacaaaatcaaactaacggccgggagaagccagtgattataggctctaggcctgagacaaaattctcccagtagttttttttaaaggacttagtccttaacgacatttccacggtagggcgatattgtccagccaagctttcactggggtggcctcggcctgcgagcaggggttcaaaccctcccctcatccctagagctctgttcagggtagggtcttcctgttacttacaggttctagggaggatgcctcactggggacacatcactgagtggagtcaggtcttgccctacccataccttcagaccacaccctcccctaagctggccctctacccagtaacccgtcagtgccccagacctccagagaactcagcctctggcttaatccaggattcttttcctctcggcctgggggccagggagctagctttcctcaccactgctcttgtaacgtccagggaggnnnnnnnnnnnnnnnnnnnnnnnnnnnnnnnnnnnnnnnnnnnnnnnnnnnnnnnnnnnnnnnnnnnnnnnnnnnnnnnnnnnnnnnnnnnnnnnnnnnntatatatacgtacgtatatatatgtgtatattcatacgtatatgggtatatatattcatacgtatatgtgtatatatattcatacgtatatatgtgtatatatattcatacgtatatatgtgtatatatattcatacgtatatatgtgtatatattcatacgtatatatgtgtatatattcatatgtatatatgtatatattcatatgtatatgtgtatatattcatatgtatatgtgtatatattcatatgtatatatacatatgtgtatatattcatatgtatatatacatatgtgtatatatatataagaatatgtatatatattcttatatatacacacacatgagaaaatgtttttcatatacaaaagtgaagagaataggacaatgaaccccattacctatccccagcctcagcggtatccactcatggcctgtttgtttcatctccatccctacctactacccccatctttttaagtaaattcaaaacatcatgttatttcatcttcaaagagtttagtgtgcatttctaaaagacggggcttaaagaagaacacatacaactgtaataacaccatcactgtcatatactctttaaaaatgtatttatggccgggcgcgggggctcacgcctgtaatcctagcacttcgggaggccgaggcaggcgaattgcctgagctcaggagttcgagaccagcctgggcaacatgatgaaagcctgtctctactaaaatacaaaaaattacccaggcatggtggtgtgtgcctgtagtcccagttactcgggaggctgaggcaagagaattgcttgaacctgggaggcagaggttgcagtgagccgagatcgcgccactgcactccagcctgggtgacagagcgagactccgtctccaaaaaaaaatatgtattcactctttctaattgtataaataatgcttgcttattgtgaataatttgggaaataaggaaaagtttttcaaaaaaagaaaaataataagaaaaaaatctagaacgtcataacccagaaataacttctgttaaagtgttggtgtgtttacttccgtctcttttctttccacaaagatacacacacataattgggatcatgatgtgtatggttttgtatcttgcttgttttgtttaattctctatcatgcccatcatgagcatttcttcatgtcattaaaattcttcaaagtcttcatccttaatgatcgcagaatcacggtggaaattagtaaacttgctggcttgtgtgaggcctgccctatatacactggagcacagctaactccctcccctgaacagtgaaaatgtgtccctggaccctagcgcagcggaggccaggcaaccctagcccatgcaacgggcagcatccttggcctgctcgtggctctgggccaagcacacagagctccaggcatgcctaaacccctccgtgcctcagttccctcgcttgtgaggtgaagatcctcccacctgcctccgagagctttggcgaggttaaatgaagcacctgggacctacaattactcaggcctagctgtgctccgatccaagtctgtttcatttcaaagcctgccttgaagtgccttttactccctctctgacagtagttcccggaccatgatgcccgttttttggaactgtgtggggatctttaaaagctgctgatgcccccagctactgggatctggggagtgcaacctggataaaaggtcccaggtgattctaatgtgcagcaatacttggaaaccgatgccctgagtgtttctgcccctcaaatagtccccagtctatgtagcagtcattgatacctgaaattctaaagcaaacccttccagcttcgccactaactctttttaaaatgccaatatccctgagaagttgtacatattaagcccaccatcgatgagctgattcatcacccttcgaggttcctttccaatatcataagtagctacaggcaggcctgggtgggactagggaggaggagttgggccatctgaggtcaggcctctgtgtggggagggcaggcccgtaagggagagaagggtggcctgaggtgggtccctgagaaaggagaggagcagggtgaatgcgccgcagagacactgcttcctgctgatctggaggcctcttaggctccaagcaggcgccccagcctggagtccctcccctgacagagctccacaccaggatcctgggggcaccatcaggaaatcaggagctccaaataccagggagggagggtcttacaggcacagaccttgccacaccagggaacataaaactctgagcacggaggtgcacccacctgtccattaagcagggagctccaaccctgctcaccactggctggccgggacctgtacatagtttgttctgcctacacatttgtttttcaatttgaattagttatctacatttaaacatattcagatttccagtttatcttgaaataagaccacacagggcccagggtctcaccctgggcagcctgcactcctcctggcagagtgggcggacttcaggtgccacccatccctgtggctcccaggtgagcttcctgatcccggctggctgggttagcagcccccctgacaccatatgtgttcaaaagggagcctacccttggctgcaaggagttcacagtttatgctggatgagccagcacagccagggccaccgtgggcagcccacaagaggtagcctaattcccagtgaggcaagagaggtggggaaatgagcctgtagctggtgattaagagacctggggagggtgcagctggccagctggttcaggccgcatgctgagcacctgtgctaaccctgctacctctcttcttctggcagggactggtggtggccgtcctctactgcttcctcaatggggaggtgagtagtcttgggtcacccaggtacccaggagagctcctagccattggtttccgggtcagaaggagctacctgggaggggtggtaggaagggggatggaaagggtcagagggagtcctgggtctggtggcaggtggcttggccagttcttttaggagtctgaatttgcttaatgggagcaaggcttgttcaaaccatggctggaccctgttcctagtttctcattccacagaaataaattctgtaggtctggactggggtctgagaaagtgttttttaacaagcattcctggtgccgatgttgatctgttcagcaaatgcaggaggaaagttgggcagaacccaggttcctgactgccctgctgcttgcttaatgggcgatctcagtcactgccctgttctgggcctcagtctgcccatatgtgaaacgggtgactcagaactgtctgcagctcaatccttagggacctccagatgagcactgactccttgggagactgcacactcactttgaggactcgagcctcacatggagcatctgggtcaggaccccaggctctggcatacagagctatgtggttaacatgagctaaggctttctgtgactactgaccatctatctggtttgttgcacttgaatgggagtgatctttgatgtttcccaaaaatcaaatatcaagcctagcttcaaaggttcagctgctgcagctgggaattgtgaaggaaatttacaaagagaaactccctagttcccagatcagttctgagcttgggtggcttcctgggaataagtggggacccatcttaaatcacttaaaatcactggggacccatcactgagtggagtcaggccttgccctacccacaccttcagaccacaccctcctctaagctggccctctgcccagtagcccctgtcagtgccccagaccttcagagaactcagcctctggcttaatccgggattcttttcctctcagcctgggggccagggagctagctttccccaccactgctcttgtaatgtcaagggcacacacttgtcccaaggtgcacaagtcctttctttaagacacgatgtaatgagattgcaggtgcatgtgcccaggagagaggggaccctcagtagctactggacattggggctggaaacagtcaatctgcgtggcctgcaggctaggggacagggcagctgggcaggagtggcagggcctgcgtggagtcactgggggagtgagcagggctccaggcacagaactgtcctctcctcctgggctgatggctggtctcccgggcaggtgcagctggaggttcagaagaagtggcagcaatggcacctccgtgagttcccactgcaccccgtggcctccttcagcaacagcaccaaggccagccacttggagcagagccagggcacctgcaggaccagcatcatctgagaggctggagcagggtcacccacggacagagaccaagagaggtcctgcgaaggctgggcactgctgtgggacagccagtcttcccagcagacaccctgtgtcctccttcagctgaagatgcccctccccaggccttggactcttccgaagggatgtgaggcactgtggggcaggacaagggcctgggatttggttcgttt

SEQ ID NO: 696 - protein, 353 aa, Homo sapiens
MYTVGYSSSLVMLLVALGILCAFRRLHCTRNYIHMHLFVSFILRALSNFIKDAVLFSSDDVTYCDAHRAGCKLVMVLFQYCIMANYSWLLVEGLYLHTLLAISFFSERKYLQGFVAFGWGVFPGGPSSLGHACTVLAFLSSCCLSALHVGQMPDKSYGAPGRCWDINANASIWWIIRGPVILSILVSGPPLPSWGSVGETEMVTSPQGQRVEGQGSLQVPGGINHSVCEVGEQRGVWKLCPLQNVWECSEGRLARSTLLLIPLFGIHYIVFAFSPEDAMEIQLFFELALGSFQGLVVAVLYCFLNGEVQLEVQKKWQQWHLREFPLHPVASFSNSTKASHLEQSQGTCRTSII

SEQ ID NO: 697 - DNA, 3086 bp, Homo sapiens
  source (1)..(3086)
  CDS (201)..(277)
  CDS (1118)..(2192)
  CDS (2218)..(2886)
ttttataatgatctcatgacaagtataattatccccacttttaagataaggaaaatgtgtctcagaaagcctaagttgctcagagtctcccagctgataaatggtaccctataacaagtggaactatgaagacaatatataataacatgaaaagtgctaacagaaatctgtaaataaaaaattgattttacctatagaaaatgtacgtggaggtgggtgcggtggctcacgcctgtaattccaactctttgggaggccgaggcaggcagatcacgaggtcaggagatcgagaccatcctggcgaacactgtgaaaccccgtctctactaaaaatacaaaaaatcagccgggcgtggtggcaggtgcctgtagtcccagctaatcaggaggctgaggcaggagaatggcgtgaccccggcaggtggagcttgcagtgagctgagatcgcgccactgcactccagcctgggtgacagagcgagactccatctcaaaaaaaaaaaaaatgtatgtggatagggacaaaagatgagagtaaaagcatgtgatgcatctggctagtgcaatatgaatgttttaacatttctaatattctttgctcttataatgttttcaataaaatggagagatattgtaaaaatatttcaaaggctagtcttccttttcttctaacaaattctcttcatcaggtcaattttctcaaaatcttctcaattccagctttctccatgttggaaactgaaaggacagggctgggtggagagtgcgcgtatgtggggggtgaggacatgataggggaggttagagctggcgaagatgatggtataaagggttcctcttccagatctctgccagattgctcagaagccgcgttctttcctcatagagccagggagtgaatttctcaaggcgtcaccaagccctcgccgggcagccgtgctggaagcaaagcggcggcaggatggggctgggcttaggagctttctgttttatataccccaatacctgggtttcccatttcgggtataggtagaatcgagattacaggaaacccgaagccccctggccggggcagagcgggacccttgtttcccagtgtcaaaccgtgccaccagcaggtccgaggggtccgcagaggtggtggcaagggactttctccccattgtaaacctttcccggagaccacctcagttagggttgtctctgcttggcacagtcagggagaccagcggggacagtgttgaaggcctggctcctgttggtgggctctccagctaccccgggttgtctctgcttggcacagtcagggagaccagcggggacagtgttgaaggcctggctcctgttggtgggctctccagctgccccttgctcccgcccacccccgcccactgcaggtgcagctcgtctcccgacgccgctgggtgggggaggggcaactctccaagcacaacccgcgctctgtccctcggccgcgctgattcccaaccccctggcggccggtggcacccgggaccgctaagagaggtggtaggagggactggcgagccgagcggagctagactgaggggtcctgctctctcttactcattctcctggaaaagaggatctacgggggctgcaggcatacgtgccaaaggtgggctgctgcccgcaggagggatcaggataggacgacctggacccctcttccagcctcccccggcaggcagtaccccctccacgcccgcacctgcccggtccacgccgaactcactgaggactcgtgtgccccctgccctggagctgcgatcccaagcgccatggaggccgctagcctttcagtggccaccgccggcgttgcccttgccctgggacccgagaccagcagcaggacccgggaccccaagcccgagagggatactcggttcgaccccgagcggcgccgtcctgccgggccgagggccgcccttctctgtcttcacggtcctggtggtgacgctgctagtgctgctgatcgctgccactttcctgtggaacctgctggttccggtcaccatcccgcgggtccgtgccttccaccgcgtgccgcataacttggtggcctcgacggccgtctcggacgaactagtggcagcgctggcgatgccaccgagcctggcgagtgagctgtcgaccgggcgacgtcggctgctgggccggagcctgtgccacgtgtggatctccttcgacgccggagcctgtgccacgtgtggatctccttccacggctgtgctgccccgccggcctcgggaacgtggcggccatcgccctgggccgcgacggggccatcacacggcacctgcagcacacgctgcgcacccgcagccgcgcctcgttgctcatgatcgcgctcgcccgggtgccgtcggcgctcatcgccctcgcgccgctgctctttggccggggcgaggtgtgcgacgctcggctccagcgctgccaggtgagccgggaaccctcctatgccgccttctccacccgcggcgccttccacctgccgcttggcgtggtgccgtttgtctaccggaagatctacgaggcggccaagtttcgtttcggccgccgccggagagctgtgctgccgttgccggccaccatgcaggtgaggggtgggctgaggaacgttgctatggggaagcggttgctagagaaggaggcagcttcgcgaatgggagagtgggcggaagcttgtactaatggagcgcgcgcccagagatcacctggggcgcacgaggacaagtttgccatcagttcttctgaagcgggcaccgaggggcttgtcaccggctcacctggcacgcaagtgaggggttcgccagctgcgtacttggtgcgcgcagaggaaagggtttcacaatctgcacgttagggaggcagatctgacaccgacccacgacgcacgatatggccggaggggcttgtaggttcagcccgtctcagtagcgatgagggcacatcttgttacctgcactatctgttgttttccccctcaagggcccctgtccatgtgagtcctggagccgccggcttccttgtcccaactagacctagaggggatgcagtggactg

SEQ ID NO: 698 - protein, 606 aa, Homo sapiens
MYVEVGAVAHACNSNSLGGRGRQITRSEGSAEVVARDFLPIVNLSRRPPQLGLSLLGTVRETSGDSVEGLAPVGGLSSYPGLSLLGTVRETSGDSVEGLAPVGGLSSCPLLPPTPAHCRCSSSPDAAGWGRGNSPSTTRALSLGRADSQPPGGRWHPGPLREVVGGTGEPSGARLRGPALSYSFSWKRGSTGAAGIRAKGGLLPAGGIRIGRPGPLFQPPPAGSTPSTPAPARSTPNSLRTRVPPALELRSQAPWRPLAFQWPPPALPLPWDPRPAAGPGTPSPRGILGSTPSGAVLPGRGPPFSVFTVLVVTLLVLLIAATFLWNLLVPVTIPRVRAFHRVPHNLVASTAVSDELVAALAMPPSLASELSTGRRRLLGRSLCHPVPRVDLLPRLCCPAGLGNVAAIALGRDGAITRHLQHTLRTRSRASLLMIALARVPSALIALAPLLFGRGEVCDARLQRCQVSREPSYAAFSTRGAFHLPLGVVPFVYRKIYEAAKFRFGRRRRAVLPLPATMQVRGGLRNVAMGKRLLEKEAASRMGEWAEACTNGARAQRSPGAHEDKFAISSSEAGTEGLVTGSPGTQVRGSPAAYLVRAEERVSQSAR

SEQ ID NO: 699 - DNA, 972 bp, Homo sapiens
  source (1)..(972)
  CDS (201)..(592)
  CDS (640)..(772)
accgagccagaggcgcttcaggaagcaagagaagtccccgcgcgctccgggacccggcgcagctcatggtgagcgccctttggggctcgagggtcccttggctgagggggcgcatcctcggggtgcccgatggggctgcctgggggtcgcagggctgtagttgggatcgcgcacaaaccgactctgcggcccagcccgaaatgctgccgccaaggagcaacgacaccgcgtacccggggcagttagcgctataccagcagctggcgcaggggaatgccgtggggggctcggcgggggcaccgccactggggcccgtgcaggtggtcaccgcctgcctgctgaccctactcgtcatctggaccttgctgggcaacgtgctggtgtccgcagccatcgtgtggagccgccacctgcgcgccaagatgaccaacgtcttcatcgtgtctctacctgtgtcagacctcttcgtggcgctgctggtcatgtcctggaaggcagtcgccgaggtggccggttactggccctttgaagcgttctgcgacgtctgggtggccttcgacatcatgtgctccaccgcctccatcctgaacctgtgcgtcagcaggtcatcagcgtggcccgctactgggccatctccaggcccttccgctacgagcgcaagatgacccagcgcatggccttggtcatggtccgcccggcctggaccttgtccagcctcatctccttcattccggtccagctcaactggcacagggaccaggcggtctcttgagagctggactgcgagggggagatttctttagacaaaataacacctttcaccccaaatggattccattaaactgcattaagaaaccccctcatggatctgcataaccacacagacattgacaagcatgcacacacaagcaaatacatggctttccagtactgctccctttatcatgtgtttctgtgtagtagctggtgtgc

SEQ ID NO: 700 - protein, 174 aa, Homo sapiens
MLPPRSNDTAYPGQLALYQQLAQGNAVGGSAGAPPLGPVQVVTACLLTLLVIWTLLGNVLVSAAIVWSRHLRAKMTNVFIVSLPVSDLFVALLVMSWKAVAEVAGYWPFEAFCDVWVAFDIMCSTASILNLPFRYERKMTQRMALVMVRPAWTLSSLISFIPVQLNWHRDQAVS

SEQ ID NO: 701 - DNA, 3182 bp, Homo sapiens
  source (1)..(3182)
  CDS (201)..(366)
  CDS (2282)..(2982)
cctgcgatattgggagtcatatcatcctctctccctgtggatattaggaagagtatcacagggctgtgtaaaccccctgcggtactgggagtaatatcatcctctctccctctggatataaggaagattttcacaggggtgtgtacaccccctgcgatattgggagtgagatcaccctgtccacccaggaaatgactaacatggtcacggggaagtgtactccccctgcgatattgggagtaatgtcgtcctccccaaacctggatgttagcaacgagatcacagagggggtgtacacaccctgcgacattggaagtaatatgatcctctccccacctggatactgggaaagatatcacagcgcgggtatacgtttcctaccctgttgggagtaatatcattcttttcctttctggatattaggaagaatatcacaggggtgctgcacgattacttcgatattgggagtaatatcatcctctattttcctggatattgggcacaaaaacacaaaagggtgtacaaccccttcgatattgggagtaatagcatactctccttccgtggattttagaaaacaatatcatcagggctgaacaccccctgtgataatgggagtcatggttactctttcacaggccatttggaataatatcacagggggtgtttacaaataggggtggtgtacacctcctgtgatattgggagtaacatcattctctccacctccggatattaagaacaatatcccggcgggaggtggtacacccccagtgatattgcaaataatgtcatcctctccttccctggatattaggaacaatatcacagggggttgtacaccttctgtgatattggaagcaatatcatcctctcccccgctggatattaggaaaaaaaatcacccacggtgtacacccactgtgatatgaggagtaatatcttcccagggtattatgtataatttcacagtctgtacacacatggtgtacactcactgtgatattaggagtaatatctacctagtagataacaaataacatcgcagggtgtacacccactttgatattagctgtaatatttttctaagttgttacaaatatgatcacagggtgtaccaacatggtgtacacacactgtgatatcaggagtcgtatctctgtaatatattatgaataatatcacagggtgtacacccactgtattattagaagtaatatctctgtaggatattacaattaagatcacagggtgtagagccacggtgatattaggagcaatatctttctaggatattacaaataatatcacagggtgtacgcccactctactctcaggagcaatatctccctaggatatcaaaaatcctatcacagggtgtgcaatctctgccttccaggttctaagggattctcctgcttcagcctcccgagtagctaggattacccgctaccacgccaggctagacgggatttcaccacgttggccaggctggtctggaactcctgacctcaggtgatccatcagcctcggccacccaaagtgctgggattacaggtgtgagccatggtgctgggccaagagttctagattctattcatttggaaacacagctcccatctttgagtgtgcatgtacttttatgaagaaatgatgtcagaaaaccgaaggatgataataaatatgaaaagtaacaggcatgtgaaaaggtcttccgattgagaattataaggttcgatttcgttttcacataatggggtactacctcttgagtcgtccttttacatattctacatcaatggaagttgtagcaccgtgtcagaataaagtagagtgtatttcacggtttcttaatttctttcaattagactgagatctttttcttaaagagagaaggacattgtcattgcattgtattttttctgaaaagagtaggccgtattttactgagatcacggatttgttatatatgacgtttcggtcttctaatattctccagtggattttctctaaagtagtgtgtacagaaagccttgtatagcaaaaaagtaaatcatgtaataattctgagatttttggaattgtcacagctgagaaacattgctggcggtgtatggtccgcaagtgtcaagatgttccttgtgaattgcttgcatccagcattaagggctggtttttatcttttatttttccaatcctctttccttctcaaggtgtccaagacacacagagccacggaatctcacaggtgtctgagaattcctcctcctgggactctcagaggatccagaactgcagccggtcctcgctttgctgtccctgtccctgtccatgtatctggtcacagtgctgaggaacctgctcagcatcccggctgtcagctctgactcccacctccacacccccacgtacttcttcctctccatcctgtgctgggctgacatcggtttcacctcggccacggttcccaagatgattgtggacatgcagtggtatagcagagtcatctctcatgcgggctgcctgacacagatgtctttcttggtcctttttgcatgtatagaaggcatgctcctgactgtaatggcctatgactgctttgtaggcatctgtcgccctctgcactacccagtcatcgtgaatcctcatctctgtgtcttctttgttttggtgtcctttttccttagcctgttggattcccagctgcacagttggattgtgttacaattcaccatcatcaagaatgtggaaatctctaattttgtctgtgacccctctcaacttctcaaacttgcctcttatgacagcgtcatcaatagcatattcatatatttcgatagtacaatgtttggttttcttcctatttcagggatcctttcatcttactataaaattgtcccctccattctaaggatgtcatcgtcagatgggaagtataaaactttctccacctatggctctcacctagcatttgtttgctgattttatggaacaggcattgacatgtacctggcttcagctatgtcaccaacccccaggaatggtgtggtggtgtcagtgatgtaagctgtggtcacccccatgctgaaccttttcatctacagcctgagaaacagggacatacaaagtgccctgcggaggctgcgcagcagaacagtcgaatctcatgatctgttccatcc

SEQ ID NO: 702 - protein, 288 aa, Homo sapiens
MVTGKCTPPAILGVMSSSPNLDVSNEITEGVYTPCDIGSNMILSPPGYWERYHSAEDPELQPVLALLSLSLSMYLVTVLRNLLSIPAVSSDSHLHTPTYFFLSILCWADIGFTSATVPKMIVDMQWYSRVISHAGCLTQMSFLVLFACIEGMLLTVMAYDCFVGICRPLHYPVIVNPHLCVFFVLVSFFLSLLDSQLHSWIVLQFTIIKNVEISNFVCDPSQLLKLASYDSVINSIFIYFDSTMFGFLPISGILSSYYKIVPSILRMSSSDGKYKTFSTYGSHLAFVC

SEQ ID NO: 703 - DNA, 21184 bp, Homo sapiens
  source (1)..(21184)
  CDS (201)..(331)
  CDS (1655)..(1820)
  CDS (2754)..(2865)
  CDS (4735)..(4925)
  CDS (5210)..(5334)
  CDS (5708)..(6184)
  CDS (6302)..(6452)
  CDS (6834)..(6998)
  CDS (15320)..(15525)
  CDS (15990)..(16360)
  CDS (18142)..(18310)
  CDS (19517)..(19682)
  CDS (19727)..(20038)
  CDS (20874)..(20984)
ttggaaccttgggcacttctccagactggggaggagggagtgtttgttcagcccaggtatacatagcaccttctgtgccccaagccctgggccaggcaccaggtggcaaagctgccatcaaagagggaggtcacaagttagggtctggtttggtggatgtgtgctgtgtctgagggtggaatgaagctgaggtcagggccatggtcagggaagtttacctggaggaggagatgtccatcatgcaagctgaggcagccagggaagatggccaagtggatgttccaggggaggacccagcatatggagaggcaagcaaggcatgtgggagagggtgaggggaccctgggtgggaggggccggagaggcagcaggacccaaggcctgagagcctacctttgggttttcctctcttctgtagccatcgagggccacagtggtaccataagcagagcaggtgcctgaagggcctgtgcagccagatactggatcatagccagcaatgatccagatttttaaggtcttggatgtcaggagacataattgtccctgttcttttctaaatctcactgtactctcagctccttcccagccgcagccccaccttccctctgtaaggaaaacccactccactggagaagacccagagctccttgttgtaagaattggcctcgctagaggattccaggcccattatgtacatttcaggggaaataccctcaaatcaaggggtgccttcctggagtcagacctctgctgcatgcgtctccgtctttccccgtaggagcagtcagggctatgcctgtgggggctgagcacctgtactcatcctttccagcaagttctgtttgagtcaacagcttgatagaacctctaccctgagccttaccctgtgccatcccctggggacctggaaatggctcctgacagtccctgactttgaggagtcatgctggagacacagaaggaaactctccacagaactgctgaagtggacggggctgcactgcagacggcgggagcaggaacactgggagagatgcgggaggaagggcaggagggcctgggggcagccaacatcggaggtgacctgagaggagagcacaaaggctcgtcagcctctggctgaggagcttcaagggggccccagagcacaggctgccgctcagaaactgcccaccaggccctcggggaagggtgtgcagacagagtggggtacacccaggggcctcagagcagggttgagggtggctccccagggagtctggaccaggccccacctggcagggtgagagcagagtgccctttgtgccaggcatcctaggagggcctggctggcaggtttggtgaggcaggaagagccattttggcctagtcagggtataagatgagccatcagcaggcccagagatgctaagcaaggttaaagtattaatggaaactacgctgtttttatctttggaaaaattcctgggccttgccatccgagaagtacactcacctctcacaagcgcacagagccttcctcacggtctttcctctgccttcccggcaccagcacaagctgtgttccagcctggggctcactccaaggacaggcagtgccagctcctgggcctggtgttgcccctgctgtccttaaccctgttcacggcaggaaaatactcttcaccttggccaagcagagcaaggccctcggtgcctacaggctggcccggcacgcctatgacaagctgcgtggcctgtacatccctgccagattccaaaagtccattgagctgggtaccctgaccatccgcgccaagcccttccacgacagtgaggtgaggatgcagcacccttgggcaggtggcttctcctctcccttgaggccatctcatgccttcttgcctggcctgggttccgtttgaagagagacagctgcagctccctctaggctctgtgccccctgctcaagcctggccatgccagctcccctgtgcttccctgtccacctcctgttctccccgcagtccacctggcgcccgctcacagcccccggccccggcctcagccctcagcctggcctcccttgctccttgccctcccctaggcaagccccacacctctgtgcccaggtggctctgcctttaccccaggcctggccccagagctgactcttactctagaaacctctgccctttctggaaccaggctgtagttctccagcaaatctaccccacactcccaacccacattccttcaacccagccagcttccttctttcacacatcctccctcaagctcagagcaaggacttggttcagacagacctgggttcacatcccggctccaccctctcctagctctgtctccatctttctgcaccttgggttccccctttcccacaggtagttgtgaggctaaatgagccagtatagtccacgtgctccgcacggtgcccggagcatggtaaatggctggctaatggtggcagcggccactgtcattcctgccaggggaaaagtgccgttgagcgctgcctgtgcaggtgtcttgggcacggggacccaagtgacagggcttgggtatttcggcaggcctttatcctgcttccccatggcatggagctcctgggcccggcgccccttccctgcctgcccacccgggtggcctttcctcttggcagccaggccccaggggcctgaagccagagtccagggggaggaggacacgtgcctgccccggcccctcgggagtccgtggctgttttgtaggagttggtgcccttgtgctaccgctgctccaccaacaacccgctgctcaacaacctgggcaacgtctgcatcaactgccgccagcccttcatcttctccgcctcttcctacggtgagtccctgcatcctgagcatgtgggtgggacagcctgtggacagccaggctcactccactgctctctggcctcaggacgttgggcaagggccaaaggcctctgaatgtccctgtttatgaaatgaggacactctgacgcccacctacctgacacaaggagtcactgtcggtgttcccagagataggacccactgctgcccaaagctgaagcacccactctgggaacctggcgcagggctttacataaccaaatgccccagaaagagagtccgatggctttgcattcagaccaggaggctgagataggttatcaaggcccagctcctttgatgttgacagaggatcagaagccccttcccaggagctgagcagaggccacacacacacacagacacacacgcacacacagactgcccctgcacacacacacatacagaaactgcccctgcacacacacacacagactgtccctgaacacacacacagactgctcctgcacacacacacacagactgcccctgcacacacagagactgcccctgcacacacacacagagaccgcccctgcacacacacacacagaaaccgcccctgcacacacacggagactgcctctgcacacacacacagactgcccctgcgtgcacacacagactgcccctacacacacacagattgctcctgcacacacacacacacacacacagagactgcccctgcacacacacagagactgcccctgcacacacacacagagactgcccctgcacacacacacagagactgctcctgcacacacatacagagactgcccctgcacacacacacagactgcccctgcccacacacacagagaccgcccctgcacacacacatggagactgcccctgcacacacacatggagactgcccctgcgtgcacacacagagactgcccctgcacacacacagattgctcctgcacacacacacacacagagagactgcccctgcacacacacagagactgcccctgcacacacacacacacacggagactgcccctacacacacacacagaaactgcccctgcacacacacagattgctcctgcacacacacacacacacacacacacacacagagagactgcccctgcacacacacacacagactgcccctgcacacagacacacagagaccgctcctgcacacacacagagactgcccctgcacacacacacagagactgcccctgcacacacacacacacagaggctgcccctgcacacacacagaccgctcctgcacacagacacacagagaccgctcctgcacacacacggagactgcccctgcacacacacagagactgcccctacacacacacacacagactgcccctgcacacacacacacacagaaactgcccctgcacacacacagattgctcctgcacacacacacacacacacacagactgcccctgcacacacacacagagactgcccctgcacacagacacacagagaccgctcctgcacacacacatggagactgcccctgcacacacacggagactgcctctgcacacacacagagactgcccctacacacacacacagactgcccctgcacacacacacacacagaaactgcccctgcacacacacacattgctcctgcacacacacacacacacacacacacacacacacacagagactgctcctgcacacacatacagagactgcccctgctgcctcttcttgcttttggtgaagctgccagtgggttgagaagcaactctgtggtcaccccacctgcctggcggcaagtcctttgcaaggcctccagccccctcagccctttctctatgccctccagacgtgctacacctggttgagttctacctggaggaagggatcactgatgaagaagccatctccctcatcgacctggaggtgctgagacccaagcgggatgacagacagctagagattgcaaacaacagtatccatgcccttggccagagcctgtgtgtgcggctgtgtgaggggtctggggacaggcgggaagtaggagggcccagtcccaggggatcgcgggccatgctgagcctggccctgtgttcccagagagattggagaggcccacatgggacagggacagggatcagagatgggcagacagctggccagggcctaaggacccagaagtggcaagtggcaccttggtcttcccgtgtgggtctcccaccctcccctgacccctaaaaggcactggctgtgcctctgtctgtgcatagctcctgcatagccaacatgggacatgatgtcatgatgtcggtgttggcccccagctcttccactcaagtcactttcgcatgcaagtgacagagtccaaaactgacaagctgaacaagcaaagggtgtgcaaggaagccccaagcaggagaggaagcttcctggcccagcgctcagtctggtcggtcacaggctggctctgcctctcttggccgcactgtcctctgggcaacttcattctttggcagccccgtggtgcccccataacacagagatgtcaggagcagtgccagccccacatcccctcagccttatagcccccagaaacagccagctttcctctcagctgtggcagtgaaagccccggggcacagctcagcctgccccttggccaggaggatgcaccagggcagttgtccagggcaggccacacttgcaggctggacatgggaggggcttctggcagggaacagcacacacgtggcctgaggcctcgctcccttgcactgactgagtctgcaggcctgggggctgtaagcctgccttccttgcagctcccaggtgctgccacccccaggggccacactgggaggagggaagctcagagagctgcttgctgaaggaaagacggacccatctctgccacccaggctccctcaggtgccacagatgatatgtgctatggtgctggcaggtgggtgctgtgcccactccaacttggtaccagcagtccccatgtcctgggcctccctgcaggacccctgctggcctctgttaccagccccaccactgtgggagaggggcggtttccagggacctccaggtgagtctgacccgccctggggtcagcagggactctcgcccctgtctgctccatcacaagtgcccgcagacccccagcagccactgaatgtttctccaggatccctgggcccatcccctccgtgcctacccgcagtggctcacagggcccgcatgtgcttcccactggccctgggagctatggtgtgtgtggcctgcgaggggaatgggtgagggcagcagggccagcagagtcccttccttctgattccttggcctgagccccctctgttcctccacctggaaaactcttccactggtctggctgcccttgagtcttctcacaggggtgtagggtggaggctagggtctgtctccatctctgcttctgattccatccttgaccagatccctccaggctcccagattctgcggctagtggagaccaaggactccatcggagatgaggacccgttcacagctaagctgagctttgaggtgagggtgcctctctgggtgacctgcaggagggcagcctccatcccttctcctgtgcacatggggaccctcagctagcgcagtggtggaggaggattggccagaacttccagatgtggtggcacgaaggaggggcaggaccccttcctgtggggtgtgggagccatggctgcccccgagggaccatggccaagggcgcaggtctgtggacagggaggcagcttcagctctggtgggaggagcttgccactgttagggtcacctgggtttaggaagcaggtcctctctcaccactgccaaagattccaggatcataatccacacagatgtctcactgtggctgagtgaggacactgtgcctccttcccgcccaccctgcagcaaggtggctcagagttcgtgccagtggtggtgagccggctggtgctgcgctccatgagccgccgggatgtcctcatcaagcgatggcccccacccctgaggtggcaatacttccgctcactgctgcctgacgcctccattaccatgtgcccctcctgcttccaggtaggtggccaccctggtagctcacatgtgcttctcttggccacttttcccttgcccaaatgtccctctgggaggcgtggcccctgggaggaggggcacatccatggctccaagttgggacagaggcttgtctgtcctctcccctgcttgcattccatgtgcatctaaagtggacttcactggcccctgcgctgtccacatcctccccaaatcctgggggcccagcaagcgtgatgtgcccttgaccttcactcagaaaacaagaaaccccacagccccctcccatctccccttccagccctcaaacaaaggtgctgcaggtctgtgtccagccctgaccactgccaagccccctccccttgagaggcagtgcgtcctggccccaggcgtagggctgatgagcactagggcttcagcctggtcttacagctgtcttcccttagatgttccattctgaggactatgagttgctggtgcttcagcatggctgctgcccctactgccgcaggtgcaaggatgaccctggcccatgaccagcatcctggggacggcctgcaccctctgcccgccttggggtctgctgggctgtgaaggagaataaagagttaaactgtcagaatgtgtttcttgcccagatgaagtttgtgttttgtggggggggccttgtgtaaccacggaattcctatttatggcatttcatgccttgtaaatagcaccaggagatgaggaagagaatgtacatatattttctaaggaaaaaaatctgttactttcagaacggctccgagttgttcgtggcagcctgctggagtccgccgatctgtcagaccgttagcatgtacattttgccaacagattgcctcaataatgacaaaagggctccttattttcatcagcatctacattttagcaaatcatcttattgtctgcaacttaatttccgtatgcaaaagtgcacctgtttctaatttgaaaggaacattacatttgtgtgctcttaacatttaatcaaaatggcaatatagaaaggggtgggggagcagggggtttttttgtttatttattttgatttaatggggatccatcttgacaagagaaaatacgtgggtccaaagaagatggcaggagtttaaaaaaaggctcctgtttggtagcccagtcaaggctcctgtccaggctctggagccgccctcttccatccaccttccccagccccacagagcagccccagcccaatggagactcttccctttggaacagctccttaagcagggggtttccgtttgagattccagactgccaaggtctgttccctcaggcatcactggtgtccagtccaacagcttgagggcatggaaggaacagcacacagaagctaaggagaactcacatgtatgggggacgtttttggcaccagccacgttccatgctgtctcaggcctctcagcagccctgtgaaggaagagttatgatttccagtggggctgggaagggggttgccagggcccaggggctgcctccagccctgggaggggcggcccatgatgtgtccagccccaaggccctgcccctttcacccccagtccacctgccagaggtggcaatgcagcacttcatgaaaagcccaagaacagctggcacaggcaggagagagggtgtgggctgtcatgccatgccgaaacgcaccctcccctcgtgctgcagtattgattccttacaacctacctgtgcaggggtcagggcagggcaaatatgcccactggagggacgcagacactgagaccccaaggagagtggctgcagaggcccccagtgggaagtgtcggagctagagccccatcccagagcccttgccccaccccagaccgcccctcctccctgcctccctccgcatctctctggagatgatggaggaaaataaagaaagggagccagacagttgtgccaacagaactcctccgtcgagtgtctaattacttaccatcatgcatgcgctctctcactaaacatttattaatgtgttaggatttccattagcgcatgacttcaactgaaatcatttgcatatggctgggaaaaaggggagagggagaaaacagctccagctacccagcagtcaatcacagtgacagatcagatggtccctggctggaggcaggggagggttccagccgagactccagcatgcatcccctcagccgaagaacacaaaaatgagtgtgctgtgccgggctctgctgccccaggaagctcagctctagaggcctgagtaggacccctattcattcagatgcactttccgtgcatcatccaaggctgcctattacacaggtgatgacactgagcctcagtcatgttatttttcattcagcaaatatgcattaagccaaggcatatttggtcgcacctgggtgcaacctttgtgcataagccctgtgtctggctgcttttctctctcagcctgatctgggtctgaaccaagtccagtcttttctccaaggctgtttccccatctgcacaaaagggccccctccagctctgactctgaggttccagcctcagtctgcgtctgtgaacagcgctggatgatgatcctgttgacccctcaagtgcctgtgacaaggaaggcaccacagggacctggtgatgcccattgaactaagaggacactgaggccagagaggagcagctgctgaaggctgcacggtggggcagtgattctggcctttagcctgtagtcccaactactcaggaggctgaggtggaaggatcaattgagccaaggacaggaattcaaggctgcagtaagctatgattgcaccactgcactccagcctgggcaacagagcaacattcatctctaaacaacatttaaaaattgttttaagaagacaaatgagataactgttgatcgtaatggctgtgtaaaaactgaacatggctgggtgtggtcgctcacacctgtaatctcagcactttgggaggccaaggcaggaggatcgcttgagccgggagttagagaccagctcagacaatatagggagaccccatctgactgggactggtcctgatctctcatctccaagtgctcaacattgtgcccatgttcttggaaggaggaagtaagggagaggtagactgagcagcctcaggtggacctgactggagacgcacctcaggcagctggaggtccccgggccttggtttcccatctgtccccagcaaggctgtgaagctaggagcccctggtggctgtcacacaggtgggcagaggcccctcctccaaggtcgctctgtgtctcttccctggcttggagtctgtgtgcccacagcagaggccaccactgggcagggtgcttaccccgagcctccctgattctccccctgcagatccagaacactggcctggtatggagacctcgtcatggccctccctgcttgccacccgcagtagctgcccatgcaattcagccaacacccagacccctaggcctgccctctatccccagcacgccaccctggggggcccagcacctccaggcccagctggccctccctacctgccctgcttgggagactcttttgaccctcctggtccaccttttgctcctctgggctcccacagcactgggactgggagaaaatgctcatctctcatgtttagtttccgatcagtaccccctgagactgggagccccttgaaagcaggaaccatgtgggatccacctcagcgtccccagggcctggcgcatataaggagtttggcaaatgctagggtagaaaagagaaagaggaaggagggaatgagagctggtctttctccctcccttattcccccttgatgctctcagtaccgctgaaggcctcatgtagccttggtgacgcagcctggtggggctgagccatgtgggggaccaggagaaagaaagccaaggaagaggaggaggaggaggagaaggaggagaaggatgctgacctagcagctcctctcacagcagctcctctcttgcagaggctgaagagcgatttgtgccctgcaagctaagcccctaatccaccgaggcaaaggcaaagcccctagccgggctcccgagggctgggactcgggtgccccaagatggctgcatccagccatcttggcttagaaagccccccacatgccagcttggccaacacccacaccatgggtttctctggactgcccgacacaaggtgtgggtgctggccaggcctgtgttcaaatcccagctctgcagaggaactttgaccctgcataccccagattcctcagtggtcagtggggagttagaccctcttcatagggggcaggaggagttgttcattcattcaacaaatgtttattgaacacctcctatgggttgtgagctcagaggcagcgatgaacaggccaggctggtcctgcattctagaaatagatgggaagtcagtcaataagtagacaaatgaggccaggtgtggtggcatgcctgtagacccagttactcgggatgctgaggtaggaggatcacttgagcctaggacaggaattcaaggctgcagtaagctatgattgcgccactgcactccagcctgggcaacagagcaagactcatctctaaaaaacatttaaaaattgttttaagaagacaaatgagatagtcgctgatggtaatgactgtgtaaaaactgaacatggctgggtgtggttgctcacacctataatctcagcactttgggaggctgagattacagcctcccaagtggctcccaaggcaggaggatcacttgagcctgggagttagagaacagcttggacaatatagggagagcccaactctacaaaaatgaaaataaattagccaggcatggtggcacacaccaatggtcccagctactcaggggttgaggtggtggaccgcttgagcccaggaggttgaggctgcagtgagccatgatcatgccgctgcactccaacctgagtcacagagtgataccctgtctcaaaaaacaataggccaggtgtggtggctcacgcctgtaaccccagcactttgggaggccgaggcggatggatcacttgagatcaggagttagagaccagcctggctaacatggcaaaatcctgtctgtactaaaaatataaaaattagccaggcatggcagtacatgcctgtagtcctggttacttgggaggctaaggcaggagaatcgcttgaacccaggaagaggaggttgcagtgagccaagatcacaccactgcactccagcttgggtgacagagtgagaccctgtctcaaaacagctaaacctggtgggggtgcctggtgtgtaggatggtcaggggtggtctctccaaggacatgagtgtgagcggagacctgaaggagactcaggaagagattaatactgtcagcaacaaatatattgatcacttacaagcactcccaataatcctattaggtaggcactattatcattcccattttacagagtggagaaccgaagcacactctcgggagggcggggtagctggctgcacccaggctgtgtagcctcagtccagatgtaagggtgggtggaaaagagccttgcccaatgagggagaacagtgaaaccaaggccatagggtctaaagattcacgaaccaggctctcatggagaaagcaggtgaggtttactgtatagatgggtgtgcccctaccccacactgaggcttcctcgtctgagcaaactgaggcccagagaggggaaggaagcaggactaccatggtgactcaaagaccagctagaatccagcctcctctcctcgaggcttccactgccccacgccaggcctgtgtgactcagtctagggcctttccattaccccagctaaacctttctttagtcatttataccatggtgtgaatggctggctggtctttcctgagagctatctttgatgaggggagggaggcatagccaggtttgggaagatgataccccaggaagcccagttgactgtgtgggttatagcccaggctgtcactgatttgtaacgggacctgagcaactctgcagagctaggcctcagtcttttcatctgcaaaatggatatagcagagatggtcagagtaggtgacttcgaatgacccttccagctcactatgagtctgttttcctgaacaaagagcattttttgtttaaaaaaaaatttcttgggccggacacggtggttcactcctataatcctggcactttgggaggccgaggagggtggatcgcttgagccaggagttcaggaccagcctgggcaacatagcgagactccacccctacaaaaaatacaaaaactagtggtgtgcacttgtggtcccagctactcaggaggctgaggtgagaggatcgcttgagcccaggaggcagaggctacagtgagctatgattgtggcactgcactccagcctgggcgacagagaccttgtctcaaaactttttttttcttcgtcaagctttacagaataaagagcactgtcacctcagtgatggctgttagttccccatcaccagggctccatgaggttgcaattgtgaaactcacaaaggaggaacctgagacagagaggggaagtactgagatcatctaggtccattcccccactcactcgttcattcaacaaatattcaggagcaccttctaggtgccaggccctggagacacatcagtgaacaaaacagacatcatcccacctctttccactacaggccaagcaccatgctggtctctgggaaccctgttgtgagcaagacagacccaggcttacccttgtggactcatgttacaggcagggagacgggcacaaaacacaaataaaaagcttccatgctgtcagaagcactatgcaaaaagcaagatgctgaggtactgctaagctgtgtgggatgggggctcagcccggccagggaggggccagttgtgggtcagtcttgacccaaggcatccaggacaccctccttctggccatgagggtccacgtcagaatcaaaccctcaccttaacctcattagcgttgggcataatcaccaggccaagcgccttaaactacgagaggccccatcccacccgccctgccttagccctgccacgtgtgccaaacgctgttagacccaacaccacccaggccaggtagggggctggagcccaggtgggctgcagggaagggggcactcttctgagcagacagatctgggaatcctgggtgggaagagagacagtgagagagagattaagggatatttcccaggcatcagggctttgcactctcaggggtccttccgcctggatgtccttcccctgaagcttcctcctgttgttccgttctcagctcaagctccagcttctcagagaagcctcctgtgttgggagtggctgcgactgaactgtccctactgttattcgctcttctatttgtttgtggtccctgtgccccctcaccccacaaaaacactggcttcttgtgagcaggagcttgctctttcgtgtaccctgtgtgtccccaaggaccaagcaccttgtctgggccacagtaggtgctcaatacacatgttggctggacagtggtcactgagcggccgcacgtcgggcactctcagcacttgcacaggccgccccagacaccccacttcattcctgggaggtgtcatcatgttgcttggacgacggggagagggggacctgccagtgttggcctccattttcccccagtcatctgcccccaaggctctgactactttctttctcacggtacatcctgctattctggaatcggccctcgtggggccacctggtacatggcatttgaggccctcgtggctgattaggcctcccccaacagtgccctgtctgctgcctccagggccagcctccccttcagactggagtcccctgaagggttctgcccctcccctgctctggtagccccctccatcctccctccctccactccatctttgggggcatttgagtcacctttctacaccagtgatctgcccaagccactgctcactttcctctggataaagccaggttccccggcctagcgttcaagacccattacaactgcccccagcccagatcttccccacctagccacctggcaaactgctccttctctcaaaggcccaaacatggcctcccagactgcaacccccaggcagtcaggccctgtctccacaacctcacagccaccctggacggaatctgcttcttcccacatttgagtcctcctcagcccctgagctcctctgggcagggctgtttctttccatctttgtattcccaggggcctgcaaataaatgtttaatgaacgaacaagagagtgaattccaattccatgcaacaaggattgggctcctgggccctaggctatgtgtctggcaccagaaacggaagctgcaggttgcagcccctgccctcatggagctcctcctgtcagaggagtgtggggactggatgactccagaggtaacttgtgggggaacgaacaggtaaggggctgtgtgacgagatgagagactgggagaataaaccagaaagtctctagctgtccagaggacatagcacagaggcccatggtccctatttcaaacccaggccaccagactgagctgggaccttgggacagacaagtcatgcagaagttaggggaccttctcctcccttttcctggatcctgagtacctctcctccctgacctcaggcttcctcctagtgtcaccttggcccctcttagaagccaattaggccctcagtttctgcagcggggattaatatgattatgaacacccccaatctcccagatgctgattcagccaggagcttaggagggggaggtcactttataagggtctgggggggtcagaacccagagtcatccagctggagccctgagtggctgagctcaggccttcgcagcattcttgggtgggagcagccacgggtcagccacaagggccacagccatgaatggcacagaaggccctaacttctacgtgcccttctccaatgcgacgggtgtggtacgcagccccttcgagtacccacagtactacctggctgagccatggcagttctccatgctggccgcctacatgtttctgctgatcgtgctgggcttccccatcaacttcctcacgctctacgtcaccgtccagcacaagaagctgcgcacgcctctcaactacatcctgctcaacctagccgtggctgacctcttcatggtcctaggtggcttcaccagcaccctctacacctctctgcatggatacttcgtcttcgggcccacaggatgcaatttggagggcttctttgccaccctgggcggtatgagccgggtgtgggtggggtgtgcaggagcccgggagcatggaggggtctgggagagtcccgggcttggcggtggtggctgagaggccttctcccttctcctgtcctgtcaatgttatccaaagccctcatatattcagtcaacaaacaccattcatggtgatagccgggctgctgtttgtgcagggctggcactgaacactgccttgatcttatttggagcaatatgcgcttgtctaatttcacagcaagaaaactgagctgaggctcaaagaagtcaagcgccctgctggggcgtcacacagggacgggtgcagagttgagttggaagcccgcatctatctcgggccatgtttgcagcaccaagcctctgtttcccttggagcagctgtgctgagtcagacccaggctgggcactgagggagagctgggcaagccagacccctcctctctgggggcccaagctcagggtgggaagtggattttccattctccagtcattgggtcttccctgtgctgggcaatgggctcggtcccctctggcatcctctgcctcccctctcagcccctgtcctcaggtgcccctccagcctccctgccgcgttccaagtctcctggtgttgagaaccgcaagcagccgctctgaagcagttcctttttgctttagaataatgtcttgcatttaacaggaaaacagatggggtgctgcagggataacagatcccacttaacagagaggaaaactgaggcagggagaggggaagagactcatttagggatgtggccaggcagcaacaagagcctaggtctcctggctgtgatccaggaatatctctgctgagatgcaggaggagacgctagaagcagccattgcaaagctgggtgacggggagagcttaccgccagccacaagcgtctctctgccagccttgccctgtctcccccatgtccaggctgctgcctcggtcccattctcagggaatctctggccattgttgggtgtttgttgcattcaataatcacagatcactcagttctggccagaaggtgggtgtgccacttacgggtggttgttctctgcagggtcagtcccagtttacaaatattgtccctttcactgttaggaatgtcccagtttggttgattaactatatggccactctccctatggaacttcatggggtggtgagcaggacagatgtctgaattccatcatttccttcttcttcctctgggcaaaacattgcacattgcttcatggctcctaggagaggcccccacatgtccgggttatttcatttcccgagaagggagagggaggaaggactgccaattctgggtttccaccacctctgcattccttcccaacaaggaactctgccccacattaggatgcattcttctgctaaacacacacacacacacacacacacacaacacacacacacacacacacacacacacacacacaaaactccctaccgggttcccagttcaatcctgaccccctgatctgattcgtgtcccttatgggcccagagcgctaagcaaataacttcccccattccctggaatttctttgcccagctctcctcagcgtgtggtccctctgccccttccccctcctcccagcaccaagctctctccttccccaaggcctcctcaaatccctctcccactcctggttgccttcctagctaccctctccctgtctaggggggagtgcaccctccttaggcagtggggtctgtgctgaccgcctgctgactgccttgcaggtgaaattgccctgtggtccttggtggtcctggccatcgagcggtacgtggtggtgtgtaagcccatgagcaacttccgcttcggggagaaccatgccatcatgggcgttgccttcacctgggtcatggcgctggcctgcgccgcacccccactcgccggctggtccaggtaatggcactgagcagaagggaagaagctccgggggctctttgtagggtcctccagtcaggactcaaacccagtagtgtctggttccaggcactgaccttgtatgtctcctggcccaaatgcccactcagggtaggggtgtagggcagaagaagaaacagactctaatgttgctacaagggctggtcccatctcctgagccccatgtcaaacagaatccaagacatcccaacccttcaccttggctgtgcccctaatcctcaactaagctaggcgcaaattccaatcctctttggtctagtaccccgggggcagccccctctaaccttgggcctcagcagcaggggaggccacaccttcctagtgcaggtggccatattgtggccccttggaactgggtcccactcagcctctaggcgattgtctcctaatggggctgagatgagacacagtggggacagtggtttggacaataggactggtgactctggtccccagaggcctcatgtccctctgtctccagaaaattcccactctcacttccctttcctcctcagtcttgctagggtccatttcttaccccttgctgaatttgagcccaccccctggactttttccccatcttctccaatctggcctagttctatcctctggaagcagagccgctggacgctctgggtttcctgaggcccgtccactgtcaccaatatcaggaaccattgccacgtcctaatgacgtgcgctggaagcctctagtttccagaagctgcacaaagatcccttagatactctgtgtgtccatctttggcctggaaaatactctcaccctggggctaggaagacctcggtttgtacaaacttcctcaaatgcagagcctgagggctctccccacctcctcaccaaccctctgcgtggcatagccctagcctcagcgggcagtggatgctggggctgggcatgcagggagaggctgggtggtgtcatctggtaacgcagccaccaaacaatgaagcgacactgattccacaaggtgcatctgcatccccatctgatccattccatcctgtcacccagccatgcagacgtttatgatccccttttccagggagggaatgtgaagccccagaaagggccagcgctcggcagccaccttggctgttcccaagtccctcacaggcagggtctccctacctgcctgtcctcaggtacatccccgagggcctgcagtgctcgtgtggaatcgactactacacgctcaagccggaggtcaacaacgagtcttttgtcatctacatgttcgtggtccacttcaccatccccatgattatcatctttttctgctatgggcagctcgtcttcaccgtcaaggaggtacgggccggggggtgggcggcctcacggctctgagggtccagcccccagcatgcatctgcggctcctgctccctggaggagccatggtctggacccgggtcccgtgtcctgcaggccgctgcccagcagcaggagtcagccaccacacagaaggcagagaaggaggtcacccgcatggtcatcatcatggtcatcgctttcctgatctgctgggtgccctacgccagcgtggcattctacatcttcacccaccagggctccaacttcggtcccatcttcatgaccatcccagcgttctttgccaagagcgccgccatctacaaccctgtcatctatatcatgatgaacaagcaggtgcctactgcgggtgggagggccccagtgccccaggccacaggcgctgcctgccaaggacaagctacttcccagggcaggggagggggctccatcagggttactggcagcagtcttgggtcagcagtcccaatggggagtgtgtgagaaatgcagattcctggccccactcagaactgctgaatctcagggtgggcccaggaacctgcatttccagcaagccctccacaggtggctcagatgctcactcaggtgggagaagctccagtcagctagttctggaagcccaatgtcaaagtcagaaggacccaagtcgggaatgggatgggccagtctccataaagctgaataaggagctaaaaagtcttattctgaggggtaaaggggtaaagggttcctcggagaggtacctccgaggggtaaacagttgggtaaacagtctctgaagtcagctctgccattttctagctgtatggccctgggcaagtcaatttccttctctgtgctttggtttcctcatccatagaaaggtagaaagggcaaaacaccaaactcttggattacaagagataatttacagaacacccttggcacacagagggcaccatgaaatgtcacgggtgacacagcccccttgtgctcagtccctggcatctctaggggtgaggagcgtctgcctagcaggttccctccaggaagctggatttgagtggatggggcgctggaatcgtgaggggcagaagcaggcaaagggtcggggcgaacctcactaacgtgccagttccaagcacactgtgggcagccctggccctgactcaagcctcttgccttccagttccggaactgcatgctcaccaccatctgctgcggcaagaacccactgggtgacgatgaggcctctgctaccgtgtccaagacggagacgagccaggtggccccggcctaagacctgcctaggactctgtggccgactataggcgtctcccatcccctacaccttcccccagccacagccatcccaccaggagcagcgcctgtgcagaatgaacgaagtcacataggctccttaattttttttttttttttaagaaataattaatgaggctcctcactcacctgggacagcctgagaagggacatccacca

SEQ ID NO: 704 - protein, 950 aa, Homo sapiens
MVREVYLEEEMSIMQAEAAREDGQVDVPGEDPAYGEASKACGRGKILFTLAKQSKALGAYRLARHAYDKLRGLYIPARFQKSIELGTLTIRAKPFHDSEELVPLCYRCSTNNPLLNNLGNVCINCRQPFIFSASSYDVLHLVEFYLEEGITDEEAISLIDLEVLRPKRDDRQLEIANNSIHALGQSLCVRLCEGSGDRRELFHSSHFRMQVTESKTDKLNKQRVCKEAPSRRGSFLAQRSVCSQVLPPPGATLGGGKLRELLAEGKTDPSLPPRLPQVPQMICAMVLAGGCCAHSNLVPAVPMSWASLQDPCWPLLPAPPLWERGGFQGPPGESDPPWGQQGLSPLSAPSQVPADPQQPLNVSPGSLGPSPPCLPAVAHRARMCFPLALGAMVCVACEGNGGVGWRLGSVSISASDSILDQIPPGSQILRLVETKDSIGDEDPFTAKLSFEQGGSEFVPVVVSRLVLRSMSRRDVLIKRWPPPLRWQYFRSLLPDASITMCPSCFQGPANKCLMNEQESEFQFHATRIGLLGPRLCVWHQKRKLQVAAPALMELLLSEECGDWMTPEVTCGGTNRATAMNGTEGPNFYVPFSNATGVVRSPFEYPQYYLAEPWQFSMLAAYMFLLIVLGFPINFLTLYVTVQHKKLRTPLNYILLNLAVADLFMVLGGFTSTLYTSLHGYFVFGPTGCNLEGFFATLGGEIALWSLVVLAIERYVVVCKPMSNFRFGENHAIMGVAFTWVMALACAAPPLAGWSRYIPEGLQCSCGIDYYTLKPEVNNESFVIYMFVVHFTIPMIIIFFCYGQLVFTVKEPPACICGSCSLEEPWSGPGSRVLQAAAQQQESATTQKAEKEVTRMVIIMVIAFLICWVPYASVAFYIFTHQGSNFGPIFMTIPAFFAKSAAIYNPVIYIMMNKQFRNCMLTTICCGKNPLGDDEASATVSKTETSQVAPA

SEQ ID NO: 705 - DNA, 14576 bp, Homo sapiens
  source (1)..(14576)
  CDS (201)..(341)
  CDS (1646)..(1737)
  CDS (4378)..(4507)
  CDS (4746)..(4787)
  CDS (5493)..(5637)
  CDS (5745)..(5880)
  CDS (14268)..(14376)
gaggatctaaaattagggaaaatgggaaaaccaatgagtacatttttaaggggataatgcaaaacaacaaagagattaagttggctgcactgcaactgtgtttgtccccccagacacgagtgtgggcagtcaaggacccttgacagccccagtgaaccccgtcttttctcctccccctgcaggtgggctgtaaggcagccatggtctttttccaatattgtgtcatggctaacttcttctggctgctggtggagggcctctacctgtacaccctgcttgccgtctccttcttctctgagcggaagtacttctgggggtacatactcatcggctggggtatggtaccagggagggcttccaggctggggacagagggggcaaggcctggagaactccctagggggagggtgccaacccagcttgcagtcctacgtcttgcttagctgcaggtcctgcctgcaaggatatcagccaagggtcaagaaagtcctcaaaatgtctgatcccaggacaagtccctcaggttgcagctgcacctagggctgacctgtgggacagattttgtgaacatctttccatttccctttagttcccgaaatacacagggccactgctaatctataaagggcctctgtcacaattagaaagagaatgtccgtctaggtagacacagcccttcaggcatacagcttcaccccctcagtggagcatccctccgtggtgaacaacctatgcaaccaaagacagcagactgacaacccacccttttctctctccctccctctccctgcttttctccaaaatctctccctcatgccctctacccctgcttcctgtgccctctctgctctttcactctccctgggcctgacaggggtacccagcacattcaccatggtgtggaccatcgccaggatccattttgaggattatgggtgagctgctgccccacacactcccccggccgccatcacttgggcaggccccctgggtgggatgataatgccatctggccttggtgagtggacaaaaaccacagctctcgggccagaggggaggctggaggaggacctggggagcaacagactctgggcccggggttgctaaagtgctcaggagcagagctggggacaactgggggaggtgctgctgagtctctctctggctgaggacaatccctctcattcctccccacggtctgctcaggtgctgggacaccatcaactcctcactgtggtggatcataaagggccccatcctcacctccatcttggtaagataccctcccaccacctagagatggggaaacaggcccaaagggcaggcaacttagcccaaggtcacatgggaaattagtatctaggtcagaactgaaacgtagcttcctaatgcccaatgcaggatcatccccacccctgtcctaccagttcttccttgagcgtaagcggattgggagcacagtccttagggatttgaaggaggtagagttcccggatgacctgcccaaaggggaaatgccagaggagaggtaagatagagagaggggcagcaggaccctgggaaagaagacaggccagcagtcaaggggcctgaacacctcagccttcccgctctgactgcccgaactcgggtccccacccactaggtaaacttcatcctgtttatttgcatcatccgaatcctgcttcagaaactgcggcccccagatatcaggaagagtgacagcagtccatactcgtgagtgtgggcctagtgcctcagcccccagtacctccatccccagtcctcaaatcatcccacatctccttgaagtcctcccaccccaaacatccagagtcaccaaagagccacattgttctttcccacctccaccatggcctggctcagcccaccaccatcccctgctccagccccaccctcaccaggctgcactcagagccctgcatgcttctcctgcccacactcacctagcatccttcccaggtatgcatctgctgccaagccagggagctcaagaggacaccgatgacctgtgtcttgttcataccatgtgcccagtccctggcatgtgcctcacatggaaaaagggtgcaataaacacatagtagatgaatgccctgggggagaccccagtccaccaatgagacagccatgttcgggactcagtattcctcagtaataatgatgacacctgcagtttacatgccaggcacacgctaagggatttccatgcatcatgtcatttcatccacacagtcccctgcaaaattatctttactttacagggaggaaatgacatacactcccttctccttgagggttttggagcaggtcaccatgggcagggagaagggggcacaatgtccatggaccagggcttggaaaggtgtcaggactgttccccctgcttgggaggactggaggaagaggcaggtttttttgcgggagcaacaaggcttgaagacagagctaaagaaacatgaaaaatatgaaaagggaggctgtgggaaggcaagtagggtctgcatgctcacagatgggagtaggagattgagtatcagtgctattgacacaagacaaacctgggacgtcccacaaggccttccagtcctgggattcttcttggcctggcttctctttggagagtctgtgctgtggttctaagattcctggctagaatgtcacagactgctggatttaggattctattctggaatcccgtgattctccctgatgagactaagactcacattcctggtgtgactgcattctctcctgccaggtgtgtaggcggagcttcccttcctgtctgagaaggaaaggctgggggggcggggggggcatctgcagtctgctgaggggcagcacatcgggcctgtgcacccttatcctctcctttgccgatgggaccttatttcccccaacttacaatggttcaaaagggcctgaatctgaggcaaacagagctggccatggtcagggccaggtctgtgtggtgagacagaaaggaaacagttgtcagcaggcaaaaggggtgggggcagttggagatgaagctcctcaaggagaagctgtcagctcccactctacacctccccataagcctttgatttaaagaaagcctccatctgttagcctccggtgtgtgggatagttttgcagccgaagaggggtgggcattgctcaggatcttggcatggctgagaaccaggtccaggaaggagtgggaggggcaaggccagctcctctgcccccagcttgctgtgggacctcaggccttgggctagacttccttggactgactgctaaggcaggagagacagagtcagagaccctccctatccacaccccacctctcctagccagggagcaatgggttcacactgcctggatcagctatgaggtcaggtggctgggaggcctgaaccaggaagagctctgggccatgggaggcgggtgagcatttagaatgaatgctgaccctactgagcacacaaagctgtgaagaaggagctggtccttcagagcacgctgggagtatatgcactggtgtggggaggtaggaggagggggatgcaaccccagagaaggtggcaacttctggagaagcagacacagcagaaaaaacacagatagagggcgatactgattaattttgggttgtccctggtgatcaggtatgaacttgggtccccatcaccctcccaagtggccctgggcatatgtggtcagcacccagttagaaagacttgtttcctagtacgtcttctctcatggtctctcatggatgcactatacttcatagtacccaaaacacttccaagttcatagtgggcctctgtttctataatttgactatgtcgagcatacacttactgcattatacaaattggaaaaactgagaccaggagaggaggaaccagaatctcttgttgcctaagagattttctactgctcttgatggctgagagcatcctctactgcaatgatgaggtaagcctctcctagaccagggggcccaggcaacagaactcccaatagtggatttcagctaacatgtccctgttagcatcattctcactggcctctcctttacctcttaccctctctcctccagaagggtgagaatagagggggtttctttctctctcatgcttccctccaggccaggagggctgggggcagaagggcagaggcactgcagctgtggaacaggagcagacaagggcataatattcagaggaacctacagtccatcctcatacttcctggtcattgtccccatcttctgtgcctccagctgcccccatgccacaccctatcatatccacatgtgtggacacacatacccatggcctgtccctcccctgtctccagaaggctagccaggtccacactcctgctgatccccctgtttggagtacactacatcatgttcgccttctttccggacaattttaagcctgaagtgaagatggtctttgagctcgtcgtggggtctttccaggtatgggctgttgacttaaggctgcattcttccctggcttttaagggaattcaacctggagtcttggcccttgccactggattccaacctttttactgtaataagtattagataagcacctactttgtgcttagctctttccttaaccaggggaacacaggggctggagccaggggtggggcagggctgggggcttctggtctgtctacctcacctctcctgtcatcttccttctcagggttttgtggtggctatcctctactgcttcctcaatggtgaggtaagcccctcccagtccttggggcttaggcaatggaactcccaggaccagggtccggaaacattggtgggatatgtgcagagcaaggacgggttaaaccttgctgctccaagtatggtcctcaaactagtagcactggtgtcacctaggcccttgttaaaaatgcgcatctctgggaccaccccagacctgctggcttagaatctgcattttaataattattttaaaaaacaaacaaacagctttttactaaaccccagggggattcctgtgcacaacagagtttgagaaacacctagttaagtggctgtgtgcagtgagtggggaggggtgagggcttccaatgaaggttgagttgctgtggagctctggttacattgcacaaaaaacccactcaagtgagctggagacccaggatgggaagaattggagtacagtcacccctaggcagcatccctccctctccctggactgtattctaggatcctctctgcctcttacctcctgccattccaaggcctccttctgaacctggcctcaacccagtcccaagtttgcaccgcccgaggcagcataggggtccctccattttgatttcctaaagagaataagactggctagttcagaaccctaagtccagggcagcccaatcagcagtggaagaggctccacagcagtgggcctgaccaccttcccctctcctaggtgcaggcggagctgaggcggaagtggcggcgctggcacctgcagggcgtcctgggctggaaccccaaataccggcacccgtcgggaggcagcaacggcgccacgtgcagcacgcaggtttccatgctgacccgcgtcagcccaggtgcccgccgctcctccagcttccaagccgaagtctccctggtctgaccaccaggatcccaggggcccaaggcggcccctcccgccccttcccactcaccccggcagacgccggggacagaggcctgcccgggcgcggccagccccggccctgggctcggaggctgcccccggccccctggtctctggtccggacactcctagagaacgcagccctagagcctgcctggagcgtttctagcaagtgagagagatgggagctcctctcctggaggattgcaggtggaactcagtcattagactcctcctccaaaggccccctacgccaatcaagggcaaaaagtctacatactttcatcctgactctgccccctgctggctcttctgcccaattggaggaaagcaaccggtggatcctcaaacaacactggtgtgacctgagggcagaaaggttctgcccgggaaggtcaccagcaccaacaccacggtagtgcctgaaatttcaccattgctgtcaagttcctttgggttaagcattaccactcaggcatttgactgaagatgcagctcactaccccattctctctttacgcttagctatcagcttttcaaagtgggttattctggagtttttgtttggagagcacacctatcttagtggttccccaccgaagtggactggcccctgggtcagtctggtgggaggacggtgcaacccaaggactgagggactctgaagcctctgggaaatgagaaggcagccaccagcgaatgctaggtctcagactaagcctacctgctctccaagtctcagtggcttcatctgtcaagtgggatctgtcacaccagccattcttatctctctgtgctgtggaagcaacaggaatcaagagctgccctccttgtccacccacctatgtgccaactgttgtaactaggctcagagatgtgcacccatgggctctgacagaaagcagatacctcaccctgctacacatacaggatttgaactcagatctgtctgataggaatgtgaaagcacagactcttactgctaacttttgtgtatcgtaaccagccagatcctcttggttatttgtttaccacttgtattattaatgccattatccctgaatcccccttgccaccccaccctccctggagtgtggctgaggaggcctccatctcatgtatcatctggataggagcctgctggtcacagcctcctctgtctgcccttcaccccagtggccactcagcttcctacccacacctctgccagaagatcccctcaggactgcaacaggcttgtgcaacaataaatgttggcttggattggcttggttcccctggtggttgatattctcatatggcctaaaatgggaccagcttccaacttggagccatcttcctccacccaaaggatgggtgatctaatacattactgaaaccagatgcctcaactcttttggcttttgacagaaatccatattttcatatgaggcattcacagttctgagggccttcagctcccatctttttgagtggtatcctctctcctctgagtgtgatgaagaccaggtccccattgtgtccccccactccttaaatccagccaagaaaagaccattctaatctcagatcaatacaaaacagctggcagagctgcccagggtcccagaaatggttgagtgtgagtgtttcacaggccgcagacattgctgcaaacaagggtctaggatgaccatgttgcaattacccagggctcagctaagaggaggtaggtagtggacaaaacaaatgtcaccaacacaagttgagtgagcagagacaatatggcactaataaaaaggtttagacacagaggcagtatggcaaatatcatcagtcagcaagagatgtctccaaagccgttcccatgctgacctccttgggtcccacctcctgcaaacttgctagaggagcaggagagggatgtcaagctggtaaaatgtggtcagaatgggctggcaaaggctcatatctgcctgcccagctacttcaatgccttgtctgacccagtaccattccaggacccatcatcaatgacagttccaacccagtatcctcagaggccagagtcaggggtgttcaggccagaatagaagtgactgtgagccatgggcagaggcacccccagggaaatgccctttgatcagttgcccagcatatccaggagtggcacggtctctccatctagattcacactccatgccctgccctgtgcatggtcagccataggatcgagaaggaggcgctgttcctaaccttgacctcaggtacccccaggcctgctagagagaacattgtcagtagcccccacccctgcccagaccaacagtggtgaccaccagtgaggtactggtggtggagagctgagctggggcatctagaacttctttcattcttccctgagcgtctttttttttttttttttgagatggagtctcgctctgtcgcccaggctggagtgcaagtggtgtgatcttggctcactgcgacctccacctctcaggttcaagcagttctcctgcctcagcctcctgagtagctgggactacaggcatgcaccaccacgcctggctcatttttgtatttttagtagagatgaggttttgccatgttggccaggctggtcttgaactccggacctcaggtgatccgcccacctcggcctctcaaagtgctggaattacaggtgtaagccacggcacccagtctactgaccctgggcatcttgcattcccgccactccaaggcataggagttgagagacaggggacagacagtctgtccatgttcccctcatccaattggggcatgccactctctctctctctctctctccctctctctctctggtttccctcctcccactccctacttggtgccactctgaactgcttccagagaccctgtccaccccatacttctcagtaagatccagaagacccagcccttgtcatttaatcccaattctgcttcagactttctcagagatcatgggcaggtctcctcctgattatgaatctctccatccacctgcacaatagggagtgttctagatgactttgcttagtccctggctaaggcacagatgattaatgacgaggggctgcccagagccttctgccacccactctgcccccctgggctcaggggaaggacagcagctggtgggaggagccccaagaagttgggggctaaggcatacacagaggatggaggctgtgcagagaacaaggtcagagatctggcaggactccttgagagattaactcaggccagtagaagaaagaagaagggagagggggacagaaatgcagaggaaagggcagcaccttgccttccaggttaggaccctatagactgcctgggctgtgtgaaggctgggaggggcccccacaccacactgtatctgccccacccaccacagtccctgatatccccccgtattcgtgtgtcatggctttggggtaaggcagacagcctgggtaggggaccagttgtcagccaagagggtggagagtgaatgaagcagagatccaagatgtgggcaacaaaagggaggacataggtggggccctgctcagagaggttactgggaagggcaaagcttagtgatgggcacttaaggatggcgagaagctgaaacagtctcccaggccggaaacagccgtggaataatggggttggccacaagcaggacttttcctggtcccctccttctccccctgccccgcccactcccaggtcccttgccaggtacctgtccggccaggccaactcatctctatcgccccctggtggatgcttcaaggacttcactaagattgaccttagtgcccaaacacctgggtggaggcccattcctaggaggccaagtgatccagagggtgggcctctctcctgagcgccatgcagagtgagatacaagagggaggaggcggtgaggcagtgaggccgcaggactggttatcaggctttagtctgaaattaaggcgacccggggcctggcccttagacccaggccactgacctctgctgcacacaaaccctgcctcagacccagctgtaacccccgatagagcccagcctctgactggccacaggctggaccctagccactgactgagccctaagcccagtccctgagggcaaagcccagttgactcatgtgggtacctcctgggaagacaaggacaaggagcaccccaccatccctgtgcagagagccaccatcccctccatggcagaggtcaccatctgggcgattcctgccactccagggcatgggctgcccaaggagggtggccagtttgccagcagtatggataggggacggtgtctcaggtgagggaacatcgaagtggtctctgagggctaggtaggggtctctgggtcccaagagaacatgatgggtgccagggataactgaatcctagagggcgggcatcaggggtcctttgcagcaggagcacagtggaggcttcctaagtgaggccgaggggatgatggtgggtttggggcgggccactctggctactgagaagggcccaaggggcaggctgggaaaagctgccagtcccccatccaggtggggaggaggagggctggggaaatgatgacctggtttaggacatgctgaatgtaatgtctgcaggacatctgaggagaagctctaaggcaattggaatcaggacccaaagtgacagagctcaggtggcaggtggggacagagggcagcccccttggggaggggtgtgtggggagtgtatatccccaggcaaccccatctgctgtgctggcaggagtggggtgaagagtcagaatcagcccctccattctcaccactcacccagggcctattttaatgaacaatgacccagcctctcccaatgtgggaacaggaactgctcttatctctcccaggggagggggccggagccacagctggcagtcattaaacaccccaatcaggccagggatggccaagatattaataggcaggagccagtgaccctggagacacagcctcctaggaagagggacagtaaccccagtaggctatggggataaggaagacaggtcagaaggccaccctggcaatgccccagcctctatacaggacagacggggtaaccaaaggccagagaagggaaaggacatgcacgagatcaccaggaaagtcactgatagagcctagccttgaacccagttctccaaacttcagagccctgcctcttccattacacagatcatcataggtgagaccattagggatgctctctgtggaaacacatgaagagcaggcctaatcagtgacactgattctttgtttaaaatcttgatattttgctgattatatatgttttgcgttaattttgatattttaaaaatattagattaaaatattatcttgatcactgaggtttttttgccacccctttcaattttgcacctgaagcaagtatcttgcttgcctcactctaatcccagcccagctcccgggatcccagcatccccgtgtcccaggatattagcatggaagaaactctggagagctccagactggtctttacgtgtctcagaaggaaaagatcctgtcagggtgatgtctactagaaggaggcagctccagggcaaattcagtggctcagcaatatcaccgcagatgtaggtattttctgtctgtccactctgccatctcagtatgtggactttcatcctcagacttaccccctcatgactgcacaatgactgttgctgcccaagcatcatgttcccacagaaccccatccactggcagggaggagaatttcctctatatgtctccttttatcagggacagtcatctatcccaggacccacctttcgcacactctcttcaggccaggattaggtcacatacccaaaccacagctgcaaagattggtgagggttctataagggaagttgatctactgagaaagaaatggggatggctgctgagtaggtaaccaacagagtctgactctcagtctctttttggacatttcttgggataaatgtgtgatctttcatattcctccacctgagcctagtggtgcagtatatgggggaggggagagatccaaatcagtcatgcttcagtgtaagagacagaaaacgttccgggtgttttgtacagaaagagattgagtgtagggaattaaatataggaaggcttggagggctggaagtttgggtgcacctctatccatggtcacaccattgcagctgccaccttgccgaacattactgccaatatctcggttgcacatccattaaagctagtgacaagaaagcagaaggaacatagtgtcctgctgctgcagaaaactcaggtctgccatatcccacccatcagccaccacgctgcaggaaacacagcctttacttttctctgcttcccaactgtcttggtggtgcttccctctggtagagcctaagttgcatcaaattcctagcagtgagagaattccggaaaggaagccttgagccttccaaccccaacaaagcaggggaacatggaaggggctagagaagaggctgaatgccaatagataatttctagcacagcggctcaggtggcattgtagcccaagtcccagaaaacagagcctgagacaagggcctgtgaccaggaaacagaagagtgaaacggggaagtgaggaaagccaatataaaggtgagtcatcagcccgggcaacatggtgagaccctatctctgcaaaaaaattaaaaaataaaaaaatagacgggtgtggtggtgcacgcctgtagtcctagctacttgggaggctgaagtgagaggaacacttgagcccaggaagctgaggctgtagggagccatgattatgccaccgcactccagtctggtgacagaccaagaccctgtctcacgataaaggtgagttattgcactggccactactggggcaacaggactcaattcactgggaccctctgcagggctggcagaacacgcccaaaatcgtcctcctgagggacagagaaggaaagcattaaccactggctcccagcctctgttgctcaaggtttgcccacgttagccccctcactcttccaggcttgacaggcatgaacaagaagcaggttcctgcaggcatcccatcacatagtcagaggaactccggggcagaaagggccagctatgtggtagagatagggtgaggagctgtcaggatcccccaccaggaagctggctaaggttggccaatagggaatgaggcagaggacccaacacaggtggcctcctggggctgagaagaggagccccacacaaaggtcctcgtgcactaaggtctgcatggacactcactggtcctgctgccaaggtctttggctggggtactcatagctgctctcttggctgcagccccagggtctatccagctgacttggccccactgaggctcactctggcccctcacaccgctccaggctcagccatgccatcacccagccatgccatcacccagccttgggtgtgagcttccccccgccatggcctctgtggcactcacttcaccattcaccatggcaacaccatgacagacccaccagttccaactccgccacctttctcatgccccagggagcatgcaggaacttctgagtcccttccaggcctctgggagctgagggtagcttagtggtgttcactcagatctacttggcgttaaatttatagatccaccattttatctagaagggccacttaaggggcacaggttgctgggaggactgacttcctaacacagagtgggacacacacaccctctgttttcaggtttcaatgtgtcccttcaatatttcctaggtaatgagaccaggtgggctttcctcccttccttctatcctcactttctccttgcagagatgacatacccctcctccacatttccccaggtcataatggtggagggcttcagagggatataatctcaggggccaggtaatgagaacggtatctgtttaatgttttcaaagtattaccatcatattttcattcagcaaataattactgtgtgcacagttctagacactgaggatgcagtggtgaacatggcagagcccttgccctcatggaactgaccctctaatggtggagacagatagtaaaagagaaaagttacagaaaaagaaggcaggatgagggttagagtgaggggggtgctctgttagttggggtggccagagggaatgacagtggggcaagagcaggtcattccccctccctgatgatcagaggaatttaaaccatatgcatcagagctggggctcagagatcttgcagtccaggtcaaaacatccagttccctgcctctgcagaagcagcctggacagtagctaaggagaaccaggtggcctggggcctcagcagggtctgaactcccctaggcaggggctcaggggctgaccaagcagtaaggagaggatgtctggctggatatggtgaggcttgtttcttgggtccctcattgcagcagtgacccaggcccacagactccatctggatgtggagtgtcccccccggctgcctccagctcaatgtcctcggtgccaagtgacacagaacaagcagctcttgaaaagactaatatttactcttcaaacgagagctggcacaggctgtttcctgcaactggcgtctgactcgccctgtgggatggacacaacaggaggcactccgggagataggcaaatgtcccctcggacgccagcattctgtatgagacgatgtctgtgagatggggacagcatgttccaaggttccattagacacatctcatttctgcccgcacacctcacagtggagagctcactgcctctccagcccctgctggacagctctg

SEQ ID NO: 706 - protein, 264 aa, Homo sapiens
MVFFQYCVMANFFWLLVEGLYLYTLLAVSFFSERKYFWGYILIGWGMVNFILFICIIRILLQKLRPPDIRKSDSSPYSRLARSTLLLIPLFGVHYIMFAFFPDNFKPEVKMVFELVVGSFQGFVVAILYCFLNGEVQAELRRKWRRWHLQGVLGWNPKYRHPSGGSNGATCSTQVSMLTRVSPDAGDRGLPGRGQPRPWARRLPPAPWSLVRTLLENAALEPAWSVSSNSMSSVPSDTEQAALEKTNIYSSNESWHRLFPATGV

SEQ ID NO: 707 - DNA, 1334 bp, Homo sapiens
  source (1)..(1334)
  CDS (201)..(715)
  CDS (834)..(1134)
tactctattttcctggggttggtctcttttaaacaaggcctctgactagactttgggggacaaagttgaatgccgggttggggcagaggctgatgccatgctgaggtcatgatgttatgctgtccattttgcttccttccaggggaagcagaagcgggagccgtcgtggagctctgctcctggagggagcctcccgggacatggagaaggtggacatgaatacatcacaggaacaaggtctctgccagttctcagagaagtacaagcaagtctacctctccctggcctacagtatcatctttatcctagggctgccactaaatggcactgtcttgtggcactcctggggccaaaccaagcgctggagctgtgccaccacctatctggtgaacctgatggtggccgacctgctttatgtgctattgcccttcctcatcatcacctactcactagatgacaggtggcccttcggggagctgctctgcaagctggtgcacttcctgttctatatcaacctttacggcagcatcctgctgctgacctgcatctctgtgcaccagttcctaggtgtgtgccacccactgtgttcgctgccctaccggacccgcaggcatgcctggctgggcaccagcaccacctgggccctggtggtcctccagctgctgcccacactggccttctcccacacggactacatcaatggccagatgatctggtatgacatgaccagccaagagaattttgatcggctttttgcctacggcatagttctgacattgtctggctttctttccctccttggtcattttggtgtgctattcactgatggtcaggagcctgatcaagccagaggagaacctcatgaggacaggcaacacagcccgagccaggtccatccggaccatcctactggtgtgtggcctcttcaccctctgttttgtgcccttccatatcactcgctccttctacctcaccatctgctttctgctttctcaggactgccagctcttgatggcagccagtgtggcctacaagatatggaggcctctggtgagtgtgagcagctgcctcaacccagtcctgtactttctttcaaggggggcaaaaatagagtcaggctcctccagaaactgaggcagaacaagttgggtgagcatccagctgggaggaagagatgcccagggttgaacagatctgggtaatgccaaggtgaagcttgggaaaaacgagctccaacaccactagcaacaacttgtttgtacacagatgagtgctggtgggagaggggctcaagacctcctaaaagtgtcctgctgcaaaggacacttttatat

SEQ ID NO: 708 - protein, 271 aa, Homo sapiens
MEKVDMNTSQEQGLCQFSEKYKQVYLSLAYSIIFILGLPLNGTVLWHSWGQTKRWSCATTYLVNLMVADLLYVLLPFLIITYSLDDRWPFGELLCKLVHFLFYINLYGSILLLTCISVHQFLGVCHPLCSLPYRTRRHAWLGTSTTWALVVLQLLPTLAFSHTDYINGQMIWSLIKPEENLMRTGNTARARSIRTILLVCGLFTLCFVPFHITRSFYLTICFLLSQDCQLLMAASVAYKIWRPLVSVSSCLNPVLYFLSRGAKIESGSSRN

SEQ ID NO: 709 - DNA, 21704 bp, Homo sapiens
  source (1)..(21704)
  CDS (201)..(460)
  CDS (3722)..(4013)
  CDS (5323)..(5425)
  CDS (7113)..(7286)
  CDS (9491)..(9609)
  CDS (9795)..(10513)
  CDS (10731)..(10873)
  CDS (12442)..(12502)
  CDS (13146)..(13277)
  CDS (13901)..(14207)
  CDS (14687)..(15069)
  CDS (21303)..(21504)
ttgggagaagggcgcaaacttttgctcaggtttgcagaaacatcagagaccttcaaacccttaaaagccccaactctggggccagtcttatgcccgaggtgagacctagtgggatcccattctgctgagcaggcgatggcttagattaggccatactgttcttctgggccttgattcctcaacccaagtagggcctgcttatgaagatccaccaggtcgtagcagccaactccgctatcccaggctgcatcccactgcctgccccgaaggcggccacgctggctggccaggatgagaggcgtcacagtgcctcttcccccccagcccctcccagccccaaacacaggcagcctgttcaggaaagcctggcgaaggggaggaaaagtcagcacttgtcagcggtggcggggcaggacgaggagcctgctcaggccagccggacagagagagggcagcaggggtgggggagcagtcccagccagctggcacgggagacatccaggggtgccagcatgggtcccagtagtagaacctggaggagggctgtaggaaggccaggaggtcatgaaggggtctcctgttagccagggttttctccttctggctgtgctggaggcatcaacggcctggttcccaacaccagagcccaactgtcctctacccagttacagctggggacaagccgccatcactggcatcaccggcacctttatgtctacacacctctgctcctaaatcggcttcggggaggctgccttaggggatctgcaaagggagacttgcttaatgtagcagctaaaatccaggattatggaaagatgataccgtggctggtgccagggtacccgtgtggctgggcacttcctcctctctttcccttcttccaaggctgctgcttcagtgtcaagcagatcttagctccatccctggccctcctctttctgtgactcttggcctcagtgtccctgtctgtaaaatggggatgtggtagaaggtgcaggaggcatgggttttaaagctccttgctgaccatggggaggatgtgctacagtggagggtattgaagccaagcaccatgatggctgggttgggggagtcaagtcagccctaatcaggaccataggaggagtgttggggggatatgggacagctggtgcagggctgggtggcctgtaagtggtgggtatggactaagtgacccctggccacagcccagccccagtccctcagtcctcacccctgagacccaagatctgcagatccgctggatctaaggggacgcaagcctgagtcctctgcaccctggcgctgagccaagaagacaggaactcctcaagggagagagggttggaggggtggggagaagggagtagcagacagggggcatgccaggctgagaagagatacagctgtcagcatttccccttcatccccaggagataaggcctcctcagtcagggcagaggcagaggagggggtcctttttcctcctaagctcaagcttggggcctctggcagtaaccttgaatcctaatgtaagtccagagtggatccagaaatgcaaggagccattgggatactcttccatcccaaaagcttgccaggaacaccttatctagcaggtcctcctgtagtccctgcccccagtccaccctggggccccatctcccatctgcccctcactgtcacctgctggactcagccatctacccagataatctcccccagccaccttgggtccctggcctggctgggagcacccatgtcaccaggcagcaggggtgcacatggcggggatgtgacttgctgctgctgctgctgctcacagtatcaacaatagcaaccagcttttcctgagcttcacccctgcacaggcttgttgtgaagtacttcatttaatcttcacagcagcttttttttttttttttttttttttgagatggagtttcgctcttgttgcccaggctagagtgcaatggcgcgatctcggctcactggaacctccgctcccaggtttgagcgattctgctgcctcggcctcccgagtagctgggattacaggcgcaccaccacacccagctaattttgtatttttcagtagagacaaggtttctccatgttggtcaggctggtctcgaactcctgacctcaggtgatccacctggtttggcctcccaaagtgctgggattactggtgttagccaccgtgccgggccaacaacagccctattattaccctgattttacaggaaaactgaggcacacgggttaagcaactttctcagacacgaagctagtcaagggtggaggtgggattcacattgtggggctggtggcagaatctccttgaagaggagggcacagctggagggaggagtgaacaggagtgggggcattccaggcacggagctgtgagctaacgtttggaggggtagcgcacttggtgtggggttgtcctcctcttcttgggaaagtgcttccttaactttaacatgagttattcttgttgcaatggctgtgctaacagataaataggtcctaaagttcagggaggccagaggtggggccaccacccctatggatgaatgaaggagtgtgggagtcatgcgtgctggaagcacatatctttccctctcctgaacatcccaactccagaaaaaggggtgtgcctcctcctggccatggagaaggtgaagccaacagctggaggtagaggctgagccaattccttgagccagtgaggggtgtgttggtcagctttcggtggtcaggctgcccaatggccactcagttttcaacccatgactgcctgcctgcagtctaggccatcaggggtgacccccagtcatatcagtaggctggtctgtctgttgggaggcccagggagtcagcaagtctctaaggatgtgtgggagcctccgtcagtcactccagagctctccatcagctggagaaaatacagcacaatgggtttgtcttgagaggggtggaggtggcagaagaagaaggatagtggggagggggtaagacaacaagatggcaaaggcagtgtagatggtagttgttgggcaggtggcagtattgctgatggtgctaatgttgccttggtgatgctggaggtggtggcagtggtgctggtgctggtgatgtaccagttgtgatggtgcagatggtggtgatggtggttatatggatggttacagtagtgctcatggtggtaacggtgatgccagtggtggtggtggtagtactgggagggactggtgatgctggtgttggtgttagtgacagtaatgatggttattgatggaggtactagcagcaacgatggaaatggtagttaatgggtgctgtaaatggagtgaggtggacagggatcagccccctcaccagcatggatcccccatgtcagaggcacagggagagcttcaggttagtcttggaggcccctggatcctggcaagtccaacttgtcctcccttaagccatcccatcattctgtgtctacctctgccccagccagctcagccatagctggggaagcaaagagactaggatagaggagcttaggccagccgccagcacgtgaggatctgctccagcccttcctggggtccatagtaccagcggagatctcagggtccacctcagcccccagagacaccagaagcacgggccacccacagacgcaaaggctaaggagctgccgcctcactcacagacgcacacacgccgccctatgcccagaaatacatgtgcacgtgcatgctcacaaacacgtccggctcgcgtcccatactgacaggctggacagtctccatgtgagaacgcgcacggacgggcacacacaagtgcacgcgccggccactcgagaatgcgctgccactcgcgcgcgcacgcacagggacgcgcacgcggctccgctaagtggaaccagcagaacccaaggccggccgagccaattggagactccttggccctggaagccctcgctgctgccgccaagagacgcggtcaattaacttctccctgcagccaggctctctgacccggcctgcccgcccctctcgccggtgcccgccccatgcccgacccgccttcttcctcccctgcctcctctgggtcctcccgcccttcacagccatgctcggactgcagggccccggccccgccttggcgcgtctgaaggatgcagctctgccgcggagctgaggagacgtagccttctggggtagggatggagggggtcgtctcaggggacatacccctgcccaggggtctgaggaaacacgaccctgaattaagagggatggggctgagggcttcacagccccgccctggggaggtttcagagaccgccttaacctctgcgggtcacattcacgggaatggctgggctaggcacaccaggctgctcccaagtcagaggacagaggctgagacccctcagcagccacctgctctgggtgagcctccacccgcatgatatttcatttcctttcttataatgaggccagtgagtcccggtgggtggcagccagggcccagggtgtgcaggttggagggaagggaaaggacattccaggcagagaacagcaggagtgagggcctgagtgtcatcagaactccgagtctggatggagggagctcccagataagcagtggaatgagagggactcccacccccagccagcaccagagtgcccagcccaacccaggccgcatgccaacagttcctccatcctctctttctctctcttgggattgtaaggaggggaggcattgaggcactcaccgttcactggggacagcattgactggggagctgggccaagatggaaactggtgactcccaagaccccccagggtgccaggacttgaaggactccaggctgggtttgtctccccacagttcaccactccttatccaccccctgcccccgactcatgtccccagcaggcagccaggatcctgtgtggatccatcctgggacattccattccagtcccatgtacccctggggaaaggactggacagagaatatcagtgactgcagcctacagggttactggcgggcaggcaggagagagcccctgctttttcccttcgatcaggcaggccctacccctcagagccacagcttcccatctgtaaggtgtgagctccatagagcagattccccacatgcaggggaaatcccaccttccctctagagtcagggccttttgaaagggggtagtccctctgggaaattgggatgtctctgggacctgctgctgcgccggaaagtcctgcctgtggtctgaccttcggcttggcaggtggatgcagatgacgtcatgactaaagaggaacagatcttcctgctgcaccgtgctcaggcccagtgcgaaaaacggctcaaggaggtcctgcagaggccaggtgggggtcaaaggaagagggtctggggatgaggtcaggtgagggaggggccagtcaagggcgggacccaggatacagagccaggtgaaggctctctgtgggggcggacttaggtaaagggggccaggccaaagtgagaaccaaagtggggtgcgtggtgcaagagtggagtcagcaggctcgggcatccatggcttgtcctaagtctcgagctcaggtccctgtgttgcccacaaccagcactcagactgatagctgtcgggttaatctcatcaactgaagaggcccagaccccaactgactgaaggagaggagccgcttcctcccctgacaagcccttagggttctgcaggggttgaggctggtgatcgcccagaacacaagcacacaatgacaaacacactctgtggcacacagattttgctcacactcacagagactcacatggtctctgcagtcacagccccaccgatgccagccccaacagtggctcccagtcacatcgagatctggggggtcagatgggccccctcattctgggtcctgaacccagcccctcttcttaattgtgaaagcctggaggagcctctctttgcccctcatcatccaccatggagcctctcgcttcctactgtaccccaccctgctacccacatccccacactgaggcccgagggtggaggcaggaaaatgagcacagtcattctcatcccagtccaggctgcttggactcagcttcccatcattgccatagacccgacatgtaaggaccaggggggcctagcttgggcggtggctgaaggaatacaagtcagaaaatgaggaagactttgtggctaggaagaaagacctctccagcctgggcaacatagtgagaccccatctctaaaaaaaaaatttaaaaattagcgaggtatggtggtacacacctgtagtcccagctataggggaggctaaggtgggaggatcacttgagcacaggaatttgaggctgcagtaatttgtgatcatgtcactgcactccaggctgggcgatagagggagaccttgtctcaaaaaaaaaaaacaaaacaaacaaacaaacaaaaaaaaaaaacgtccagcatctctccaatgagaagagaggccaggctccatctcagattaggcatctcaacggccactgtggaagctgtgaaccacatacttgaggatccagggcaggggatggggtggtcttctctgtccactcttgactgtaccaccttgctcttgtcttctcaccaccagcttctttacctgcacagcactcaggccagacttaattttcgctatgtaacctgtccattgacatcacccactctgtctgctttcaccgtgcgccccctggtggggccttcactgctgcgtggccttggcccccacccactcctgactcctgggtgggaggataccacctctgctctgtcttgcccagtttagtgctcaccccactagctgatcctgcactcccattccaaccctgggggacaatctccacctcctcttattacttcacctggcaagcactttacactttgttaaacacctcctcacccatcgtctcagatctcccaacagcctaggtgtcaccagggcaggagacaacccccccattgtacaaagggggagtctgaggccaaagagtaccctgggtctcctgttgtagcacagctgacagccatcattaccaccctggtttctccagccagcataatggaatcagacaagggatggacatctgcgtccacatcagggaagcccaggaaagataaggcatctgggaagctctaccctgagtctgaggaggacaaggaggcacccactggcagcaggtaccgaggtacgtctctgcttccatgcatccagctggcatgggcttggatccacccacccccattgcactgtccctctgatgtgagctcatgcttcttggctcttatagaaagtaaaaggctgcagccacatccccaggcaaggggctgggagaagacagagtgtagtgggaaggaaggggagctagatggctcaggcctcagaaagagatgaacagagaactctccagcaccacaccaagagtggacccagggctacggtcccacccatggagagaaagagagatgacagagaaccctgggggacagagaggcagggagagatacacaaagacagacagatagtgacagagaaagacggggagaggcatggagacagagatcaacagaggcagggagagacagtcacagagatagaggggaccaggaggcacacactgaagtctgggctcagtgtgtcagaggaggtacatggggacacatagtggatagggccacagaaatagagaaggagaggagggcagtggcagagggtggggccagaggcagtgggacaaggaggggagaagagaagggagggaagcagatgaggaaaggcagacagagcccaggctttggccacagggccggtttcagccggccgggtgggcagcagattccagatgggccacatctgggaggctgtggtcaccctgtggctccctggggaccagagggaattgtgggcctggctgggtggggctgggaatatggcgcccaggacagagagcctttcaccaagccagggcgggtccagccatcaaggcagccttccagggtggctggagagtcctgtggttggagccctacagagggagagaagggggctgcaagctgggagtggaatgtggaagatccagaggctggggaccctccaaggtcacttagcctccctgcagtgaggctggggctccaaagtgggatgtcaccctactttgaatcccaccattagcacttagatttggggaatcgatctcccccagcagtggccgtgggagtctcacagcaggtactcagggcaggcattgagtggtggtagaagcatgggccaatgtggttaatcccaacttcccaatgaggaaatggaaatagaaagacttgggacacctgcgtgaggtcagcagctccttggagtccagctggcactagaaaccagacctcctgcctcctgtccatgatcccaggggaaggggcacacagggagcctcccagctgagggagagttagtctgggtacttgcccttcttcagagacacctggaaggtggttccaagagcagagagaaaggcgagaggcctggcctggggctgagcacttgaagaggacagggccctgtgttgtatgacctcagcaagttgcctacctctcttggcctctgtcagcccatctggaaaatggggccagtgccagtacctgtatcgcagaggccatagtaaattctatgaggtgggtacagcccacagaaatacattttctccagagtgctccaaagcctgaattttcctgcttggggcacacctgtccctgcaggaaccaacaaccactgatgggccgggtgcagtggctcatgcctgtaatcccagcactttgggaggccgaggcaggcagatcacctgaggtcaggagtttgagaccagcctgaccaacatggagaaaccccatctctactaaaaatacaaaattagccaggcatggtggcgcatgcctgtaatcccagctactcgggaggctgaggcaggagaatcgcttgaacctgggaggcggaggttgcagtgagctgagatcacgccattgcactccagcctgagcaacaaaagcgaaactccgtctcaaaaaaacaaaacaaaacaaaaacaaaaacaaacaaaccacagatgtattcatccttctgggtcactaatcatggccttgactctcccttggtatcccctaccctgtctgtctctgggcacagggcgcccctgtctgccggaatgggaccacatcctgtgctggccgctgggggcaccaggtgaggtggtggctgtgccctgtccggactacatttatgacttcaatcacaaaggtgaggcctgctggaaggggtggggattacaaggaggctgagacttggagctaggggttcagtgcctcgagacctccctgccggccctgacctcccatggacctgcaggccatgcctaccgacgctgtgaccgcaatggcagctgggagctggtgcctgggcacaacaggacgtgggccaactacagcgagtgtgtcaaatttctcaccaatgagactcgtgaacgggtgcgagcctttctcctccccaacctgaccaggataaattcactcccaccccacgggtgacccctgacccagccctgacccctgaccttgactcctccagcaaccttaccctggcctcttgctcttaccctgatgctctccctgggtcccagggctctgactgtgtctccccccgccccgcacaggaggtgtttgaccgcctgggcatgatttacaccgtgggctactccgtgtccctggcgtccctcaccgtagctgtgctcatcctggcctactttaggtgggcggggcggggcgagaggcggcgggacatggtggagggggggcggtggccgaggtctgatgcgaccccctccctgcacccatcacccccggcgggtgtccctacctacggcgcacaacccagcttcctgtccacccaccgcgcgtccccgtgcccccacccacggtcatgtcgcgcgccccgcaggcggctgcactgcacgcgcaactacatccacatgcacctgttcctgtccttcatgctgcgcgccgtgagcatcttcgtcaaggacgctgtgctctactctggcgccacgcttgatgaggctgagcgcctcaccgaggaggagctgcgcgccatcgcccaggcgcccccgccgcctgccaccgccgctgccggctacgtgagtacccctctgcccgcccgctcccggtgccgccactggcctcgtggggccccgccccgccccgctccagcccggccctcgccctgcccgcctcctgccagcgccactggcttcagccactcaaacccgtcttatagggtccctcgcaaccctcagctctgccgccgaccctgctgccaagggctccgagtgtcccacacgccccgcgctgccatcaaggctcctacctcaacccagtaccctctagccactctacctcttcactttgcctcctgcccctgacaccgcatccccctgagagagccccccaaacgaagcctgccccttcctggcctgtttggccggcaccacttgtcctctcctgccgccccagccccccagcccagccctgacttcccggaggcaggccctgccctctgactaacaccagctggtctcttaggcgggctgcagggtggctgtgaccttcttcctttacttcctggccaccaactactactggattctggtggaggggctgtacctgcacagcctcatcttcatggccttcttctcagagaagaagtacctgtggggcttcacagtcttcggctggggtacgcgggcacagcgggtagcgaggtgccggcaggggtgggaccgtgggtgacagggagagggcagcccctggggggaggcgcccacacagcacatcccgccccaagtggaacagcaggagagaggcctgccgcccttctgtgatcctgaccctattccaggctcaggaaacagcagggcttggccagggatcaggttcacctgaggttagattcacctgaattgaggctcggcccaggagagggaaaggaggaaccatcaggccaagattcagctcaggatcagagtaggatactgggtcagaggtcagcctggggctggaattgggatccgggaccctccctctaccctgagccccatggactaggccagcatctattaccccaccagtccccttgctgggatggggcgcggggctgcccacaccattgccagcctcagcaggcctgcggggtccatggcccagagccgtgggcccagcacctcagcatcacctgagcttcacagcacctctgcagaatgggttgctggagctgcgcactcctcccagccccccacaggctctgggatccagttaccgataattgtccattattgttggcagctgcagagcttggctgggctccgggacaactggccagactgcagaggggtgggccgggtggctggagccctctccgcactcagcacccagaggcccacaggtcaacagccaccgcctccctgcccctcgacatacatcctgaccctgacctcaccatgacaagccccagagttggggagacctgggcccagtcccaggaacagatgcaggctctggggctaggaggtgtcctagtggactggcgacatgcagattgggagtgcatagaatcctggggcacaggaatgtcacagctctttttcttaccgtaaagccaggtcataccctatccctccaagggtgtaccaggcctagagtcaagttggtggtatgtggtcggggaggacctggggctcccttcccagaggcacagctcacccaaatataccatgtgccccttgagctggcgcaggccaggacatactgacacaccgaggtctccctgtggcctctgcttgggacaaaacctctcaccccatccagtctcatccacgagggctaggacctttcaaaccaggttgtggggggtgctgtgctggggcaaaaaaaaatgcggaaaataggctgtctccccatgggagctgcaagtccaaagcagtgccctctgcagagggagtggacagggcatggatcagttagtgataccttattattatattatgccttgtaccccatatatgtgcatatgacatggagccaagatgagggcagaggctgagctgggttttgagggctggagccccaaggggaagctgttagggcaccacatggcagagtgtggctctgtcaccaagtggaccaagtgcccagtgtcaggggttcagggcaatggtggggtaagctgggggtcatcgaggatgaggggggaatgaccttgtggacagcagccacagtcctgcacactgtccccctctgtgcccacaggtctgcccgctgtcttcgtggctgtgtgggtcagtgtcagagctaccctggccaacaccgggtaggtccaggtggagaaggggcccaggcaagaagcacccctgggtcccttttcttccaggaagcatgtgagagggcctcctgtaccctggcctcaaacggcccagcctcaggagttctcagtccagcctcaagccaggagcaccctcagggtcacaggaggctacttccaaagaggcctgtgagggaggcctcaggcctggccacacccagcacccctgccctgtgtcctcaacagctaatgtcagaccagaccaaatctgggtctctgtgggcagtcttaggatgggaacaggagggatgggagctaatgcctcaacctcccccaggtgctgggacttgagctccgggaacaaaaagtggatcatccaggtgcccatcctggcctccattgtggtgagcaggggtgggctgctggccacaggggtgggtgggatgtgcgcctgcgtcccctggaaccagcccctgacagggacctaggaggcttccctggaccccagtgtcagagctacagaggccggaggaccagctgatccacactccagcccagaaaggaaaaccaagggctcaaggagccacccagagatgcagtgacagagcagagcctatggccgtggctgccaggccttgccccgccccactagggtgcagcctccagacgcagccccctcactcccacagctcaacttcatcctcttcatcaatatcgtccgggtgctcgccaccaagctgcgggagaccaacgccggccggtgtgacacacggcagcagtaccggtgagcccaccatgcctgccatgccctggctcctcaggggtccctgagtcctggtaccatgtaccccaggaaagacagtggccccatgaatgatcctggggcaagggaaaggacccagcgtctgactccctggctgtcctcacccacctggcctgcccagcagtgatgggaggccctagggcaccccaaagccagcctgcccacttgtaccaggccctgcactagagctggagtctgtgagtgtgcaacgaacttgaacctctcctcaaagagttggttgcagggggtctgaggaacaggtaggcggtgagtggccccgggaaggctgcagctcagctgaaacctgaggagcggactgtgggatagtgaggttcgaccgtggaggggagtgcttgccagctgagggctccacaggtgcgaagggcccagggacagggggactgtcatttgaagtccgctccgggacaccgctgagaaccaacgggccctattagcacttagccaggacagcagccatgcaggtgaactgggttgtcctcccatggtgactggagccctgggcccctttgagcttccggagcctggggctcgcagggtggggggtggtacaatgcttgttgaaggggaagtggcttggccctgacctacctgccccgctggcccaggaagctgctcaaatccacgctggtgctcatgcccctctttggcgtccactacattgtcttcatggccacaccatacaccgaggtctcagggacgctctggcaagtccagatgcactatgagatgctcttcaactccttccaggtgcgcagtgctggcccgggcctggctgagggtgggaggggttccgggggcaggcctgattcgagacacccctcttcacagggattttttgtcgcaatcatatactgtttctgcaacggcgaggtaagcaggagacagtgttggcatagggcagggtggggcagataccccagaggcttcctcaaggctcatttctccattcttccaccctgttatttctttgttcctccaagaacacccctgaggacattctgaaagcagagaagtctttccagatgatgcaggttcaggatgtgctaggatgtggggactcttcagtcactggcatagccaagtgtcttcccagccccatggttcaattatctgtgacccagattggaggactcagccacctttggggcaatttgagccttgtagattctgggtgtgtcggctgcctgtagccaaacaccctgttgtgaggatgggatttcacttggccttggagtttcccaggagtcccctattcccattttcattccgtgctgggtgtccaggggccgggatggggcatcgctggggttgggagacacacctgactgccgcacccttactgccccaaggtacaagctgagatcaagaaatcttggagccgctggacactggcactggacttcaagcgaaaggcacgcagcgggagcagcagctatagctacggccccatggtgtcccacacaagtgtgaccaatgtcggcccccgtgtgggactcggcctgcccctcagcccccgcctactgcccactgccaccaccaacggccaccctcagctgcctggccatgccaagccagggaccccagccctggagaccctcgagaccacaccacctgccatggctgctcccaaggacgatgggttcctcaacggctcctgctcaggcctggacgaggaggcctctgggcctgagcggccacctgccctgctacaggaagagtgggagacagtcatgtgaccaggcgctgggggctggacctgctgacatagtggatggacagatggaccaaaagatgggtggttgaatgatttcccactcagggctggggccaagaggaaaaacagggaaaaaaagaaaaaaaaaagaaaaaggaaaaggaagcggtgtgtggcttcctgtggcccaaactggggactcactccgagagggtggggctgggagccagggaaagctgtggcgggagggccatgagtcatggaggaatcctcaggtctcacttcagaatggggagggatctggggcctgtggtatccagcagaaagggcccagagtggctcaagtctgcaggggtcacacagcagccaagtggacccatgtggaaatccagcctcagcctccgttgctgccagctgtggagctgctctccacacttgtacctagaccccatgggggacccaggctcctctgggccaactcttctgactgctgcccccatcactgccacccagggctgctggcagatccctcgggtccctggccacacccccaagcctacggccctgccacagaatggacctttcctggctgtccagtggccactcagggagccctccacgcaggagccttagcatccacccgtgacctgacatgcctctgtgactgaggttgcagtaggagcaccaggccagcaggtgaagggtgggctgggtccctgctctggctcaggacttgtggggagccaggagtctgagcccagagggctggctgggcaggggcctgcaaggtgggacacatccattcactatgcatctgggacagtcactaagtgtcctcacctgacacccacctaccaccttactcacccccccggaccgtgccctctcccaccttgggccattcgtgggccccagagtggcacagagcccctcagcccgacaccctgaggactgaccctacagcatgcccaccccgggctctggcctgaacgagcttcttgctcttgctccagcctaaagacagccccgcacgagccctgccctgccttcccatctcccgctcagcccgtcttactcttctccacggactcggcatccaggagtgcacctcatctccagcagcccacacacaccccatagggcataggggaggggtcaggaggcccaagacaaaaaactcaggtgggcgttaggaggtgtgggtgcctgctgagcagccccacacccagccctgcctgcccttccagatgacggacaggaccaaaggctgtccaagggcctggtgcacccgtggagctccatgcaatggttgagggaggcataggccagtcttgaagggctgcagagccaggctgggagccactggaagttcaagagggagagcaacaaggtctgaatgtttaaaaagtccccacagcaatgtggagacgagaggaggctgcacaggggttggagaagaggtggcctggcaggaggcgggtggcctcgcagggagatggtgacagggagggcagcaagagttagctgggggaaggagacctcagcagggcagaccctcatcctcctccccagggatgtccgatgccactctctagggtctgaactgaggtttctgaagtaataagccaatgaggcccactcacctagaagcattcagactgggcaccccgcaacagggctgtggcttccccctcagactgggtgcccccccaggtggaggtgggcctctcctctcagattggattccctctaggacagggtttggtctcttcctacaaccagggagccccaatccccacccacaccccaggacagggctgtgtctccccactcagtctgagtaccccaaggtcagggctgagcctctgtctcaggcagggtgccccccagggcagaggtgcgcctctcctctgccctactgggtcaccccaagacagggctgtcacccccattagacttgtcaccatcttccctttagatggaactcccctccagatagggctgtccttcccctttgaactaatgcccccaggacatactgggtacccccatctcaggtttggtgtccccaggccagggccgggcatcccacaccagctggatgcctctaagaggaggactgccctgccctgaggatatctgcacccagggcagtgccaggcctccccctttagactaggcaccatttttcccctcagtctggatgtccaagacagaactggacctctcacctcagtccaagtcccctaggctaggaccagttctcttcccttagactaggagcccccaggccagggctggcctccactcagagaggcctcagagccccacctgggccatccaggtattggcagtggaagtggagccctcagcaggcctggcaggcaggcaggaccctgtttgccttgagcaggggctggatccaggtggtcacttctcccttcaaggccccacagcaaagccaagccacagggaacacgtaaacattagcagagctgggcggggtggtcagcagggtggagggcacctagagaccccaaatcctcagcccacttggctatgggatccggcaccttgcaggctgccccagactccaaggcaggccagtacagtggccagtttctgctcccacctgtcttgagcacgtggacggccccatccctcgctggcctgtctccctcagcccaggctgcgagaagaatcgctgaaggcccttggaaggaatggacctcccgggggtgctcgtccagccctggaacacaggcctagcctcaaggggaagctgagtggatgcaaagctcccagctcagaatagggtcgagctctgccacccaccacctgccagtccctgtcgagagcaaggactgagctgggccccaagtgcctggagtgggcaggctctgaggggccacaatcttcagccctcaccctgggaggtggccagagggggtgtggacagacaggaaagggggctgagttctctggaggttcaagagggacatgaccctgcccctccctccctgggatctgggaggacacagccctgctctgggggtctgaggggacatggacccatcctggggatctgagagtgcattgtctctgcgtggattcctggaagagctgtctggctgcagggacccgttgcggggggctggggtgagggggtacaactctctgtccctggttcctcctcagccaactccaggagaatgatcccagcccaaggctgccatggccaactgaaacaaaccttgcctgagggactggtcccactggctgggagggacagaggaggaagttactccagagctaggcaggggcctgagccctggctggctccaggtgtgtgctgtgtggctctgggcaagccaccttccctctctgagcctcaacttctcctcacaggtcaagcccctgctcaggcttcatgacctgagtggactcaggatcctacctcgctcctcaacaaggatagggacaggacccctatccttccctcaggcaggcgtgacagcctaaggacctcccccttagcctcaaatatgtctatttgtgtatgtctgtgtgtgtatttatatgtgtgtgtctgtgtgtatgtctatttgcatgtgtatttgttgtctatgtgtatttgtgtgtgtctatttgtatgtgtctgtgtacttgtgtgtatgaccggctccttccctcttcagtgccacgggcatgcaggcaatggaggccaggtgagggtggattcttcttgctccagcgtttttaacaggcagggcaggagcagccttggcatggcccggacactggcgcttgcccggaggccacagtcagacaacctgtccacaacaaactcatatccatacatcagcaagacagtggggcgtgttgggtgtcattctccatgtgcgagcgtttgtatgcgcgtgctgcttgtgtatttctttgtgtttgtgtacacgagtgtccatgtgcctatctatgtgtgtctgtgcttgtgtacctgtgtgtgtgtgtgtgtgtggccatgtgtgtttctatgtgtgtgtgtctggatatgcctgtatgtccatttgtatgtgtctgtgtcttctggcatgtctatgcgtgtgtggttgtaggtttgtgtaccagtgtgtctatgtgtgtatttgtgtgtgtgtgtgcatttgtatgtctatttgtgtatttctgtatgtgtgtctatttgtgtgtgtgtatctgtgtctatttgtatatctgtctgttatgtgtatatgtgtgtgtgtatgtgtctatgtttctgtgctggtgtacgtatgtctatctgtgtgtatttatatgtattgtgtatgtctgtgtatgtgtatttgtgtatttgtgtaaatatgtgtgtctgtatatgtctatttgtgtatgtctgtgtgtgtatttatgtgtgtgtatgtctatttgcatgtgtatttgttgtctatgtgtatttgtgtgtgtctatttgtatgtgtctatttgtgtgtatgtctctgtgtgtgtctatttgtgtgtgtctgtgtatttgtgtatgtctctctgtgtgtgtctatttgtgtatgtctctacgtgtgtatgtgtgtctatttgtatgtgtctgtgtgtttatgtgtgtatgtctctgtgtgtgtgtgtctatttgtgtgtgtgtggactcgtggtctaagaacgccgcctgtgggtggaatttggctcatagacatgtttggtttggcacctacagtattttcaacatcctgagccaacatttaaaaatcaggatatttcacataaaaattcagctttccaacttctcttaaaaattcagaagccctggcagccctgggcctgcgttcccctgaggccacgctcctcccgaactgtgcagggctgccctcctccgtgcaccctccatagcctcgcccacttgtctcgcccagcagtgtcttgaggatggctgagtttgtgaacccagtgtgtggtcacaactacgtgtgagcctggctgtcagggaatacgtgcatgagtggggtgtgtgtgcatgtgtgtgaatgtgtgtgtgcatgtgcaaagcaactctgtgtatgaggcaaacctgagtgtgtgcggtgcgtgtgaatgcctgcatgtgcgcgtgcgtgtgtgaagagtctgcgtgggggaacacgtgtgtaaaggcatggatgtgcacgtgtgtgtgcaggggagtggccatatttgtggctgtgtggagtgtgtgggccacagcggactggcatgctctgcccaggggcctcttccggtctttgagggggaattggattcccggcttctggctgggccgccttgcgggatttatttctgtctcagtgcccactggagtcctgagtaatgggaacatttaaagaaaaccagtaaatagatacagaaggggcaggctggctgggaaactcagcccagacacccctgcccagcccacagctgccagagcccctgggggcaggcctgagcccagggagaaaggagctccagcatgcgacagcaccccctcactctgtggggtgcccactgctacccatgcatgcccccaccacctggatggatggtccctgggtcaacactgggcatcttgagagcttccttggctccgagcagcagatgttcaggagattcaggggatgccagctcaggcctggcccaggggccaagaggacctgaccctccaggggtgccctttcccagccaggctacaggcattctgcccacacacaccctctgcacatgcagacgcacccacagttcaaggaggggagaggctgtgctgacctggcagggctgggcgggcactcgataccccacccggacctcacacacccggcagtgccttggaacctcatctgccaggacacggcccctgctgttctgggtctcaggctgactggaccccactctctggatcgtctctgatgagcagtcacttacaaatgacataaaccccacaggaaaggataggcgtgcgtcatgcggtggggtgacctgctttacagaagacccgctgctggcaggagctgtttggaccaacgcgccctgtcagggaccccatcggggatctcctgctgccccccagtggccatgggaggacatggggaaataaaagtcaacagctgcatggagttgctcatccacgtctgagtggactctgagggccccacgtggttcccagccagacagttatggggaagcaaggcctttcaactggtctgagggaaggggcttggatcccagcacagatctggagaccacctggaaggtcagctcctcgaaggcagaaccatcgtcagtcacagctgcatccccggatacagtgcccagcatgacatgggtcctcgggaagcatgctacactaatggcccactccccaggctcctgggggtgggcagcgctgtagcaagccctgggcccagctcagagccccatggagaggccgcctgagaggccccaagacagagctgtcgtgggtctccctgcatgccagggttggcactccagaaggtgacaatgctcacttcactatggcagcgtcctgcctttgactctcgcagagcagtgttctaagagagatctgtgagctccttccattgggagcctgctctggtggacacagaatgcgctggagcctgcatataaattat

SEQ ID NO: 710 - protein, 964 aa, Homo sapiens [sequence omitted]

SEQ ID NO: 711 - DNA, 1348 bp, Homo sapiens
  source (1)..(1348)
  CDS (201)..(1148)
agccaggagggcccccaccgctgtgttagggagatatggagtgtcccctattatgtcccaaagcttcagttgttgagatctaatgagttgcacacaacacagctgactgaagacatagcagcagaggtctataaagagatgtcagtcaatgtaacacatcttgtccatattctcaggtgaccaggagcaacaaccgagccatggagacgtgggtgaaccagtcctacacagatggcttcttcctcttaggcatcttctcccacagtactgctgaccttgtcctcttctccgtggttatggcggtcttcacagtggccctctgtgggaatgtcctcctcatcttcctcatctacatggaccctcaccttcacacccccatgtacttcttcctcagccagctctccctcatggacctcatgttggtctgtaccaatgtgccaaagatggcagccaacttcctgtctggcaggaagtccatctcctttgtgggctgtggcatacaaattggcctctttgtctgtcttgtgggatctgaggggctcttgctgggactcatggcttatgaccgctatgtggccattagccacccacttcactatcccatcctcatgaatcagagggtctgtctccagattactgggagctcctgggcctttgggataatcgatggcttgatccagatggtggtagtaatgaatttcccctactgtggcttgaggaaggtgaaccatttcttctgtgagatgctatccttgttgaagctggcctgtgtagacacatccctgtttgagaaggtgatatttgcttgctgtgtcttcatgcttctcttcccattctccatcatcgtggcctcctatgctcacattctagggactgtgctgcaaatgcactctgctcaggcctggaaaaaggccctggccacctgctcctcccacctgacagctgtcaccctcttctatggggcagccatgttcatctacctgaggcctaggcactaccgggcccccagccatgacaaggtggcctctatcttctacacggtccttactcccatgctcaaccccctcatttacagcttgaggaacagggaggtgatgggggcactgaggaaggggctggaccgctgcaggatcggcagccagcactgaacccagggcatccagtgcctggctctgccatctcttagctccagggatgtcgggttaataattctctcattttcagtcttggtttcctcgtgaattatgatgattgtgacaccctcagacttggaaggtctttttaaacactacatcagttctttctttctttctttctttctttctttcttttgttctttctttcgttc

SEQ ID NO: 712 - protein, 315 aa, Homo sapiens
METWVNQSYTDGFFLLGIFSHSTADLVLFSVVMAVFTVALCGNVLLIFLIYMDPHLHTPMYFFLSQLSLMDLMLVCTNVPKMAANFLSGRKSISFVGCGIQIGLFVCLVGSEGLLLGLMAYDRYVAISHPLHYPILMNQRVCLQITGSSWAFGIIDGLIQMVVVMNFPYCGLRKVNHFFCEMLSLLKLACVDTSLFEKVIFACCVFMLLFPFSIIVASYAHILGTVLQMHSAQAWKKALATCSSHLTAVTLFYGAAMFIYLRPRHYRAPSHDKVASIFYTVLTPMLNPLIYSLRNREVMGALRKGLDRCRIGSQH

SEQ ID NO: 713 - DNA, 1251 bp, Homo sapiens
  source (1)..(1251)
  CDS (201)..(529)
  CDS (634)..(1051)
taacattggatttacatttaaaccatttaaataattttttacaccaggaaatttgaattcctattatgtagatttgtttgcaaacctgtgaaatcatagtgaatattacataaaaattgactaactcctttttaaaatttgttttgacaatagatagagtacacttgattctatttcaagtgctacaaaataagcagatgatgaaaataaatgacagctcaggggaagacttcatcttagttggcttctcagaatatccccaggctgagttcatcctttctctgtttgtctccgggttctacaccatgacattcacagggaacacagccatcatcttggtctctctgctggactaccggctccgcaccccaatgtacttcttcctccgaaagctctcatttctggacatgtgtttcaccacctgcattgtccttcagatgctggtgaacatctggggagagagtaagaaggtcagctatgtaggctgcatggttcagtattctgtagccttggctcttggctccacagagtgtgtgcttcttgctatcatggctgtggaccgttatgttgccgtccgctggccccttcactatgttacaatcatgcaccaacagatctgccactttctcgcagccttgtcctggttttctgggttagccaactctctctttcactcttcactaaccaccattttgcctctgtgtggccaccgccgtgtggaccatttctttgtgaggtcctgctcattgtcaagctgtcctgcgtggacaccggcccaactgaattgaagatgttaattgctcgtgtgatcatccttgcccttccagtgtgcaccatcctcacctcctatgcctgcattgccagggctgtgctgaggctgcagtctgctgaaggtcagcagaaggcctttgggacttgtgcctcccacctgatggtggtcttgctgttctatggaaccatcatgttcatgtgtcttcagctgaagagtaactactctcagattcagggaaagctgcttcctcttgtttataccattgctgcccccacctagaacccactaatctatgcactgaggaacaaagttgtaaagagggcaattggaaaattgatctggaaggattcagtttaagaaattacgatccctggaatttgtgtcatagaaattatttggagagtggattaatggcaggaaggataattttcagatttcagcccaaattgattgacaaacaaatgaagcaagtactaaat

SEQ ID NO: 714 - protein, 248 aa, Homo sapiens [sequence omitted]

SEQ ID NO: 715 - DNA, 2549 bp, Homo sapiens
  source (1)..(2549)
  CDS (202)..(410)
  CDS (1006)..(1305)
  CDS (1389)..(2349)
gcggggaggcgcggggccctgctctgtagggctgaaggccgcccgaggttcgccaaggctctgggctctcgaaaggaagccaagaaaagaagctgcccaggtgaccagtcctgggagtgctctctcccaaggaagctccgagcgcccaggagcccttagccggggtctagtgccctttgaacaatctccagctcttcaaggaagtgggccgccgccgcctctcttgggacctggcctgggatcctttccccaaacgcaccccggcgatttttgcgcaccgggagccgaacccctgctgcgcgcagctggctgggctcaggcgcgcttcctcaacgtttcggagccgctgcccccagcgaagtccacattccaagctccaggggctttgagagagacgaccccaaggcaaggtaggtggctcggacgggctcgccctgggaattattaggttgggcttgacgtgagtaatgatgccatctgcttaagtcttggagaaagaccgtgtgttttccttttgctttttaaggcgtttggagagctgctgaggagccaggggcttggaggagcgagaagacatgtattttcagctgagtctcagaaggggagaatctcctgtcaccaccagaaaagcaacagccccgaaatgtgattgcaactgactagcagagcagaggcccaggagtcactggattgatgatttagaatatgctaaaaagccagtgctttatttggggaattcaggggctttctggtgcccaagacagtgacctgcagcaagggagtcagaagacagatgtagaaatcaagagtgaccatccacgggattgacttggattgccactcaagcggtcctctcatggaatgttggtgaggccctctgccagggaagcaatctggctgtgcaaagtgctgcctggtggggaggactcctggaaatctgactgacccctattccctgcttaggaacttgaggggtgtcagagcccctgatgtgctttctcttaggaagatgaggactctgaacacctctgccatggacgggactgggctggtggtggagagggacttctctgttcgtatcctcactgcctgtttcctgtcgctgctcatcctgtccacgctcctggggaacacgctggtctgtgctgccgttatcaggttccgacacctgcggtccaaggtgaccaacttctttgtcatctccttggctgtgtcagatctcttggtggccgtcctggtcatgccctggaaggcagtggctgagattgctggcttctggccctttggtccttctgtaacatctgggtggcctttgacatcatgtgctccactgcatccatcctcaacctctgtgtgatcagcgtggacaggtattgggctatctccagccctttccggtatgagagaaagatgacccccaaggcagccttcatcctgatcagtgtggcatggaccttgtctgtactcatctccttcatcccagtgcagctcagctggcacaaggcaaaacccacaagcccctctgatggaaatgccacttccctggctgagaccatagacaactgtgactccagcctcagcaggacatatgccatctcatcctctgtaataagcttttacatccctgtggccatcatgattgtcacctacaccaggatctacaggattgctcagaaacaaatacggcgcattgcggccttggagagggcagcagtccacgccaagaattgccagaccaccacaggtaatggaaagcctgtcgaatgttctcaaccggaaagttcttttaagatgtccttcaaaagagaaactaaagtcctgaagactctgtcggtgatcatgggtgtgtttgtgtgctgttggctacctttcttcatcttgaactgcattttgcccttctgtgggtctggggagacgcagcccttctgcattgattccaacacctttgacgtgtttgtgtggtttgggtgggctaattcatccttgaaccccatcatttatgcctttaatgctgattttcggaaggcattttcaaccctcttaggatgctacagactttgccctgcgacgaataatgccatagagacggtgagtatcaataacaatggggccgcgatgttttccagccatcatgagccacgaggctccatctccaaggagtgcaatctggtttacctgatcccacatgctgtgggctcctctgaggacctgaaaaaggaggaggcagctggcatcgccagacccttggagaagctgtccccagccctatcggtcatattggactatgacactgacgtctctctggagaagatccaacccatcacacaaaacggtcagcacccaacctgaactcgcagatgaatcctgccacacatgctcatcccaaaagctagaggagattgctctggggcttgctattaagaaactaaggtacggtgagactctgaggtgtcaggagagccctctgctgctttccaacacacaattaactccgtttccaaatacattccagtgtattttctgtgttgttcatagtcaatcaaacaggg

SEQ ID NO: 716 - protein, 489 aa, Homo sapiens
KWAAAASLGTWPGILSPNAPRRFLRTGSRTPAARSWLGSGALPQRFGAAAPSEVHIPSSRGFERDDPKARKMRTLNTSAMDGTGLVVERDFSVRILTACFLSLLILSTLLGNTLVCAAVIRFRHLRSKVTNFFVISLAVSDLLVAVLVMPWKAVAEIAGFWPFGPSVTSGPFRYERKMTPKAAFILISVAWTLSVLISFIPVQLSWHKAKPTSPSDGNATSLAETIDNCDSSLSRTYAISSSVISFYIPVAIMIVTYTRIYRIAQKQIRRIAALERAAVHAKNCQTTTGNGKPVECSQPESSFKMSFKRETKVLKTLSVIMGVFVCCWLPFFILNCILPFCGSGETQPFCIDSNTFDVFVWFGWANSSLNPIIYAFNADFRKAFSTLLGCYRLCPATNNAIETVSINNNGAAMFSSHHEPRGSISKECNLVYLIPHAVGSSEDLKKEEAAGIARPLEKLSPALSVILDYDTDVSLEKIQPITQNGQHPT

SEQ ID NO: 717 - DNA, 47804 bp, Homo sapiens
  source (1)..(47804)
  CDS (201)..(1022)
  CDS (1093)..(1208)
  CDS (1871)..(2040)
  CDS (3227)..(3386)
  CDS (3492)..(3698)
  CDS (5159)..(5424)
  CDS (5651)..(6504)
  CDS (18486)..(18612)
  CDS (19045)..(19140)
  CDS (25901)..(26126)
  CDS (26658)..(26848)
  CDS (30445)..(30482)
  CDS (37501)..(37634)
  CDS (38681)..(38889)
  CDS (46474)..(46682)
  CDS (46867)..(47604)
  modified_base (7478)..(7577): a, t, c, g, unknown or other
  modified_base (17033)..(17132): a, t, c, g, unknown or other
  modified_base (24561)..(24660): a, t, c, g, unknown or other
  modified_base (33542)..(33641): a, t, c, g, unknown or other
  modified_base (41424)..(41523): a, t, c, g, unknown or other
gctgttaatcactctaatgcatgcagagaaacccagtttccaacaatccccatcctaggccagacacagctttaaatggaacatcccctgctgctcccctgtctgccctaatccctcctagggctgcctgtccctgcggaccaccccttggtgtgaatcaagaaaacgtgctttgccctgggcctgactaggacaggcagatgcagctggatgggctgcaggccctctgctgggggtccttgttcaggacacagcttgtaccagtatatgtggcggtcctgccctctccccagccctgcatacctcccacctgcacagcattcacggaattctcaggcccactcgcaaaacaccacagcttccagcctttccaggtggctgctccagctggccccaggtccccaccccaacccttccatctcccatctgtgtcccaggtccatgccacacaccttctgtgccccgtccgtgtcctgggccccccttaccctccctctcttgagttactgacctccatccacagcccagctgtccttcctgccccacagataccccagatcagctatgcctccacagccccggagctcagcgactccacacgctatgacttcttctcccgggtggggccacccgactcctaccaggcgcaggccatgggggacatcgtgagggcactgggatggaactatgtgtccacgctggcctccgagggcaactatggcgaaagtggggttgaggccttcgttcagatctcccgagaggctggtgagctgggggctccgaggcaccaaggagtctacatagtgtgggcccggggccctcagttggggcagaagcacaaagatggggggcccaggtccatgctgggccgaggttgcctggctggtgctccatgtgggcgggacctttttgttttggacgactcagccctgcctcaggcttggcggagggtgcaggccagacttcacccctgcagacccttcagccagcctacacagtcttttgcagcggtggccaggtgggtgtgtgggtgggtgggacgaaagctgactctggcacccccaacgcccagggggggtctgtattgcccagtctatcaagattcccagggaaccaaagccaggagagttcagcaaggtgatcaggagactcatggagacgcccaacgcccggggcatcatcatctttgccaatgaggatgacatcaggtgggacagtggcacaatcaccgggcccctggggctctccctgagggtcccacccctcctcttgcacatcgccaccttacacactctccctgcctccctttcccctgctccccgcaccccccaccttccctgctgctgcctctgagtctggtgcccaggctcagaagcagcctggtctggggagatgccacaagcccagactgaatagcgcacagaacatgtgtctgtgtttacagctcctgggggtgcggggagggacctgtgggcagaacctagtgcagaaaatgagctgtgagggaaggagcccagggtccatacagaggctgcggaccccagcccgagacccaccggcccgagttcatctccagcctaggaggctgggtgtgacgctggtggaggcatgtggggaggggctggcttcgaactggattttcccccaaggagtccctctgaaccccctgaacagtgggttacagtgggcagagcaagtgggcaggcctagggtcagaggaaagcccagggaaggtgccctaaatgcccccggccccgtttttcctgagaaacaaggatctggtgagtgattatagagcaggggagatggatagagtgggaagggatgggggccgagctggaggaggctcccaggccctccctcaccccagccctgctcctaccaggcgggtcctggaggcagctcgccaggccaacctgaccggccacttcctgtgggtcggctcagacagctggggagccaagacctcacccatcttgagcctggaggacgtggccgttggggccatcaccatcctgcccaaaagggcctccatcgacggtgagtccaggggcactccatcccccaccccacacgtctccccagcaccccctcttggggatgctcattttctgcatctgtgtaattggtgccataatccagatcccttctcagatccccagatcctatgagtccgatcatctgtggacgcgtccctccaagcagcgcttgactgggatggcgtgcgaggaaagcacgctccactcactggacggggaggaattgttgggtttttggttttgtttcttaatttagtgcctgtatttctagtgctgccaaagacattctaatctgagggtgagggtgggagggagagaaaccaaggatacggaatataccatcctggtgatcagagtgatgaggcccctgcacccccagtcctacctgtggatctggatgaatccagcaggaacagatggctcactttacaataggattgctcattttccccaaggctggaccgaggacaccttgatgacatccttcagggctattttatgaaacacagaccctggaaaggctgagccctggctgctagggcctcttagccttagggggatatataccatcacgccttttatttcagctacgttgcatctgggtgcaggtggcagcctggactgagagtagttttagcgataaaggcatctcatcacaagacaggaggtctgagagttggtgactttaggcatggggcagtgagtgaatgcgctctcaaagccctgggctctgtccattcctttgttccaccattccctgtggttgccttgggtcttcctgcttatggtctcatagtcacaagatggctgctgaggctccacccattacatcttcacagcagcatcctaacaggaaagaaggagcagggataaaagtctttcaaatggtgaggctctgagtttgcatcagcatgtaagtgctaccctggaacctccagttggctctgagtccaccaatcagaacttggtcacctggccacgcctagctcacctggccactcctagctcacctggccacgcctaactcacctggccactcctagctcacctggccatgcctagttcacctggccactcctagctcacctggccactcctagctgaaagtgagcaagtggcagagagacacaggagaaacacagctggctcaggtcagcgccaccctcccccttcttccctgtctgtaggatttgaccagtacttcatgactcgatccctggagaacaaccgcaggaacatctggttcgccgagttctgggaagagaattttaactgcaaactgaccagctcaggtacccagtcagacgattccacccgcaaatgcacaggtgagagctgcccagggtggtgagggtggggagggtggggagggtggtgagggtggggagggggaaggcgggaggccgggttcggtgcatgggggccgggcacactttctctgggcatccctaggacaggcgaggaacgcatcggccgggactccacctacgagcaggagggcaaggtgcagtttgtgattgatgcggtgtacgccattgcccacgccctccacagcatgcaccaggcgctctgccctgggcacacaggcctgtgcccggcgatggaaccctttaatggccggatgcttgtgcagtacattcgaagctgtccgcttcaatggtgagtgggtgcctgcccccctgcagcagtgaaggacagctggggggctggattttgctgttaggcctgggacaacctcagggtggaagggctgggtgaggctgagtggtctaatgggggtgcctggggctgagtgccaaagacatgagacaagttccggtccccaatttttaacactgctccctccccaggcttcagtgttccctgcgctggtttgcacagttcagatgctggggagcttctttgatcccttctgccaggaacccccagtgggtcacaccacactcccctccactgcgcagagcttgagggcatctggaccctgggggtgcacgtggggcacagttaagactgcgtggggcgcctacccagggacatgccgcccactttgagtcatgcgccaggcacaggcgtgggtctgacctgtcccttggcaccaggcttggtgtgtggtcagggctcaaaactgtgttttttgaggagaccccagtggactcaagctctgtccacggtttgtggagagatgactttctgttcaatcactatcctttacacaattcaaaactccgctcttccactgaacactcactcaccaccttctttccggccatgctctctgctaatcaattccatttaatatgactccagagcatctctgcaagctggtggaacaagcttgtaagaaaaatagagctcattgttcaagtcattccaatttcatactgtcactcagacctctctccgtgtctgaactcatcctctcgcctggacagtgaaacttttttcatttttaattgtgataaaatacatataatataaaatgtatcaccttaaccattttttaagtgtagagttcagtgatattaaatacattcagtctgggcgcaatggctcactcctgtaatctgagcactttgggaggccgagacaggtggatcacttgaggtcaggagttcgagaccagcctggccaacatggtgaaaccccatctctactaaaaatacaaaaattagctgggcatggcgacgggtgcctataatcccagctactcgggagtctgagacaggagaattgcttgaacccgggaggcagaggttgcagtgagctgggattgtgccactgcactccagcctgggcgacacagtgagactctgtctctaaataaataaataaataataaattcacaatgttatgcaaccatcaccaccatctatccccagaactcttcatctatgaaaccataactctgtatgcattaaacacttccccatcccctcctcccgccagcacctgcaaccgccattccacggcccctctctatgaattgtctaccctcggtacctcctgtggtggcatcagacggtatttgcgcatgtgtgactggcttgtttcaccgagcatcatgtcctccaggtccatccattttatagcatgggtcagaactgccttccttttgaaggctgaatcgcatcccattgtgtgaatggccccgtcgtgttcgtccattcttctgtcagtggacgctcgggttgctttcatcttgtggctatgtgaataacgctgctgtgaacgtggctgtacaagcatttcttgccaccctgctttctagtctctcgagtatctacccgggagtggaactgctgggtcatgtgtttaatcttttgaggaggctccacactgttttctgcagcggctgcagccttttcccacccaccgtgcacaagggttccgacttctccacacgctcacaacactcgttattttctggttcttggctagaagccatcccaatgggtgaagggggatctccctgcggcttggatttgcacgtcccttatgagcagtgatgcttgttaagctcctcctttctcctgctggtccctggggcctccccaggaggccagctctgctgggctggaggaccaccgaggatgacggactctctctccaggcagcgcaggaacccctgtgatgttcaacgagaacggaaatgcgcccgggcggtacgacatcttccagtaccaggcgaccaatggcagtgccagcagtggcgggtaccaggcagtgggccagtgggcagagaccctcagactggatgtgagtgtgcagaccgagccccaggtgggcatgggcccaggatcccggaggcagacgccccagcctgtgttttgtgcgtcccaggtggaggccctgcagtggtctggcgacccccacgaggtgccctcgtctctgtgcagcctgccctgcgggccgggggagcggaagaagatggtgaagggcgtcccctgctgttggcactgcgaggcctgtgacgggtaccgcttccaggtggacgagttcacatgcgaggcctgtcctggggacatgaggcccacgcccaaccacacgggctgccgccccacacctgtggtgcgcctgagctggtcctccccctgggcagccccgccgctcctcctggccgtgctgggcatcgtggccactaccacggtggtggccaccttcgtgcggtacaacaacacgcccatcgtccgggcctcgggccgagagctcagctacgtcctcctcaccggcatcttcctcatttacgccatcaccttcctcatggtggctgagcctggggccgcggtttgtgccgcccgcaggctcttcctgggcctgggcacgaccctcagctactttgccctgctcaccaagaccaaccgtatctaccgcatctttgagcagggcaagcgctcggtcacaccccctcccttcatcagccccacctcacagctggtcatcaccttcagcctcacctccctgcaggtgggtccgtaggctcccaagggccagggcagggagggggactgtccgcaacgttacaaagccaaaagggccaggcacagtggcacacgcctgtagtcccagcacctttggaggctgaggtgggtggatcacctgagtccaggagttcgagaccagcctgggcaacatggcatgaccctgtctctgcaaaaaatatgaaaattagccaggcatggtggtgcgtgcctgtagtcctagctacttgggaggctgaaataggaggatcgcttgagcccaagagttgaaggttgctgtgagccaagatcgcaccactacaatccagcttgggtgtcagagtaagaccctgtctcaaaacaaaaagataaatgccgtttttagagtcactcttttctattttggttcctgtgttgttttgtttttttttttttagacagagtctcgctgtgtcgcccaggctggagtgcagtggcactatctcagctccctgcaagctctgccttccgggttcacgccattctcctgcctcagcctcccgagtagctgggactacaggcgcccgccaccacgcccgggtaattttttgtatttttagtagagacagggcttcaccgtgttagccaggatggtctcgatctcctgacctcgtgatccgcccacctcggcctcccaaagtgctgggatgacaggcgggagccgctgcgcccagtgagtttttttttttttttaaggccacaggaaatggagcccctcccctcctgtgacagcagctcagttagggccgccatctcccctgctgggtccttgaaggaaaacggggcagtcaggtggggagtgtgggcctccagagatctttctgtacaacagtgaagttattttttaaaccaaaatgctcttctacaatttggctcacatatggaaacaggtcaaagagctatctgaccggttttcctgtttccacaagggagtctctgctnnnnnnnnnnnnnnnnnnnnnnnnnnnnnnnnnnnnnnnnnnnnnnnnnnnnnnnnnnnnnnnnnnnnnnnnnnnnnnnnnnnnnnnnnnnnnnnnnnnntggattctctgcagtggtattatctgatatgacatattgtacttcaactgaaagattcccacaatcattacatttattaggtttctacattgtatgtctcatatgattattactgaagagttaatcatgaggtaagggccagtgaaaacattcctcacgtatgagttctttgatgtcgtgtaaggtttgtactccggctgaaggcttttccgcattcattacactgatagggtttctctcctgtatgagttctctgatgcactgtaagggatgaattcttaatgaaggcttttccacactgatcacattcatagggtttctcaccagtatgaattctttgatgttcaataaggtaagcactctggctgaatgcctttccacattcattgcactcataaggtttctctccagtgtgaatgacctgatgcacggtaagggatgatcgtccagtgaaatgttttccacacaccatacactcataaggtttctctccagtgtgaattctccgatgttgagttagagatgaattcttactgaaagcttttccacactcgttacattcaaaaggttttactccagaatgaagtctctgatgttctataagatatgtactttggctaaaggatttcccgcatttgttacatttgtaaggtttttctccagtgtgatttcgctgatgtagggtaagagttgagctcttactaaaggcttttccacattgactacactcatagggtttttctccagtatggcttctctgatgtacaataagatgcatgctttgactgaaggcttttccacattcattacattcatagggtttttctcctgtatgagttctctgatgaactgtcaaattcatgctttgggtaaaagctttaccacattcattacatttgtagggtttctctccagtatgaatcctttcatgctgaataagagatgaattcttatggaaggctttgccacactctttacactgatagggtttctctccggtgtgagttcgttgatggacagtaagattcatgctctgactaaaggctttcccacattcattacatttatagggtttctctccagtatgaattctttgatgtacagtaagggaggatcgttcaatgaagtgtttcccacatacattacacttatagggtttctccccagtatgaatcctctggtgcttaagaagggatgagctctgactgaaggttttgctgcactgattacattcatagatcttctttcctacaaacattctttgagttttaattaactcagaattttgtgtggcatcttctccatgtgaattacagttatggggcctttttaccataggaatgctttgctgtgtatcaaggattgaatcctgactggaacatctttcaaattcattacctccacatactctcatctcagtgaaggtttccttatgggtaactcccacttggctcagatgactatcctgttgtccctctaaccaattattaggttcccaggtttcccctagagtagaatgccagataccttccctttccattgttaccccatggcataaatcttcagtaatacccggcttcggagttggctctttggtttcaagtcttgtctcccagtctgaaaaaaaaaaaaaattcaaatgcacattggtttctgtgctaggagactggaaactgcataaggtaggaatgagagaattaaactagctatcaactaaaataactgctgagcacatttgagagctttcaaacatgtacccaaaattaggtagagaaataggaagggagagaaacaacagtgaactgatccaaagataacaggggaactgaaagcaggggatggcagatgtactgcataagcagagaaaagagtgagcccattcaggagggatggacagtgaaggcactgaccactggagtaggctacataatgaagatggaactaaggaaacacatgcagaagagctgggattgggaaaggcagatcaggaaaccctgcacactgtacctggtattcctgccagaagtttctttcctcctacgaggccacctagaatcctacaccaaattaatcttcctaaaatgtcacagtgtgacacaatgtaaagattgctgactcaaagtcagacaaacttggattcaaaccgtggctcttaacaccatcttaactagttacttgtctcactggctctgagggtcacagatataaaatgaggattaagaaatatggtcaagcccgggtgtggtggctcatggccgtaatctcagcactttgagaggccaaggcaggcggatcacttgaggtcaggagttcaagaccagcctggccaaaatggtggaatcccatctctactaaatacacaaaaattagctgggcatggtggcaggcgcctgtagtcttagctacttgggaggctgggatgggagagttgcttgaacccaggaggtggaggttgcagtgagctgaggtagtaccactgcactccagcctgggtgacagagtgagactctgtctcaaaaaaaaaaaaaaaaaaaaaaagggaaggggaaaaaaaaagaaagaattttgatttaggaagtaaataaaatgaaatatgataggaagtaagtaacataatctagggggtatagtttggatgtgtgtccccacccaaatttcatattgaaatgtaatccccagtgttggaggtggggccttatgggagatgattggatcatgggagtggtttcttatgaatggtttaacaccatcccccttggtactgtcctccctatcatgagtgagttcttgtgagatgtggttatttacaagtgtgtaacacctccctcctcactcttgctcttgccatttgatgtgcctgctcccctctcacctactgccatgactgtaagcctcctgagcccccccccccaccgtcaagcagatgctggcactatgcctcttgtacaggaactgtgagccaattacacctcttttcttataaatcacccagtctgaggtatttcttcataacaatgtgagaattgagtaatacagaaaattggtacggggaagtggagaatttctataaagatacctgaaaatgtggaggtgactttggaataactgggtaacaggcaaaggatggaagagtttggaagacccagaagaagataggaagataagagagagtttggaacatcttagaaactggttaaatggttatgaccaaaatgctgatagtgatatggacagtgaagtcttggttaaggtctcagatggaaatgaggaacttactgggaactgcagcaaaggtcatttttgctatgctttagcaaagaccttggctgtactgtgcccctgccctagggatctgtggaactttgaacttgagagaatggtgattgagggcatctggtggacgaaatttctaagcagcaaagcacacaagaggtgggttgtctgctaacaatctatgctcagatgtgagaacaaagaaatgacttaaaactggaactggtatttaaaagggagtaagtggaacatttgcagcctggccatgtggtagaaaagaaaagcccattttcagggaaggaattcaagcaggctgcagaaatttgcatgagtaaaaaggacccaagtactagtaagccaagacaatggggaaaaggcctcaaaggcatttcagagaccttcacagcagccccttccaccagaggcctaggatgactgaatggtttcctgggccaggcccagggcccggtgccctgcacagccttgggacactgctccctgcatcccagctactccagatccacccacggctgaaaggggccaggttacagctcaggctgctgcttcagagggtgcaagctgtaagccttggcagctttgatatggtatataaagcctgtgggtatacacagttgaacagttaaggcttgggaaactctatctagatttcagaggatgtatagaaaagcctaggtgtccaggtagaagcctgctgcaggggcagaggccacacagagaacctatactagggcagtgcagaggagaaatgtggcattggagccgccatgtagaatccccactggggcactgcctgtgagaagagggccactgccctccagactccagaatgtaagatgcactggcagtttgcaccctgcatgtggaaaagccagagacattcaactacaacccatgagagcactgcagggactgaacactgcaaagccatgtgggcagatctgcccaaggcctagggactccacccctcgcagcagagtgccctggatatgagatacagagtcaaagaaaataattttgaagctttaagatttaatgactgccctgatggtttctggactttcatggggcctatagcccctttcttttggcagagagttctcccttttggaacaggagtgttgacccaatgcctatacccccagtatatcttggaggtaactaacttgtcttttattttataggctcataggtagaagggacttgccttgtctaagatgagactgtggacttttgagttaatgttggaacgagttaagactttagggattagtggaaaggcaagattgtattttgaaatgtgagaaagacataagattgggaggggccaggggcagaatgatatgatttcatttggatgtgtgtccccacccaaatctcatattgaaatgtaatccccagtgttggaggttgggccttatgggaggtgactggatcatgggagtggtttcttatgaatggtttagcaccctccctcttggtactgtcctccctatcatgagtgagttctcatgagatctggccacttaaaagtgtgtagcacctccccctgccactctctcttgctcctggttttatcatttgatatgcctgctccccttttgccctccactatgactgtaagcctcctgaggcttccctacaagcagatgctggcactaatgcttcccgtacagcctgtagaaccataagccaattaaacttttcttataaattacccagactcagccaggcttggtggctcacggctgtaatcccagcgctttgggaggctgaggtgggcagaatcacccgaggtcaggagttcgagactagcctggccaacatagcaaaaccccatctctactaaaacacacacacacacacacacacacacacacacacacacacacacacacattggccaggtatgatggtgtgcacctgtaatcccagctactgaggaggctgaggcaggagaatcacttgaacccgggaggtggaggttgcagtgagctgagattgtgccatcacactccagcctgggcgacaagagcgaaactccgtctcaaaaaaaaaaaaccccaaaaataaataaatgaataaattacctagtctcaggtgtttctttatagcaatgtgagaacagactaacacagtatgtaaactaccctttgagaatatactcctctggaacataaagtaccagaacatacatgaaacttaaactcttaaaggaggatgacacaatctagaggtttcttccccttaaactttaagcaggctgtaatttattcacaggggtaagacagtcctaagggatactaccatttcctaaatacgcattccttaaagatgagaactggtggtagggacaggccaggggatctgctaaactgtttgagaggaggctggaaaaggaccttgtagctactcagacttgaattttcttagatcctatttcttatcccagacaaaataaggggtagaggactggcactgcaacctgagaatcagctttccgattgctgatcgaagtcaacagagagagatcaacactgaacaaacaaaccaaggcctatgggcacaggctttcctgtgaagcaagaaataagcattaaccaggcctctttcttccaacctgatctgcttaagtgaaaagagagaaaaagtggaaagacaaccaggctccacttccaaaacacatacaaccaagtaaccccaaacagaggaactggcaaactgagtatgaaaataccagcaggtggccgggcgtggtggctgacacctgtaatcccaaaactctgggaggccgaggtggacggatcaccaggtcaggagatctagaccatcctggctaacacggggaaaccctgtctctactaaaaaatacaaaaaaattagccgggcatggtggcacacacctgtagtcccagctactcaggaggctgaggcaggagaatggcgtgaacctgggaggcggagcttgcagtgagtcgagatcgtgccactgcactccagcctgggcgacacagcgagactccatctcaaaaaaaaaaagaaaataccagcaggtgacatgtgaattggcagctccctgttgcctcacctctgtacaggggtcagccagccaactcaagttctttgggaacatttaaggggctatgtattaaacaacataacaagcaaaggagaatccatttacactattagacaaatacaaagtccagacagaactgcttctatccaaagataaattatacacagaaaatattaagtttggaaactatgaagaagttcaggaaataaattttaaaaataattaaaacagagaatgagaagaaaaaagaagtataaagaccaaaagaagaaagaaaaatgttgggagaaaattaagtgcttctagtcatcaaaagacatcataaaaaaagataaaaagctgagtgcagtggctcgcgcctgtaatcccagcactttaggaggttgatgtgggaggatttcttgagaccaggaattttaaatcacctagggcaacatagtgagagcccatctctacaaataattcaaaaactaccagatcatggtggcgcacacatgtggtctcagctactcggaggctgaggtgggaggatcgcctgagcccgggagttcaagtctgcagtgagccgtgatcatgctactgcacttcagcctgggagacagagcaagatcctgtctcaaaatataaaaataaaaataaaagctaaaaaaatagaaactacctactgggagaagatatttgcaacacatgacccacaaaaaactagaatggagacttggaaaataatgcttatgaaacaccaagcccactagaaaaatgggcaaaagacttgaataagcacttaaggaaaggaagcctgaatggtctgcaaacgtaagcaaagatgcccaatctcaacagtaaccaagggaaagccgattaaagccgcaacaagatgccattaccacatccgcccaagtaacaaaatgtaaaaattcaaactgacagcttcagattttggaaagatgcaatagtgggaacttccacatactcctggtggaaatccaatctgattcaagcattggaaaaatagtttagtacagcctagagcaagcacatgggctgatacagcaagtctaccactaggtgcatgcacttagtaactccactagtaactccaccttgcaacagtgtgagaattcatgattcttcacacagcactgtgtacaacagcaaaaactggaaacatcacaaatgcccatcatcaaaaaatggataacaagatcgtcaagtgttcatacaatggagtaactgacaacagtgagcattaataaactaaagccacacatatcaatatgaatgaataagcaaaggcacataatatatatgtatatgtatatatgtgtatatatatgtgtgtgtgtgtgtgtgtgtgtgtatatatatatatatatataaagattcaatttaaagttttaaaacagaccaaaaccagatatattgtttagagattcaatgataaatggcaatagtataaagagagggaaaggaggtatcacagaagtcagaatactggttatatcttgggtagagagaggtaagaggatgtgaatgaggagatgcacacaaagcatttccatggcactagcaatgttctgtttcttgatctgggctctggtaactggatatctgccttattattattattattattttgagatggagttttgctcttgtcgcccagggtgtagtgcaatggcgcaatctcggcttactgctacctccgcctcctgggttcaggtgattctcctgcctcagtctcccaagtagctgggactacagggactacaggcatgtaccaccatgcctggctaattttgtctttttagtagagatggggtttcaccatgttggccaggctgatcttgaactcctgacctcaggtgatccacccaccttggcctcccaaagtgctgggattactggtgggagcccctgtgcctggcctgctttcttttttcttcatttgtctttatcattattaactaaaaagagaagcagaagggcacagtggttacgataacactaagatgaaacttcggacttttgagttaatgaactcaaaatgaactctggagctccaccactattagctgtgtgaccttgggcaggtttcttttttttttttttttgagacagagtctctctctgtcatgcaggctggagtgcagtggagcgatctcggctcactgcaagctccacctcctgggttcacgccattctcctgcctcagcctcccgagtagctgggactataggtgcccgccaccatgcccggctaattttttgtggttttagtacagacggggtttcaccgtgttagccaagatggtctcgatctcctgacctcgtgatccgcccgcctcggcctcaaaaagtgctgggattacaggcatgagccaccacaccttgcgtaggtttcttaacctctctgtgctctattgtccaaatttgttaaatggtacctatcttatagtgctgatataagaacaaaagttagttaataaagggcttagaagagtatgtaggtttttgttgaacagtcagattttacacattcttctgtgtatgtatttcaaaaatcaaattacaaaaagaacaaagtatttgctattctggaaaatattaatcattttaagttcaaacatatttttgtactacagaaaacttaatagtaggattcagtataccttcatggaatttagacttaaaagttagttttgaggagttgatgcttacgaaagaaaaaaaaaaaaagattacctacaaatttttaaaaaactggcagaagagattttctcaggaacacaggatgccgaaagacaatggggccatgcctgcaagaactgatgtgactcaagaactccacatggtcagcactccacacatgtgcagagaaaggcaaaacccagtcttaaatatgaagattcagtaataacagtactcctaaaccatttctgctattatttaaatatccaatttgaataaaaaataaacatgaatggggaagttagtttgggtataaaaagactggcagtgacatgctgaatccacttcaaggatgaacctcgaagatattatgctaagtgaaataagccagtcacgaannnnnnnnnnnnnnnnnnnnnnnnnnnnnnnnnnnnnnnnnnnnnnnnnnnnnnnnnnnnnnnnnnnnnnnnnnnnnnnnnnnnnnnnnnnnnnnnnnnngtctgaaggagataagctttgtacgcctttgtgattctgtacaggatgctcaattcagcatttctagagtatgaacaaagtgcaaacaacctaaacatccagtgctaggggagttacataaactagatcatctgtacactgaactactgggcagcatgtaaacagtggtgaccaggatgctgttatttgtataatgggattttatttttatttaaatatagaaccatatttgcatgaaaatcacctgaagagacatagcaaaaagttaactttttctggtggtagaaagttagatgagcacttcttgttgttttgcttattgatcttttagaattttctagtaagcttttttaagatgattcgttttgttttgttttttaagagacaggatcttactctgttgcccaggctggagtgcagtagtgtgatcacacgtcactgcagcctcgacctcctgggctcaggcaagccttttgtctcagccttctgaataaccgggactacaggcgcatgccaccacacccaattaattaaaaaaaaattattttttgcagagatgaggtctctctatgttgcccaggccggtcttgaacttctgggctcaagtaatcctcctttctcggcctcccaaagtgctgggattataggcgtaagccactgtgcccagccaagaagatgactctcaagaaggggagatggccctagttcagagcagtaacatgccatccagtgaaggaggagagagatagaagaacaggagcttttggggtggggagggagactactgaccatagccttctcctctggcttgaaaggttatgtagcccaccacctgggacctctcctgacacagccatgcctggaacattctcatagccttccctactgtgaatgtcagtgtcatctttcccaggactcatagagatggcccgagttgaggcagaactaggactcagtgaccgcctttcccagcaagcctggtggtgttccacctatatctccctcagtgaatgtgctggtgcctccttccgaaacctgactgtcaggtgtgacctgtaagatgagggtttggtctaggtgatcggacgtttccaaatctaaagttcagtgttttcttgctctgattttgtttcatgggttcaagtgcttctcttggttggcctctgtgttcaagcttcctgaggggacggtgtttcactcaccataggtaaatgataaatgtgtgcttggtaactgaaaagttgtccagaaacacttgaaatacttagaaccctaagttgtgacagggttgcttctcagtcttctcgttgtggggacagtcctggatgaacaggagtgggtttgccattccaggagtccgtgacgttcagggatgtggccgtgttcttcagccaggacgagtggttgcacctggactctgcccagagagccttgtaccgggaggtgatgctggagaactacagcatcctggtctcactgggtaaggaactttcctcctgatgcagaatctgccaggagagcaccttagcaccctcagggggcacatttggagggcttggccaggtcggctcacaggtgggctccaagagtggccattgccattccccttggttgtatggagagaccttggcttagtagagttgatgaaggggtcttttctctgcttttcctgtcttctgcccactgagctctgttccctgagccccacagggtgttcctgctgagaggagtgcacaaccagagccctgactttcttcctgggaccatctcctggttgtcctctaggagcccagtttgaagcctctcagaacaaacctcctccttccctgtactgcccctctgccctgggcactctggggctggacccgcctgctacgatggccgctcacgtttctttcttgttcatgaacagggattctcttttccaagccaaaggtcatctcccagttagagcaaggagaagacccctggatggtggagagtggagttccccaaggcgcacatctcggtgagtgacagagtaattgggagatgggcataacattttcccactgccagggcacagcgaggaggctgcgctcaagggtctccttgatgtgccaggccagggggaaatgctgggaaggtagatcctttctcttttgattacttgatccatcatgttcagaggagggttgaattctcccaatatgggttgcactgttttcagatatcttgtaatttgcagaatatgtaatacagtatatcatgtgtaaaggtttataattcttttatcttcctttatccttgcttttactggattgattcttttcctaaattattttccttagtggcttgaacattacattgtttttttttaatcactacaatacattcctcatagtttcatcttggaaccatcttttgctttgatttctttggtgtacaacttaattatacatggttcaaaagggggaaaaaagcagatatatgtgtatgtatttacatacatgaaagagggaaagaaggtgtgacaaacggtaacagttacggaatgtgagtgggcttccggatactcatcacgctattcttctcttttctgtgaaaatttagaaaataatgcatcccagatcccagctcctaaggcatgtcactttttccctatacgcccttggatgactgcattatcagcttccgcattcattctcctgtgaattctgtctatgcttctggcagtagaggaggcctctgttgagctttaccacgtgtctggtgtttttttctcacctgggcagggcgtgggctttctgggccagttcacttttgcgtttccattcgtgaactctgtcttcacatttttccctttggctcgactagaatattttcttgggtaacggttttcaaaaaaggttcatgtgtgcaatatctgtacgtgtcaaaaatcagttgtttttttctctcctctgagatttgttgttttggatctagaattctggcatctgtttttttttttttttttcctctctgcattgtccaaactgctccactgtctttgggcatggagtgctgctgacaaataatcccattagtcagattctatttcctgtataggtaacttgttttttcttttctgtcttctctttggaatcttacaggacatcatctttatctttggaattcagacttttcattaggttatatgaaagagtatttttttttctttgttctttggcactttactggcctctttgctttgaagattcagtccttcctttcatttcagggatcttttgtttctgccacattccaccaacaatgtgaggcaattgactgcaagagtagtgatacaataaaatagaaattcaatcagacatctagaaaataaatagatctgtagtaaggaccagaatggtagctataaatgagtttcaaatttcgctctgagctttctggttggcaaataaatcattggtatcacattgtcagtgttgttttacaagcatttttaaaaattaattattttaaatttgtacaaattctacatgctgttgtaaaaataggagcaaaaaaaagtcacctggaattttaccaactatgatcaattattgttgtttattacccattcaaactgcatatttgcttaaatgtgtttgtgtgtgagagacagacacagtgagagagagatacagaaagattgattatacagtttgttcttgatcctgttttaattgtgaatgtcattcagttattcagccctcagtgaatagaggcctacctcattgagaggactatattgtatgttaagccaattaaacagtcttccttttggaaattttagttaccagtttttctctgttactaatattgctaagatggttatgggaatacaaagccataatataaagaggcaaaggtaccaagagtaaatcatcacagtacaaagacatgagtattgtgattgaaaaggccaggcatgtggattaaaaatccacaagggattttttgaagcactattcaacttcattaaattaaaatcaatgaaattccaacgaagcacaagttaccatttttcccttattaccaaggattaagaaatagatacccaatgtgttgccactgctgtgagtgataagcagtatcgttagtgggactgcaactggtagtctttctgaggatggtctggttttattaaaatcaattccaagtgtagaaatgttaagataatttctgcacagataactgtgcagagttacaaagatgttgtaaaagaatgtttgttataacatgaggcatcactgccacaaaaggaggagggtaaatgactctcaaaaagggatttagtaaatgatgatgttttcatgcattggacatattatattgccattaaaatgatgatgtcagcctacatttattgacatggagagaagctcatgatttttaagtgaaatggaggtaaaggaagcttaatttcaatccattttaattttttaattaagtgattttttatatgcagaaaattctggtgagctatgtcccacatatgatagtgattacaattgcatgatgtatttatgggtgagctatgtgttcatttttatagttttctgtgtttttcttatgatgatatatttcttttgtagttaagaaaataaaagctgtttcataaaatacaaaaggaaatacatttcttttgaatcaatgattccatttcttgtactgtatcttaagtaaccaaaaaggtagacaaaaaattactctcaataatgttcttttctcccagtattccccaatatcatgataatggtgttggtgtccattgagttgcccagaccaaaagctaggagtcatccttgagtcccctctttcattgcctctgcgctctattcgtaggtgaagatacctgccagtgctacttgcagaacatcccagatacgcccacctctttccgtctcttatcaccacatgccagtgtcagccaccaccatcttcatccaggaagagtgcagcggcctcattgcctgttctgcagctgcccttgttctctttctccccggccccattacagtttgtttttcatatagcaaccagagtgatcctttttaaacaaaaaccacatcatttcatgtcccttctagccctcagtgatgctgatgaacttccaatatcttcctgtatcctagaaaacgctccacaatatagcctggcccacctcttttcctcatctgtgacactctcttcttgttcactctgcttcagctatcatggactgctatatgtcctggaaaacaggaagctattcctgcctagggcctttgtgttactgttctttctgactggaatcacctttataccctaatttttgtctggccagcgcttgttatttagatctcatctttaatttcattttctcatcacccagtttaaaatagttgcctattcactcttattacacagtgcttcgttcgtgttttcttacagttctcattgctcctttgtactgctgttgatttgttacttggtcattgtctgtatcacactgctggaatgaaaaccttgagagtaggcccttgtctggcttgtgccctgtcattctcagagtcttaacgtttgcgtagcacacagtaggcactcagtaggtattacttgagtaagtggatgccattatttacagcattctgaggaggcctagagcagcactgcttgacatcctgtgtttggcggagctcttctctttcatttaattttagcccctctgcagtttttcccttggtatttacctgagtgcactggtagctgccctgggagatgacgctgagggacacaggctgtgttcagaagggcctcatagcctagcgagctgtgctttgttaatagatcgagcctggctcttcctgttgtcccctaatttcctcagcccacctatatgtaggtttcttcagacccttcccacccacatgtctgtcatcctgcttccttcctcctcttctttttcccatccttttctaagatttcaaggctttatattttttaactatccttgtgcgtttttatgtcactttttaaaattctgagttcaagagagacttatatgttttgtctactttaggatgggaaagcttgtttggaaccatagtttctaaagaagaaaatcaggaagtcatgaaaaaactcataattgatggcacatttgacttcaagttggagaagacctacataaatgaagataagttagagaagcaacaaggcaaaaagaacagacttttcagtaaagtgttagttaccatcaaaaaagtctacatgaaggagaggagctttaaaggtgttgaatttgggaaaaatcttggtctaaaatcatcgcttattagaaaaccgagaatagtttccagaggaaggagaccccgttcacagcagtattcagttctctttaaacaactgggggtcaacacagtgcgtaaatgttataaatgtaatatctgtgggaaaatcttcctccacagttcctccctgagtaaacaccagagaatccacactggagagaagctctataaatgtaaggaatgtaggaaagccttcagccaaagctcatccctaactcagcacttgagggttcatacaggagagaaaccttatatatgtagtgaatgtggaaaagccttcagtttcaccacatctcttattggacaccagagaatgcatactggagagagaccttataaatgcaaggaatgtggaaaaacatttaaaggtagttcatctcttaataatcaccagcgaattcacacaggagagaagccctataagtgtaatgaatgtgggagggccttcagtcagtgctcatctctcattcagcaccacagaattcatactggggagaaaccgtatgaatgtactcagtgtgggaaagccttcacttcaatatcgcggctaagtaggcaccatcgaattcatactggagagaaaccctttcattgtaacgagtgtggaaaagtattcagctatcactcagcccttatcatacatcagagaattcacactggtgagaaaccatatgcatgcaaagaatgtgggaaagccttcagccaaagctcagctctcatacaacatcaaagaattcacactggagaaaaaccctacaaatgtaatgaatgtgggaaagccttctcttggatttcacggcttaatatacatcacagaattcacactggagagaaaccatataattgtaaggaatgtggaaaagccttcagttcccactcaggcgttaatactcatcgaaaaattcatactggagaaaaaccttataaatgtaatgactgtgagaaagccttcaaccaaagctcagctctaattcagcaccagagaattcatactggagagaaaccatataattgtaaagtgtgtgggaaagccttcagacagagttcatcccttatgacacacatgagaattnnnnnnnnnnnnnnnnnnnnnnnnnnnnnnnnnnnnnnnnnnnnnnnnnnnnnnnnnnnnnnnnnnnnnnnnnnnnnnnnnnnnnnnnnnnnnnnnnnnntcattgtggggggctcgggccaggctggctacagagagaaacacttggaatgcttttggccatgcattagtgtcatctagataaccaggtgacaaaaatgcaacttgtacatcttaaaaactgggcacttttctcattttattttcagaaagacacactgatgaataattattgttaacaattttttaaggatagtgacgcggctgaggcaagtggatcacgaggtcaggagttcaagaccagcctgaccaacatggtgaaaccccgtctctactaaaaatacaaaaattagccgggcgtggtggtgggaacctgtaatcccagctacttgggaggctgaggcaggagaatcgcttgaaagaaagaaaaaaaagacagtgacatgtggtacacagggtggcagacggaacacagggagtgtgagtaccacccagtgctggcacctgcaaaggaccatcagcaccgccgagaggtccttgagtgatcagaaacaaccaagccttgcgttcttttcccttcacaaactgttacaaaaatatttaaattgccaaagatatatttagcaagagttgaggtgggccaagaagcagggagccctcccactgcgacacagatgggggtgagagattgacgtctccatgttgtactgccgactaagccagtgctacaggggagggtggggcaaagagcgaaggaaaggagaggaatcagataaggggaggctatggcgttcttggattaattttgaattaaattgttttctccatcaaaagcactcagtttaaagcaattttgttccaagactctgaggctcggccacagtaacctggaagcctgagtctgctgcagggacaaatgctgttctagaagcagttagtgaatatggaggaaggtaacgtcttagagagggcgctgtcaaagccaggcaaacaggcaggcagggagaaagaacccagatgacaaatcagtcagctggagatgaggggcacccggcaggagacgggcagaggaatctgaaaggggaaatccaaagcaactgttttttttcggtaacaaggaggcagtttcagtggctgttcccagaagcccatagaaatgaagaacctatcagtctagatgccaattcccttctcaaactgggcagagtggagctggcactgtgatgggtctcggaacgctccgaggtgggaggagaggccaggagctgcttctcaggctcttacctttttctatggcccaggtgaggggcggggagactggcctcatgtgaaggtcatggtcgtggtgtaccagagcagtcttgtgtactacatgaagcaggcgcaggctggacgtgtgaagacagagctgctgaaggtggcacatcaccaggtggccaagtctgtccctgaagagtcccaaatcgtggtccttcatcttgtcacagctgggtatgtcgacatggccattaggactacaagagcaaggtatggaatgaactgctctttctaggaaacactggttctttggggattaacccagctgaaggtggggcacagaaaactccctctcagtaagtactgaaatgtctaacaccacacagatcagctggtagagaagactgtggctgaaaaagtcttactgcagggtcctcagaaatgtacttttaggggttgagctggggcaggtgagaatgcccaggtagagagcagtatcatccacgtgagaaaagtatgcctgggactcaggcagtgtcccctcccctagtcgagaaggccgtgcagtgagctcgtcatcctacagtgtaatacagtaaagccactgcctggccaagtactagtaccatcaatatattcaagtcagcctgggcgtatctaataggccagtgacgtactttttgcctttccagacagggatgagtgaacaggcatctcggaggactgatttcatgaaaacccaagcctgatgagaggcgaactcagggagagtgcactgtcttctcagatgggggccttcagcctgcacttaatgccgctgacgctagttcctggagccgcggctgaggtgaatgagactcaagtggctgcacgccttggtcctggctcaacggtaggcacataccaagtagtggtagttctcatgcgttcattacagatagacaaaaccaccaaccaactcagcttagaaacgtgcttctcagggattcaaggtaagggggtggtagttaagacctggcacattacatggatggggtgaagacagacatctgtagcagtgaacgtggttttttcaggtttactctggaatctgagggtgtcagctgcgtgaagctgcagatgaacttctgaggacatgggacacaagcaatcccaagaaacctcttgaaatactgcttcacatgcagcttaatagggaagaaagtctgagttgctgatcagctaacaggagatgctggcccacaaaggtggcctttattagatgaaggctgaatttagattacttggactttgaagctgctggaagcttccaagtctatgttgcaacccagagcccactgagttctaccatgatatagaatatactcttctgtaacatgggggtgaggtgctccattctgaggggtcagggggttgctcaacttgacggacagcacttccacataccaggaacttgccacttcactttccagaaaaatttgcttggcctcccatcttcactgcatgatatattccagcttgcagtagtgaaggctcctccattccttgtggtaggaaaagggagagggccctcagaggctgtgtgtgtgtgtgtgtgtgtgtgtgtgtgtgtgtgatgcacagatgttacttatctgtgtgatttctactgaaagcactgaaggattaaagacggggaaggtggccgggtgcggtggctcatgcctgtaatcccagcacctggggaggccgaggtgggcggatcacaaggtcaggagtttgagaccagcctggccaacatagtgaaaccccaactctactaaaaatacaaaaaattagctgggcatggtagtgggtgcctgtagacctagctactcgggaggctgaggcaggagaatcacttgaacccaggaggtggaagttacagtgagccgagatcacaccactgcactccagcctgggcgacagtgcaagactctgtctcaaaaaaaaaaaaaaaggaaaagaaaaagaaaaaaaaaaaacagggtaaaggaaccatacttgcaggacgactgtaccactcaaacttttgaacacggacatggcccttgccagagaatatcaatggtgctagtgaccacttcttgactcatggaattactcaacatttttctcaccactgtcagcatgagtctttaaatagtggaaggcccagatggaggagaggaaatgaccacttccaaatgcaaaagcagaaattcaaagctgtctgctttcctatgaatatagaattactacctccagaaacctagaaaaagcaggggaaggaccaggatgcagcagtttatcctgggagtagtaaatgtactctaatgcagtggacacagtggactgtacagccaggggaagagagtgggtcagagcattctgagaactggccttggggctttcacctcttatatcaattgcacatagagaaatgggcagcgacagatggaggtgactgggaatagtacaacgtaagtgggtgggatcattgcacctgaagctgagcaagtccctgactgatgtgtagagtcactaagtacagaacaattggagggtaaaggcggcacaggcaaagcccctccttcaggtgccatcccaggatcagtcaagctgaagcccagaggaaatgcataactcaagaattttgatcaagttgtgccttctggacagagataccaagttctgaaggctggatttgggtgtgatattcaacatcatggactgtgtctgagaccagaccaccacactccccataggggcagtgataggtggcaccatgcagacagttaggcgttgctaagtcagaagagggtcatttggggcaaatgaatcgtctcacagggattctacagggatgaagccagcagacagaccagagagatctgacaatggatggtttgaagcaaaaggcaggaagcatggtttaaataagtgtgggtgacgtactttctctacactgggtgtcggtggtgtgggtgaggagaggactaaggcttccattaaagctggcaactctcttatgtaagagaatctagtagagtgcaacgctcgtaggccattttacctttttgttcctttgcttttcagctttaatttttacaatttcagtttctctaatagtcaaaatgtaatttgataaaccaattttttaatgctgttaatgaagctccattttggttctgatgcttggtaattcagacaaatcaaacagtactgctatttgaggcagtattaaagaatgaggagtgtttgccattcttttttttttttttttttttgagactgagtcttgctctgtcgcccaggctggagtgcagtggcacgatctcggctcactgcaacctctgcctcccgggttcatgccattctcctgcctcagcctcccgagtagctgggactacaggcgcccaccaccatgcccgggtaattttttatatttttagtagcgatggggtttcaccctgttagccaggatggtctcgatctcctgacctcgtgatccgcccacctcggcctcccaaagtgctcccaaagattacagacgtgagccactgtgcccagccgagtgtttgccattcttaaatgcccaaaccccatgacactgtgaaacctgaccctcagtaaataaagtgactatcttgatgcaagctttcatagttattctctagaacggattatctcacattcaataattcatctactcagtctcaaaggtcttccatacaaactgcattcatatcacttctctccaatatgatgtctctgatgctgaatgaggtttgcagtctggttaaaagctttcccacatttattacatttatagggtttctctcctgtgtgaatcctctgatgttgagtcaggtgagtgcttcggataaaggctttctcacagattttacatttgtaaggtttttccctagtatgaattctcttatgttgggtaagggctgaatggtcactgaaggctttttcacatatgttacatgtataaggtttttccccagtatgaattctctgatgttgggctagtgctgattggtcccgaaaggctttctcacacaagccacatctgtaaggtttctctccagtgtgaattttccgatgtcgtgcaaaggatgaattatccctgaaagctttcccacattcattacatttataaggtttctctccagtatgaattctctgatgttcagtaagggaagagttcaccctgaaggccttcccacattcattacattcaaagggtttctctccagtgtgaattctctgatgctgaaggaaacttgtactctgattaaaggcttttccacattcattgcatttatagggtttctctccactgtggatattctggtgtttggtaaggtgtgccctgcacacaaaggctttttcacaaatgttacatttaaaaggtttctctccagtatgtattctatgatgatgggcaaggtgtatatttcggataaaagcttttccacataagttgcattcaaaaggcttctctccagtatgaattttctgatggtacgtaagtgaggagctcactgagaaggccttgccacattccttacattcatagggtttctcgccagtgtgaattctttggtgatggataaggtgcgtactctggtgaaaggctttcccacattctctacattcatatcttttctccttaatatgaattttctgatttgcatttttttcattatgaattttctgatgtttattaagagttgaactcttagagaagacttttccacactcactacactcaaaggcatttttgctaggttgaaatccctgactttgatcactgtgaagagatgagctcatagtgctcccggattcatcacattcctgtgatggggtgttggggtgagtgagtaccactcgctgcaaactgatctcctggcctccacattgccactccagcaggctagcacacttccagtgactactgctactgaatctttcctttattgtccattgatccaattcttcttcaggaatctctgccttgacagtagatttcttactggcaggcatagtcatccagtctgaaagacattaaaaataaaaatgtctgttttaccctagcaaaacatttggatggggcaagatgacgagcctcttcataatgctaacagaaagatttcaagtttgaagattttctgaagtaacaacaagaaaggacagaaaagaggggtgaacagaggactacagcaggggttgatctcatgtataatgtatgaggcaggagagcttggaagcatgatcttagaagtcacaggtggctgggcgttgtggctcacacctgtaatcccagcactttgggaggccaaggcgggtggatcacgaggtcaggagatcgagaccatcctggctaacacggtgaaaccccgtctctactaaaaatgcaaaaaattagccgggcgtggtggtgggagcctgtagtcccagctactcaggaggctgaggcaggagaatggtgtgaacccgggaggcggagcttgcagtgagccgagatcgcgccactgcattccagcctgggtgacagagtgagactccgtctcaaaaaaaaaaaaagtcacaggcctgggttagaattgagtacaacacatattttctttgtgataatagagaagttatctgattttctaagcctcaaaaaaaagaaaaacctgataaagaccacatgatgctaacagacaagaagaaaagtaccctgtcgattcaaatgagatgatttttaaagccagccagatgtggcctaaagaaactgctgaaaatagtagtcgacacttggtaggaaaaaccttgactctagagtgaatactaaaatcaagatataggctcatttgagcattcagatgaataataaaaagctaggccgctgtacaggctgtgtgaaatgctcatatctactaaaaaaataaggacctcctattgcttgtgaggaagcaatgtctccaaacccatatgaataatgtgacacccatgggagggaaatgtgccatgagatattttgtggcaaagttatctcaggataaacgctgcagctgcaagcactgccggcaagtattctcagggcaaacaggagagggcctaaaatgtaaaactaagggctagattccaaacacagacgatgcagaattcacgagaaatcccatcaagaacaagccatccttattacctccttttcccactcgctgcagaaaatcttctacaaaaaggcactcctggtatcattttagaatcaaagaaacaaacctctttacttactaggaaaagaaaggtaaacaggcgcatttcaagactaaaatcctgttgagctcagaataatatatccttgttcaaaacaaagaatggtcaaagttaaacatcggtattgccaaatgtcaaaatgttaaggactgacttccacttctggcccaaatagagtagactgtggcagactaacatttctgcagaaaacaactagaaaatctgaattggaaaaagttatctgtctgaaggcatcagatgtcacccaggcagactttatagtctaatatttgggagagaatgaaaatatagagaggtgatcccaatactcagtggcttgttactcaaacattttattgaattcttaagctttacagggcaaaagattaaagttaagcagaaatccagaattttctagtcttttagtacaacagaaccaggaccttccaaggagaggtcataataacatgtgaagctctcagccgggactcctgcagggctacaaaactagtagtacgggcaaatgagcagttgacatagctttacaaatattgtgaccaacctccagctattacaggccttggctggactaagatggtttgcttgcactctagctgctaccagggaagttaaatcttctctggaagaacaacatctagagcctctgctctccttcacatatagtgtcagggatacaataaaaaaggccagctgtgctaagaaattcaatgaagagggaaaaacagacaatagaaaaagaaccgtagaacacagataccagagttatcagacgtgaaccttaaaataactgtgattaatatgttcaaggaaacaggaatgagaattacaacaaagaattggaaccaaataatcaaatggaaattctagaactgagaaatacaataaccaaaattatgaattcaatagtctttaacaagatatcaaatatagcagaaaagaggaatagtgagctacaaaaatacataagcagaaaatatccatagtaaaacatggctaaaaaactaaacattatttaaaaacaaaaaggttgaaaaatgaactctgagaagggctataaactccaaggataactacaaagaaaattcacctaggcacctcagctaggcactactgaaaactgaagattaccttgaaagttgcttgaaaaaaacaaatgatacactacctttgaaaaagcaaaactaagactggcagtgtcttaatgaaaacaatggaacccagaagacaatgaagtaacatctgaagcggtgaaagaaccgaactgtcaagctagaattcaacacacagagaaaatatctctaaaaattaaacttgaagtagatatttccatacaaataaaaacagagatggtgtcaccagcagatctacattaaaagaaacacagatgtgggnnnnnnnnnnnnnnnnnnnnnnnnnnnnnnnnnnnnnnnnnnnnnnnnnnnnnnnnnnnnnnnnnnnnnnnnnnnnnnnnnnnnnnnnnnnnnnnnnnnncctcctgagtagctgggactacaggcacgtaccaccatgcccagctaatttttgtatttttagtagagatggggtttcaccatgttgatcaggatggtcttgatctcttgacctcgtgatctgcccacctcagcctcccaaagtgctgggattagaggcatgagccactgtgcgaggcccatggtttaataataataaaacaaatacccacatacccaacacttgggttaccaaagagaaatttacccaaaatttggaagccttgttcacagtgctcccaagtcattttcctgagttgctttcagcattcctttgttttgtttgataattactccacatgcatgtgtccctaaacattgtttacttttgcaacattttaaatctttataaaaagacaacctgctatatacatacaatatacaatatgtatgtatataaaggtaatctgctatatacatacaatatacaattgtatagtttcaattgtacattgtattcaacttttatacaatatacaatatgtatgtatatagcagataccctttatataaagatttctgcatatatatgtgtatatgcctatatgtgtatatatgtatatatatcatgtgtatatacatgcatatatgtatcatgtgtatatatgtgttcaacacaaacacttttagattagtctaccttgatacatgcaaagttcattccttttcattactgtataggatttcattattgattcattcagcaacaacaaaaattatgttgaacacttatcctgtgcctagcattgtgccagattctggaaatacaccagtgggcaaaactggcaaaacctgtgcacaaatgcagcttgaattttactggaagagagagaggaaagataataagaggaataaatacgttttgagatagagatgagtgtgaaggcaaccaaaataattcactccaaaacatacttccctgacatatcttgagatggctattcagagagcttgcagacaggaatagtcctgaaaagctgtcttttgtagaggagacttgcatctgttgaggaaatgaagtgcagtcaacaacagatgtgaataggctttctctgaggctctcccctcgtccagatctgagaaagactaactgagagtctgacacctttgaaaatctggtgcaaactttaaccacgggctaccatttgctcttaggctgctacctgtgcagcttcatttgcataatgagtctaccttttcttcaggtctttcctcttctctccctcctataacccgccttagccgtgatccaagcccctgttcttcctgtaacttcaagatggtataaaaatatcaactaccttgcctttctttgagtttttgtatgttgtatcactcctgtgcttgtatgaactttaataaaatttgtatgcctttttttcctattcagctatgtatcattttgttttatagactcaaattatcgaaacttcaggggaaaaatttaaacttccctgtaagtgcaaacaagaatttaaaaagggaacaggaacatggagggtgggagagtttgcaattttacacaaagtggttaagaaacatttcattgagagggtgacatttgaagaaagacctgcagaagatgagggatgggccaatttaagtatctgtgggaagtctttctggcagaatgaaaagcggattcgaataccctgaggtgggagcatgcctggcttgttgaaggaacaataaggacactgttgctgaagcagaaagaaaagggagagaacagtaggagatcctaggcaagggggcagaacgtggaggttcttaatgggttctgtgtcagtggatttcactctgaacgagacgagaatgcgctgagtagcggagagtgataagactacctccttgaccaaactttagtcaggccgttctgagccctcgttttcactaggcattgaccttggccctcattctgtcctgcccagcccagtctttgcaaagagtcttgataagtcagtttagcaagaatcccccaactcttgacatctgatcattcttactatctgacagagtttctcatcccccacctttgctgtgttagcaagaatgctgtaaagccagctgagcaagaattcccttgccccgatggctctgaaaccaccctcgcagggttagtgagaatttcaagccagagtttagggagaattacagttagacattgagcagggtgcagtggtgccctttgacccacttccctgaagctctaactaaccaagagtcctgtagtgtgccgaccacctgctcccccattgctcctataggcagaatctctgacactggatcttctaacccaagaattgcttaaggtgttttccagatcctgaattccagcaggatggctgacgccagtgggtctgaagatccccgccagggaaccgactaaacacaggaatgcagtttcttcctctccctgtcccatgacttgaccccttacttttcaaccaatcatcaatccccacactttagcccttcacacagccagatcccttaaaaaccccatccccaaacctctcggggaggcagatttgaggtttcctcccaactcctcatttggctgccctacaattattaaactctctgctgcgacttccacttttggtgcattggtctgctgtaacgtctcctctgtaaggaaggcgaatgccaggccagacagaacgctaatttgctgactgcagcaattagagggatcccccacaaagggcagggaaaggggggttccgggaggaatgcccagtccaattgctcgcgtctgcagcgtaaccaatgtgcctactgtaaagaaataggaccttggaaagataagtgtccacaactgaaggagaagcaaggtgatgcggagcaaaagaccacagataaagaccaagggactttgtgcaatctggccgaagggctgctagactgaaggagactgggctcaaatgcccccaaggagcccatggtcaggatgacaatagggggcaaggacattaagtttttggtcgataccggtgccactcagtagtaaccaccccagtgacccccttatctaagaaaaccattgatataatcggagcaacgggagtctccgccaagcaggttttctgcctaccgtggacctgctcggtgggaggacacaaagtgactcatcaatttctgtaaatgcctgactgccctttgcctttgttagggagagacttgcttagtaagctgagagccaccctttacaaaacagggctccttacaggctgaagttaccaggaacaggagttaccatggtccttacagtccgccgagaagaagaatggagactttttctaactgagccaggtcaggagataaaaccggctctagctaagagtgtgggcagaggacaatcctccgggctggcgatcagtcaagcccctgtactcatagaaattaagcctggggcccagccaattagacaaaagcagtatctggttcccagagaagctcttgaaggaatacaggttcaccttaaacgcttgaaagattttggaattatagttccttgccagtatccatggaacacccccctcctacctgtccccaagccagggaccaaggactatcgacctgtacaggacttacgcttggttaaccaagctacagtgactctgcacccaacagctcctaacccttacacactgttaggattgctgctggctgaggacagctggttcacttgtctggacttgaaggatgccttctttagcatcaggctagctcctgagagccaaaagctgtttgcctttcagtgggaagatccggggtcaggtgtcactacttagtacacttggactcggcttccccaggggtttaaaaactcccccaccatcttcggggaggcgttggctcgagacctccagaagtttcctgctaaagacctaggctgcatcttgctccagtacgtggacgaccttctgctaggagactccatggcagatgggtgtgcaaaagggacggatgccctgctttgacacctggaggactgtgggtataaggtgtccaagaagaaagctcagatctgcagacagcaggtacgctacctgggattcactatccggaaaggggagcgcagcctggggtcaggaagaaagcaggtcacctgcagcttaccggaacctaagctactgcctactgcagtggccagcccggaggattgtcctctgcccacactcttagctagagccagttttatctcctgacctggctcagaaaaagtctccattcttcttctcgtgggactgtaagggccatgataactcctgttgcctgtaacttcagcctgcaaagagccctgttttgtaaaggaaatggtggctctcagcttactaagcaagtctcccgctaaaaccagaaggcaagtaagggtatttctaggagccgtgggattttgcagattatggattccaaactttgcggtgctagccaaaccattgtatggggttacaaaggggggcgaccaggagccttctgaatggggacctctgcaacagcaagccttttgcaagttaaaggaaaaacttatgtcagccccagccttaggactaccagatttgacaaagccctttacactctatgtgtcagaaagacaaaaaatggcagtcagagttttaacccaaactgtggggccctggccaagaccagtggcgtacctctcaaaacagctagacggagtttcaaaaggctggcctccatgtctgagagccctggcagctacagccctgttagcacaagaagcagacaagctaacccttgggcaaaacttaagtataaaggccccccccatgcagtggtaactttaatgaataccaaaggacatgattggttaacaaatgctagattaaccaagtaccaaagcttgttatgtgaaaacccccacataaccactgacgtctgtaacactccgaatcctgccaccttactcccagcatcagacagccctgtcgaacatgactgtgtggaagtgttggactcagtctattctagcaggcccgatcttcgagaccagccatgggcatcagtggactgggagttatacgtggacgggagcagcttcatcaatccgcaaggagaaagatgcgcaggatgtgcgggggtgaccttggatgatgttattgaagacaaaccgttgcctcacggcacttcagcccaaaaggcaaagctcattgctttaacccgggctctagaactccgtgaaggtaagactgtgaacatttatcctgactctcgatatgcctttctaaccctccaagtgcacggagcattatataaagaaaaagccctgttaaattccgggggaaaggacataaaatatcaacaagaaattctgcaattattagaggcagtatggaaaccccaaaaggtagcagtcatgcattgcaggggacacctgcaagcttccacctcagtaagccaaggaaactcccgaacagacacagaggcacaaaaagcagcatctactctttaccaggcatcagtcacagcccctctactccctcaaacacctgatctggtgcctacttattctaaaaagggaaaagacgttcttcaggcaaagggaggacaaacaataaaagaagaatggataaagtcaccagatgggagaatagctgtgccacagctgctaggagccgcagttgtgctggctgtacatgaaactacccatttaggccaggagtcacttgaaaagctgttaagccggtatttctacatctcacacttgccagctcttgctaaaacagtagcgcggcgatgcacaatgcaaagcaaggtcccctgttcctcccggcacacaagcctgtggagcagctccctttgaagatcttcaagtggacttcacagagatgcccaaatgcggaggtaacaagtatttactgttctagtgtgtacttactctgggtggatagagtcttatccaacacgaactgaaaaagcttgtgaagtaacccgtgtgcttcttcgagatctcatccctaggtttggactgcctctacgaatcggctcagataatgggccggcatctgtggctgacttagtacagaggacggcaaaggtattaggaatcacttggaagctacatgccacctaccaacctcagagttcccgaaaggtggagggaatgaattggactatcaaaaatagtttagggaaagtatgtcaagagacaggattaaaatggatataggcccttcctatggtattgtttaaaattaggtgcaccccctctaagaaaacaggatactccctttatgaaatattatatcataggcctcctcctatactgcgaggacttccgggtactccccaagagttgggtgaaactgaactgcagcgatagctacaggccctagggaagattacccagacaatctcaacttgggtaaatgagaggtgcccggtcagcttactctccccagttcaccctttttctccaggtgaccatgtgtggatcaaggactggaacgtagctccttcacggccacggtggaaaggaacgcagatcgttatcctgaccactcccacagctgtaaaggtggacagaatcccggcctgggttcaccacagccacgtaaaaaaatcccgcagcccctgaaacctggagggccaaaccaagcctggacaatccctgtaaagtgaccctgaggaggacgacaagccctgctccagtcacacccggaagctgacgggtccgcgcacggccgaagcatgaggaaaatcgtcatgggacttattttccttatgacatggacttgtggggtaaaagcttccactgcttcttttcacatggaagactgctttcagtggctacatcaggtcactgaggtaggacaacaggttaaaacaatctttttgttccatagttattatgagtgcccaggaactccataaggaacatgtttatataataacactcagtacaaagtatgtaatccaggaagtgggcagcctgatgtgtgctatgacccctctgaacctcccatgatcacggtttttgaaacaagactaaggactggtccttttctaggtgacacaagtaaagtaatagctagagcagaagaaagaggggttcccaaacatgtaactctaaaatttgacgcttgtgccactattaatagtaatcagcaaggactaggatgcggttctctccagaaacataacatgaagtgactttcagagactgagctacatgctcagctaattgcaaaaacaaatttctactgtttcctggaatttcaggtactggcacatttagttcttcatagaaactctgaaatactggctctggagagcgttttcgaatttctccttttattaaaatgttgaccttagggtctagtccttttccatcaatgcctaaagatacgtgttctcctttttcccactttgggtctgagggattttgtaattattaattctaaagggttgcagcttccacttgtgcaggaggggctactttttcctttttggagccaaacaagatcttttttatcttttttccaagtagcccagatgacacaagaccagtattgacacacatttgtacatgaatatgattcatggcagatatacttattttatgctgtatagcttttttcccaatctagagaaccgcatcctagtcctgacaatttctgggttctaaaagcctcaattattggacaatattgcatagctagagaaggaaaagagttcactcatcctgtaggacggcttagttgtcttggacaaaaacnnnnnnnnnnnnnnnnnnnnnnnnnnnnnnnnnnnnnnnnnnnnnnnnnnnnnnnnnnnnnnnnnnnnnnnnnnnnnnnnnnnnnnnnnnnnnnnnnnnnacttcgattagttgtaaatttatattgaaaactatagggtaaccactaaaaaaagtttttaaagcataattgatatgtacagacagcagaaagatccatggttgccatactgatataaatgaatgtttgaataaataaataaatggagagaagcaacaatcctccatacagatttccaaataatgtatgttgattcttcacctctaggagtggtgcctgtcttgccaggccgtaagtgtgggctacacagtgtcgtctttcgaaggaatacagtatgggaaggcagaaaaagaaagtaactgtagagtggagagacttgacaaacagtgcctcagtcaggtgatgaaggtgaacagcaacagggatgtcatgttattagtatgcaattgtagtatgctgtgatcagactgacgcttcatctctgtgaccttcctccccaaaacccaaccccaggctaataatgagaaaaaacatcacgcaaatcacaatggaggggcattctacagaatacctaatcagggccgggcatgggggctcctgcctgtaatcccaacatttagggaggccaggcaggcggatcacttgaggccaagagttcgagaccagcccagccaacatggtgaaaccccgtttttatcaaaaattcaaaaattagcagggcgtgatggcacatgtctgtaatcccagctacttggaggctgaggcaggagaatcacttgaacccaggaggcaaaggttgcagtgagccaagatcgcatcattgcactccagcctgggtgacagagtgagactccacctcaaaaaaaacaaaaaaacaaaaacaaaaacaaaaaacaacctaacccagtactcctcaaaactattatgatcattacatacaaggaaagtctgagaaagccccaaagccacagcagcctaagaagatgtgaaactgaatgtcatgtggaatcctggggggccctggcacacaaaaaggacagcaggtaaaaactaaggaaatgtgaataaagcatggacttcagttaataataacataccaatggtggctcgttaattgtaacaaatataccaaattaatgtagggaataacgggaagctgggtgcagggtatgataactgtgtaattattctctcgtctaaaattgttgtaaaaaaaataaagattattctttttaaaaatactgacaatatcaaaaaagtacttatttactgcagaaaaatatgtaattaacaaattatgactattaagcaatcaataccaaattccatgtgccttttccccagacaataaattatatattacatggaaatatgtaatattgcaaagaacctatttttttccaaaaaatatgcttgtttgcagttttcctaacaagtagagagaaatttctccctcggtacccttaatgaggacagaatgtgatattggatatcaccattgcactgacttaaatggggtaatgagacctgtgattgggacactctgggtccccaggagacttaatcaaaagggttacataggccgggcgcggtggctcacacctgtaatcccagcactttgggaggccaaggcaggtggatcacgaggtcaggagatggagaccatcctggctaacatggtgaaaccccgtctctacaaaaaaaaaaaaaattagccagtgtggtggtgggcgcctgtagtcccagctactcgggaggctgaggcaggagaatggcgtgaacccgggaggcggagcttgcagtgaaccgagatggcgccactgcactccagcctgggcgactgagcaagactctgtctccaaaaaaaaaggggggttacatattggccgggcacagttgctcacacctataatccagcactttgggaagccaaggcaggaggatcgcaggagcccaagagttccttccagcctgcagtgagccgagatcgcaccactgtactccagcctgggcgacagagcaaaactctgtctctaaaaaaaagcaacaacaacaacaacaaaaacccacaaaaggattagatattgaatcagctgtcaccccttccaaaaacaacaacaacaaaaactggctctgagttgcaaacaaacctacctctgcccttggctaaaatgaagtaagtctctcctgctgtggatgtaggcgagctcagatagcgaacaaccctacctttgggcagcagatagcccaggtaatagctggatattcctgtgcactgcattttgctggtctttacgtcttggtttcctgaaatatccatctgcttctaattaaggaatcaggcctagtgaggcgaagcacaccaaatctggcaggtcctaaaatagtgctgctgctgctgttactgatactgatcatagtaacagctggaatttatggaggtcttaatacgtgccatgcacttctctcagcattttaaatgtactttttcagagcatgatgctaacagtatagactgtcttgttgggatcaaaagccagctgtgtgaccttgatcaagttacttgcttctctgtgcctgtctcctcatctgtacaatccagatattaacagtcctcttgtaaggattaaatgacttactatatgaaaggaatagatatttttatacatagtaatacatagaacctggctcacagcaaatatgcttgtaattactactttttggggttctttttgagacaaggtctcactctcgtgcccaggctggagtgcagtggcacaatcatagctcacttgcagcctcgaattcctgggctcaagtgatcctcctacctcagccttcttagtatctgggactataggtgctgctgcacccagctactttatttttaattttgtatagtgacaaggcctcactatgttgctcaggttggtctcaaacttctgggctcaagcaatccttctgtcttggcctcccaaaagtgctgggattataggcgtgagctactgtgcccagctactactgttactaatgctcatagcaactcagtcatgtatgtatattattaaccccaccaaaattgaggaaatggggtccagagagataaaataacttgctcagggctacatccctagcttggatttaaagccatgaagtcaagctcctgagtccacatttccagcctatgggctattggaaaaggagtcaatgaaaaataggctttggagtatggcagaaaaaatgcacagaagggaggggactagaggaaagggagctggtgttgaaggaaagatgggacttccacgtcggaatgacagacaggaatgctaggaaaaaggtcaggcctgaggacagatttggggaagatactcagaacgctgagggttaaagtaatgaaaatggatcttaaatggggaaagaacaagaaaaaagagcccaggtagagaggctaaactagcagagaaaaaagaaaagaatcagagaaggaaatagaggaatcaatcagacaggtgagatggacatttggacagcttaacatccccgctgcactgggaggggaaggccccaggcctgcctccttctgggcttcaaagcccaaaccacgctgaactccttctgggatgcccttagtcttctctaagcaccaatatcagtcctggcctccagtataaactcagaatgcccccacttctgggatatttcccctgaacatttaatcatgtttcctaagatcgataccacgaactcccagaagatggaaatgacagctttcctctttccatcccgtgtgctgcacaggatcctgtacatagggctcaataaatgcttgtggaggctgtcttccggcccttccacatcttagccccaagtgtgactatatcctctatgaagacagagactgcttcatgccccattctccccacccagcaccagtgtagtgggaagcatatgctcagaactgcctcaaatgtggatcacagagtgagcggggtgaattaagagtagtctcgggacaaaagaggcacattcctcagcagccccttgctaagcccaagacactgggaaaaacttttgaggttccggattcttcatcgttttggttggaccaaaaagtacctggacaaagtctggaaacatgtctaccatctctgaatccagaagccaactgatgaaaaagacaaccttcactcactctcacctgagcagacagcagatccacagccatcccttcctcctcagtcttcctgcccagggagagcagagtgtggacacggtgggtctgcagaggaaaaaggtgtcaagaggaaccctggcgtcaggagatggcttggagagaggaagttacaaccgcccataatgtccatcaggtctcaaaaaagccaccccccgtaatgatgtaaagcaagaagagtgtttactagtttactagggcaatgtgccaaccctacttctatttctgcacttggactctttaacttccaccttcgggcctctcagctacctctaggcaaaccgtgactcccccatggatgtctggagtccttcgctagctttgaactgcacacctaaaagtcgcaatgaatatccagtctcctggggcgccacttcccagcctagctagctgatcctcatcctgcctgccctgcctcaccctttcctccctatggtagccacgataaagaggcttccccgcatccctaccctggtgacagaccccactgctcgccctgagtggtccttccgtggagtgctgtgttctccccaagaaactgtgagcataatccaaccactcagctttcccagcctctttactagatcttcgtcgggccttaccacactttacccaaggtaacaggattaaggcactgtccccacccaaagccagagctttgctgtccctcctaatactccacaggtgccgcctctaatggcacccacaaccagaaacagccgtcgctgcccaaacaccaaccccaggtgggagaggtggaaaccgtgcccgccccacagaaagcaagggaagaggctgcctggggcagccgggcaagtgtgagggcctccaggcccgcgatctgcagcggcgactcagggtgccccctagcatggagccaacctggggctctgccaggccagttccagcgggtgcctcgaccagcccaggggaagctgccacacaaggcctcggttacgcgacgaagcgcacctcctcccaggaagcggtgagtgttttccacgcagtattttcaatcttcacatttacagatgttacggagactgaaaaccaggaggtcgtgacctgcccaaagtcataagggccgggaaggcaatcctgatcctagccccaggccccagttacatctggggcaatgacctcgccactctgcctcggtctcctcctgacagagcgggaacagcgtaccgccaccctatctgttagcagggatgcgcggagttcgttcgggcgatgcgctagtctggtgcctggcacccgagcgctctcggcgggcatcagctattgcttttattatttccgttactcagaagaaaatgcacagaagaaaatcgcagaatgaacaacgacaaaaggctggcatccccaccccagcggcccggcgcacccagctcacctggcgaggcgctccctcccgcgggtctccggcagtccaggccgctcgcggacggcgccccgggacccagtggccaaggggcccgagccgcgtagggctggtcccagaagcccagacgaggctgcacgccgcccactcgctggagaggcccggatccaccccggcccggaagagaccactgcgagcgcctcaaccccaggccggcaatcctagccaagcctggatggcccaagccaggagaacccccgaaaggccgcgagctgtccccgaaaccccgccaaccgcgggagaactaccactcccggcatgcctccggccccacgccgactacacttcccaggggacgccgcggtgcgcgctgcgaactccgggagaggaaccgcctccgccaacgagagctctcaaaggcgacagtgcgcggaggggctgcagtgcgagggagtacgcacgccgcacacgaggcaggaggtctccagctgctggccgtgctgcctacagcccgcgcacttgttaagcaagcggagtagtttgaaaaaacaaaaccggaaattagattcatttaggaggatcagtgtgctgtagctcccaccgctggttgtgattacttttctgttgatacaaaataatttacataatgtatagggtccatgtgagtgcttgttacgtgcatagactgtaatgatcatcaagtcacagtatttggggtatccatca

SEQ ID NO: 718 - protein, 1520 aa, Homo sapiens [sequence omitted]

SEQ ID NO: 719 - DNA, 39788 bp, Homo sapiens
  source (1)..(39788)
  CDS (201)..(390)
  CDS (2208)..(2413)
  CDS (6765)..(7008)
  CDS (8326)..(8461)
  CDS (11226)..(11380)
  CDS (13671)..(13811)
  CDS (20741)..(20941)
  CDS (21175)..(21311)
  CDS (24884)..(25854)
  CDS (31347)..(31491)
  CDS (33144)..(33390)
  CDS (33447)..(33724)
  CDS (38640)..(38739)
  CDS (39188)..(39588)
  modified_base (17192)..(17291): a, t, c, g, unknown or other
tggtggagaaagtaaaatcccagcagaaggcaggacggagggagacgtccaggtgcacgtgggtacccaccccacgcgtgtggacgctgagcacagagtatcactgtggaccagagcaaagtagatgccaggctcaaatggggtgtccagtggctgtgcatgtaaggaggtggcagctcagaggggaggtcaccgaggggatgggagcgtgtgagcaggtgcgagtgttcacctccaactcctacagagcctctgccctcacgcccatgctggcagctcctgccgagctgtcccttcaaaaccccgtcagtcaggaactcagttctccattcgtccagcaagtgtggattaccgccgtcctgggcaggccccgcacgtgtcctgggctctgtaaggccccaggcagaaagaccccagggagataaatgcagtccagccagggaagaactgggtggggagctagagggtggctgagcagctgaggtgggggtgctcctggcagagggagcagcatgtgcagaggcctgttgggggcacagacgtggccagatgggtggatcctggtggggaccggggcagtcctggatgttgcagtaaatccaaattcactgggtgcatcagggagaccctcctgggagaagaggcaggcgctcagggtcacacacacacacacacacacacacacacacacacacacactgggggctgccaagggttgtaaagccgggagtgtgttgaggggctggagactgatgagctggggagcggggtcacacgcaggagcagatggggcaggggtgacaggtgacgggaactaggcctggccctctgtgcagtcccagatccagctggagccagcccagccctcgtgtgtcccgcacccagctcactctggagcagccgcatggggagggcctttgctggggcctggtgtccttcttaccttgaaaccccctctggccacaacactgctgcctgggctccattatttacattcaggcttcgcccccagctgaaaataaaagtagcagtcaccagtcaccaagccctctgagcagctatttctggtccccttcctgagagctgttttggggaagggcctggctttggaagtcagaaggaaggagccgtgtgtgcgtgcgtgcgtgtgtgtgtgtgtgtgtgtgtgtgtgtgtgtgtgtgtgtatacgcccatgagggtccaggggtagcttccagcccctgtcctcccctctgtcctctcctatgggagccggggggacctgctctcctgcccctgtccctgtgtgtaactccccaccccctaccccactggaaattgctgccttcacattttgccataaggtagatttttccacttgaattcctagggtttgtcttttcattattttcctctctttttaaattaaaaaaaaattctttttaaaggaagggagaaagcgaggatgtgcctatgtctctgctggcctcaggaccagctggctgggccccgagaggccgggcctggagaccaccagagggagctggctcaggggtctggaggaggatttttctccttccttgtctggagcccagtgtccaaggtgacagcctgggggacccctgactgtctccccacagcagggagtgggtgaggcagggcacaagccggctcctcttacgggaggcctttcctttcagcccgcccaggctgactgcatgagataggcacatcccacaagtggtggtgcggggggatgggtctttgaaggcaggtgatctggaggctgctggagggctggccttgcaggatggaggggggactttttgagacaggtggggtggggagagccatgccagggaggatggggaagtgctgcaaggagagcatcccaggcacagtgggggctcagagggtcctgccacggtcagacctcctgtaaacctaagctcacctcaggctcagacaaccccaggtcgtgcaggacagaaatgtgaattcatttagcagcacgtcccgcctcacttgaaggtaagtgggatttacaagtccagagtgttctcaattcctggggtctcaggcaaggcagcagctcctagagaacagtcagacccgagttcagatccagcctctgcctctccagctgcgtggcccagcccaagcctccctgttctccagggtgaatccaggtgggctgaggggatgcagcccccccgtctccctccagcacgtcatgctgctgctgtcctcctctgcaccgattccaggatgtttacggttccttcccaccctgggacgcaggctgcatggcgccgggcttctgtcctctgcatggctgcatcccagtgtctcacgccatgcctggcacataggaggcgctcagtacacgtctgcgggctccacgaagggaaagtggtggcagcaggcaggcaggtgatgtgagaggggcctgtacttccctgaagatgtgcctgcagatgctcagtaaatgtgggctgctgaagaatggtgcttaggggttgtgcggtgggggtgtggctccagggggcccttcctctgccacctgcatgctcaggctgacccggagcactgtctccttgtgcttctgctcaggatgatggcttttccttctggtcttgcttccccagctagactgagagctcctgaggaaggagtcttactcaatatcatttcttagggactgactataccaggaactgagcagggcagtggaaggaaggaggaagggagggaggaaggcatgaagggaggaagaaagggagggaggaaaggagggagagaggaaggaagggaggaagggacagagggagggaggaagaaagggagggagggatggaggaaagaaggaaagaaggaagaaaggaaggaagagagggagggagggaaggacggagggagggagggaaggaaggacggagggagggaaggacggagggagggagggaaggacggagggagggagggaagggacggagggagggagcgaaggaaggaggaaggaagagaggaagaaaggaagaaaggacatagacctgaccctgaccttgggaagtgcagcgggaggtggacattgacacagttatgtcagctgggcctggagaccaccaggaaaggtcaccagaccacagatggaaaggacggagagactgaaaaatacgacaggaaactgataccaagtttcatccacgaagtgtctatgtcatgttcacgtggggatgcctgaagcctggggtggtgacggttccagctcacaccagcggagggctggccaggtgagagcctgctctcacgggacgatgggatttcaggaaccacacggctgggaggacaggggcagccccaggcaggtgggcatggaggaaggtggaggaaggcaggcagcttccctatggaagcccctgggctagctgcggctatgcagcccatttcacagatgaacacaaggaggctctggtgtgccctgctgtgttctctgtcaggcggcaccacgtgaggaccgcggcacccttgctgtcacccatatctaaaagttttgtccagctggggttctgtggcccagatttgctgagtagtcccatgttgccacatctgcttgattctgattatttttttaaagaaataaaacatggattgagtcggaaccttcttcagtcctgttcctctcttctcccttgaggtaaacatgattctgagaggtggcaggttcccttcctgtccttgtttagtcactcagcgaacacttgagagcacctactatgggccaggcagtgttctaggcactggggaagagtgtgatgaaaacaacggacaaagtctcccgccctcatgcagccttcactcatatatgtatagtacatatatatgcatcttcataaatattgtatgtggtctttagattttacataaaatctaaatcctgctgcaacttgcttttgtccgtcaattttatgatttcaggatttgtcatgttgacacatgagaactgttattcatcttaactccataatatcccattgggcaaacacaccacagtttattcattcttctgttgtaaaacatttaggttgtttccatttttttgcagtttcagacagtgctgtgttgagcgactctgtgtgggtctcctgtgcccacgtgccggggtttccctggggacgagtgtggacggggaagcactggcttggaggcagccggcacgttcagctttactagacgctgccgtgtggttctgcagagggttccaatggacacgccttgatcaggtgtccagctgtcttgtagtaaaggcgggccccgagggatggggccaagcataagtcggttttgatgggtggggtagcccagggaggaggggaggtgtggaacctgggcgggctggggaggaggcgcagagctgggagagatagcggttcctgctggaaagcagtcaggggctggcctggatcccaaacttcccagcgcagtggtgagagcctcgtctgaaggtggctctgctcctgctactgtgtgcccctgggcaaggcctctctggcctctgtctcctcactctccatccaacttgggccaggaggtctccaaggtccccacggacttgatatgctcagattttcttggcaagaggctgtggcttcctgcccctggccggcgagcagacgcaccagcttggccgggatggcagagcttgcagctggcaagtggcattcgggtgtttgtcaggagcctgggcggctggggtcctggcaggaggctgggcaggggcttgccaagggagacccaggaaagccaaggaggccatggggacccccagacttcttcatgtgtgtccccctccccgtatggtcctgtgcctggagcctggggagtggagggctccagcctctgccctgagatacggagtgggcttgttccctgagggctttgtgggctttcatttgattctatctactctcagtatggacccatggattcttactttattcaacgagagagacttggggcacagggtgaggaggcgtgcccctccctaggggagaggttagaagcaggcgtctgcgggagtgttagtcgtgtggcccaggggctgggcacagggatggctggtgggcttggtgtgactttgggtctgtagcagcgtggcctggaatgcacagggtgggctgtggtgatggtggatgttgatctgtgccagtgcgtgcattctgtgactgtgtgtggacacatgtgtgcacacatgtacatgaacccacctaaacaacaggggctgcagaagaggctccggcacatgaaacactgcccctttattctcagtggctgctgcggagtcattgctttgcaaggaaagggaactgtccaggagcggctgcaggaaatgggggcctctccgcctcagggaggctctggacacagaccaggattgcagtcccactgactggctgtgtgaccttggttaggctatttagcaacctgagcctcagtttcctcatctgtgagatggggatattagcaccggctaatgtgtaaggattcattgagactgggcctcgcatggtgccaggcatgcagggggtgctcagtggcctctcgggccgctctggtcttctctggctgcagcaggcaccaagagagcagttgaggcagagattgtgccactgccaggagcttgtgtcatcccaggagagggcctggcttgtgagccagttcctttacccactcccctgagcggacatgctgacaatagggctgtgaaacagagggaacccacgggcacttggtttctcatcctgggggcagcaacaccagtgggcactcaccccagcatgggcaccatgccccatcatgcccatgggcccacaagccccctcaactccacaatcctatccattcactacatgactggatgaaaggtggccgctggagccagatggcccaagttcaaaccccacctcttcccctgactatctttgtgatcctggggaagctacttaacctctctgtgcctcaatttcttcatttataaattggagatatggtgattacactggcctcagatgagtgaatccatgtaaaatttgcagaatagcatttcccatgcattggacactccataaatgttcattagtattacggagctctgcacacccccgccccccgcactcccttctggtctgaatctcttgcagttgcaagaatatcaaaccctcctcagactgcacttgcatctcaagttgcttgtggctcactcacactcccgctgactgagccgtggtcacctaatccttccttcaccagcaaaacgaagcttgcaagatatgccctgaggtgccaggcaagaccatcacgcggatcctcttagaggagcatctcagaaatatgacttaacctaacagtttctccctgtttgagagcaattaactcccttctcctgccttccttcccgctcctggagccaggtggctcatccttcccttccctctcctcccagtccagcctcttcctctgtccatctgtctccccagatggggggaggaatgtcgcaattggcccactttctaagtggaaagaaaccatatggagggtttagctgggaactgagagccggcccggccagtggtgcagccagtggctgcctcccttggctccctctgtgaccccagactgacaggggccccagtcctgcccaagcaccttgctccttctcccccctccccatgagctcctagtaaacatgctcttctctagcacttgggacttcttggtgtcttaggagagacctgaggagctgtgtgtgtgtgtgcacgcacatgtgcgtgtgtgtgcatgcgtgtgtgtgtgttgtgtcctgtggccccaggccagcagggtgcctggcacagagcagccactccttccagagcgtaccctgttctctccagaatgcctgccgcctggccacttgcatcctctgaggactcagcccagtgtcactgcctttgggcagccttccctggcggccatctccctgcccacaggtagggacccctccatgggtggagctgggtgctggcactgccctgtggggctggtggtagtcgtgtccccggcactctgagcccctggcagctccacccagagttttctgatgtaatggggcaagtctgtgtagaaggctcaggtggccccagcctggacctccaggtcatttggaagcccagcggtgcccagcctaggtgtttggtttgaggcattgtgttgagttgagtgggacccagaggagggcagcccttagataccaagaccggcttcaagattaatccctcatgcttttccatcgactgccaccaggggcttctggggtcttattctctgggggtctccagctcctggactccagtagggcaggtaactgtgtggctttgggtaagccacttctcttctctgagcttcagtttcctcatccgtcaaaggcagtggctgacacaagcatggcccacagatgctctgtaccacgaggtcgggtgagatttaaatatgtgaatgacatctgtcccctgccagcacttgagaggcacatctggggctggggatggctgggacaaagtgctcccagggtctctgatggccacccagcctggtcgtgaatcctgacaacatcaagtactgaccctctcctgatggttccagccagtggccatgcacgctgctcctaccaagggcctggtgatgggcatggggcccagggacaggagtcctgagaagcacatggatatgggtgtagcagggactgatgcctcagggtgggctctattcccagctttaaccctccaagaaacattgtgagcgggttacaataaaaataatcaacatttactaagcactaggtaccggatgttgtctttatatgcattacctcacttgttttataacagttctatgaaataggtaataccattatttccactttataggtgatgtatgttcatcacagagaggtccagtaactgacctaaggtcacacagcagtaagtggcagagctgagatttgaacccaggcagtctagctcctaagcatgatgccgtgctgcttctagctgctatatggggaaactgaggctcagagtacttaagtgacatatccagggtcaccagctggtaagtggagccaagactggcactgaagctgtcctgactgcacagcccatatccagaggctgggatcccagggctgggagtcaggctggggagcctgggcagcacccagcccccatctcccagagtgtatgttgggagagtggtggggagactcaggttcccctgcccaccccaactaactggtgcccctcctgcagggggcgtgtgcatcgcccagtcggtgaagataccacgggagcccaaggcaggcgagttcgacaagatcatccgccgcctcctggagacttcgaacgccagggcagtcatcatctttgccaacgaggatgacatcaggtgagggcaggtggcagcagggtgggcaccgggagccatgcaggtgtgggcaaagccacgggtcctgtcctgctggagaccttcccaggcgagcctgaccccaccctgggatccagagaggtgggtgctggtgagtgggtatgtgggcagggagacccacaggctagagcacaagctactgctatggggcactccttccctcccctctccatttcctgcatccattccacctgctagggatggctacctgggtgctttaacagagggctgaggccgtgagcttggggccggaccacttaggttctaatgctgttctcccacctactagctgtgtgaccccaggtgaatttcttaacctctctgggcctctgctgctaaaaaacaaatgagttaatgatacctgcctgatagtgtttgagaattcaatgcaggaatgtgcataaaaggcttagagtaaggtctggcatgaaataggcacccagtaaatgtgggccacctcagcccctccctcctttctgtggtgagctcagagtacagagaagagctctgggctgtgtttggttctagtcttggcttaggctcagagagcccaacctgaggggagacacagctctgtcctcacggagccccaggataaggggagatacagccctgcctagaatctggcagggccctctagtccctgctggtcacctctccttcagagaggaggctgagagcagatgtggcccctgccaggtctcctcagatatctggcccgggctggcagagcctgctgtgccctcagactccccctcactggaccagccaaggctgctccgtgtacccagtccttcccaggaggcttcctcctattcctcaccagtgctcccaagccatttctcatgttctaacctggactccagagttgctgcaaaacagataccctcccaggccattggtgggtccctggagggatggaggagggcttctggaagatcatcacggcctcaaaagccaaaaggacaaactgcaatggttgtctcaggcagcgaaaggccagggaggggaggccctcaagccccatcctgacaccctcagagctgcacagaggcggcacccagtcccttgaggtgtgcaggtcccctgagttctggctctgaacgtgtatgatggccaccgctcagccagctcctggggaagcttctgagccaccgggccccactccctgacttcctgccccctactcccatcccaaagcctggtaagattaggctcccacaccgcacccagctatgtgcctcactccaggcctgctgtttttgaggacaccttcagctcagatggacccacattctgggagggggactgaaagcacttggccttttgtcccagcgaagaagcccctaggggagggctggaagggagctagactgacttccagagcaggctgcgggaagtggggtaggaggcgggggtcatttctggaaatccacacgcattttcagaagcaaacagaagtaaaaataaacccaggtgactctgcagggctggatgatcgggagctctggccatctcaggctggccggatgcagacgggtattaatagggtgtgggtgtgggttctgagagcagccttacctgccattagtggtgacctagggtgcgggggggctacaccagtgagcagagctggaaagcctcaggagttgggagatgatggagggtggggtgggatgagatggacaaggccagctcaggtgaaagctctggggcctggaaacatttgtttctccctggaagcccaggccctccagtcccagctggccgcctcctgcacaggcccagcagccaccccccagccctggagtctgtgccctggtcctcaccaacggaagggcctggacagtttgtagtatcacagcctctcacttgctgtgtgactgtgagcaagttccttgcctcctccctacctcagtctctttttgtgggagctgggttaggggaattctgcccattcctccttgtttttcccctctgagatgtctttgaggggccacttaattcatgcctccatgaagccctggctgagcgcttgctgtgggctcctcagccccgggctgggctcttgggtccctggtttgatttatattaccatcacaggcagactgggctgtgtgtgagcactgggcagctggctccacacccatctccctccatcacccactcccactcagggtgtggggagcagctctctgaaggacctggaattttggcacagagggcggtgaatgaagagggagctgtgggcagaaggcagcatgtgcagaggggtgagggcggcggttgtgtgatggtggatgcgtgtgagaatggacaaggaatgtgggggtggatgagccaggaaggcatgcgtctcaggggaccggggctgggcagaggtggttgtggggcctgagtcagacgtggggcgggtgtggatctggaggggagaggtgtggtctttgcagggacagatgtaggcctggagaatcacgctgggcctgcagcaggcgtgggcccaggggcaggcaggttggatgaggcggtagccatgggtctatgagcaggtgagggcagcgggtagggggaatccatggcttggggtgaaagcatcggtgctgggacagttgtggaccctgggcttctgggggtgagggacgtgggcccaaagcaagtgtggccaggagtgggggcagtttcgtggacagacacggctgggctgggctggtgtatgttcctacaggcgtgtgctggaggcagcacgaagggccaaccagacaggccatttcttctggatgggctctgacagctggggctccaagattgcacctgtgctgcacctggaggaggtggctgagggtgctgtcacgatcctccccaagaggatgtccgtacgaggtaaggctgggcgggtgcaggtggtcggcaccatcctggactgctcctcctgccatccctcctcggcttccttccccttctgctccgcctctttccatatccttccttttctcttccttggcccacagcctcttatgttctgaggttttgggctgggagttcttttaggccacgtgcaacaaagcagaatttgaatccagattcaagaccttccctcctctcttctcagacatttttggggtggaaggtgtgtggagagtccgctgctgaaagaggctgggagccgccctgccggggctacaggacaggcctttcctgaagagtctgcctggggttgacaggccccaggatggtgctgaggttgggcctgcctcaccctgaatcccctcctctcagggcagaacccacagtcacctgggcaggaacgaacttctctggccagaacctcacagagagtgaggtgtgacgttctcgttaatggcctgatttggcagggacctggcagtcctcaccatggggagaaggctccctgggccctctccttccctgccctccctcccttcaatagaatccagcattaatggagctgggagggactgcagacatctgcctctccaaggtacttcccaagacacggaggcctgaggaggggagggacttgctcaaagtcacacagcagtgtcctctcttcatactgaggcagagggagctccctggcccatggcgccttctagccctggcccatacctgtccagaggcccatggctaccatgtcatccaaacctgccccccgggtctacgtctgcctacaggcccagtgtgatcccccaggcccatgcctgtccctgcaaagaccacatctgtccccccacatccacacctgccccatgtctgactcaggctctggaaccacctctgcccagccccggtcctctcagactcatgccttcctggctcatccatccccacagctcttaccccatcacacattcaacacgcctccacccacccaccacacacacatagcgagagtttccataccagccccagccacaataaacacaacataacaataactgctatggtgcttaccagtgccaggccccttacagacatctcctttagcctccccagcatccctgtgatgcactcttccccgcatttagtagatggatacacagggctcagagagcttgagacacacacagtacagcgagtggcagagttgggaccagaatccaggacttgcctgacaagtactttttctctcaggaacattagagaaacttttagaacaatggtccttatctgggggcgattttgccccccaaggggatatttggcaatttctggagccatttttggttgtcacagttgggggatgctgctgctggcctccagtgggtagaggtcggggtgctgctcagtatcgtacggtgcacaggatggccccccacaggaattatcccgcccagagcgtccacagtgccgaggctgagaaatcctactgcaggccaaacctcctgctcgatgccagtgcgtctcctgccacgtggccggtcattttgcttccacttggacgcttccatgggcaggaagctccacgtggccccgctgagctttcaggcctctggcccatacagagcagctcagtccacagtgcctagaacagtcagtatggcaggaggggcgtctgggaggaggagggggtgttgttcaccgccagcctgcccaccctaggacaggctttccaaggctgagagcagaagtgtgagccacgcagagcatgtggaggaggcaggcagcctctgtcagtgatggggacgtcctggatgtgaaggaagaaggtccaggtcctggtcttgctgtgtgatctgggtggttccctccctccttgtctggcctggtctcctcttcaggtgctccccgggttgggcagccccaccagcctctgtgctgtaatctcaggactcccaggcggctccttctcaaagcccgctgttagcattgcagcggttaaaggccgtggaaacatcctcatcggtgtgcttctcttccataaaggcagcagttgtagattacacacgatccccctgggacctaatacagctcttttcattttgaaagaaacgaaatgctccacattttgttttctcctggatcagaggatgtgctcctcctggtctctctccctccgcctggaccatctcttatcctgggggaggcggggagggctggggctggtggggaagaaggccagtgaggccctgacgtcctggttccctgccaggcttcgaccgctacttctccagccgcacgctggacaacaaccggcgcaacatctggtttgccgagttctgggaggacaacttccactgcaagctgagccgccacgccctcaagaagggcagccacgtcaagaagtgcaccagtgagcacgcgggccgggcagggccgggcgggctctaggaggagccggggagggccgagcctgggggcctgaggccgagagtctccctttgtctgtcgtcggccggccgtggcaggacgtgcagttgggcctgcacctggggtggagttgggaggcctggggcggggccttgaggggcggggccacagcagatttggggtgtggccttgagatccttgggagtggtaaggcctctggccgcctcggggttgatgtggacggccctagggccagcccacagcactgaactgacccctcctaacctgtatccagtcttgatgcacaccaggctgggcactttccagaaactacctctaacctccagggttccctcagtcactcagcaagcaccagtttggctcctaggccgtgccttgccctgttctaagcatggtggatatatagcagtgaagaaagagtccaatggcgcttggagtttttattctaatggggagacagacgatcaacaagacgagtgaatgatagaatatgtcagaacagaaatgtgcagaagaaacaaaacagacaataaaaagaacggaaagtgtgaggggaagggaaactgcaactgtgaagtggccagggacggcctgcttgcgcaggtgacatctgagccctcacatgagagggataggccgcacaggggaggggcagtgatcgggccattttacagatgggagaaccgaggcttagaggaggtgagtagagggacttgaattcccatagatagagggcggtagagcatgacttgctcctgggtctgagccctagggcccccgccccctaggtagccatcatggcgtgtccacttcagatacatccggacaggggtctttgcgcgccctgggtctgggtggctctgcggcaggacccagactcaataacattggggtgctctggtgcctctcagcctgagtggtgcctaatcgaggatgatgagttatctcctgtattctctcagacttgatcgtgcagtttgggcaaagggcgggggacgcgctgcatggagtcttagctcctccagagccaggggagaagtgagtgtgatgagggtgggtggggagcatgctgccctctggtggccagagcccacggggacttgcagccactggaccactggggacccagagaagctcacagccaaacccacctgatctgcagagtgagtgctagtgtgtgagtgtgcccagtgtggcagtgtttgtgtatacacctgtggcacatgactttgcatgtgtgtgagctggtgttcctgagagagaagggatgtgtgtgcctgtgtcttatgtggggcttatgtattcctgggtgagctaaacataaacattgctgtttactatgtatccactgtgttcagacactttaaagacatcatctttaaaatgtgaaagacatttcactctcacagcaactctaggaactcttaagattcctgcactctagacgaggatatggagagtcagagagaccaagtgacttgcccgaggctgctcagcaaatgcctgcatcaggcagtaatcacaatagaggtgtgagaagtgcaaagatgcctgggtgtggaggctgagccctcatgggtggggtgaccgtgcatcctgtctcccgtgttctggtgtaattattgagagcatccccttcggttcttggaagtgcccaggcgggatggaaaattgtatgggcaccctgatttagatcagcagacctagatcagatcaggggtgagggtggggatggatgaggtggggatggggtggaaagactggaagtggtggcaagatggacagctggtgcctcctggacccagtgcctaggctgtcgaggggtctgggttgtcaaggggaagggctttctggaatcttctctttgagagggacaggaggggagaaggctttggtcagttcctgtaggctctgtccagactcctagtccttggggcaggattcaagaaactctccagcagtcctaagggaggcgtttggtctgattgtcagctcaggtggggaaggaggactggagcagggttcagaagagcacagagctcggctgggcgtggtggcacatgcctgtaatcccagcactttggggggccgaggcgggcggagttcatctgaggtcaggagttcaagaccagcttggtcaacatgctgaaaccccgtctctactaaaaatacaaaaattagccgggtttagtggtgggcacctgtaatcccagctactcggggggccgaggtacgagaattgcttgagcctggggaagtggaggttgcagtgagccgagattgtgccagtgcactccagcctgggcaacagagtgatattctgtctcaaaaaaaaaaaaaaaaaagagcacagagctttcccatgagcctgaggcaagctctacaacctttctgggcctttgctttctcatctgagcaacgggattgatgagccagcccagagggtgtctccagaaggaagtgaagcgttaatggaggcacttcctgatctgtaagtggcagctgtaaagcctggaggtgcgttagagtcacctgggagcttttaacaccataccagggcgccacccccagaccaactagatcagaaccttaggggtggggcctaggccgtggatttttacaaagctccctaggtgattttaatgtgtgtttagggctggagcagtggtttccaagctttgttcacaatgaatcacctggggatcttttaaaaatacggttaccctagacattccggtttaatttgcactggatgcaacctgagcgtcaggattttttgaagtgccccaggtggttctactatgcagcaaagtttgcgagcctctggcttggagggaagggtgggtgacgcccctcctaaatcaggagggtgccctaaatcaggcgtgcgccctaaacaggtgaggaggcatgagcaaaagggcaggggctctagacgcggtatgtctcagctgacccgaatccttcctgctgcactgggagccccagcagagacaggtcagagtccctgtgtggccccaggccaggcgctgtgagcctctctgtctatctctgggtgaggtgaggggcgggtgagggggctgctgggaatgtttgtgggacctgagaccctggggggaggggcaggcagctctggtttccccatggtcctgcccctgagctgagcctgtcccacaggagaaggccttaggccaggagggctggagtgacacccacagagagctgggagcaggggcaggggaaggacccacccctgggtctgagtctggctctgcctcctccctgctgtgtgaccttggcacccgccacctaacttctctgagtctcagctgctgtcagtagnnnnnnnnnnnnnnnnnnnnnnnnnnnnnnnnnnnnnnnnnnnnnnnnnnnnnnnnnnnnnnnnnnnnnnnnnnnnnnnnnnnnnnnnnnnnnnnnnnnngtgtgtatatatgtgtatgtatgtatatgtgtgtgtatgtgtatatatgtgtatgtatgtatatgtgtgtgtgtgtgtctgtgtatatatgtgtatgtatgtctatgtgtgtgtgtgtgtctgtgtatatatgtgtatgtatgtatgtctatgtgtgtgtgtgtgtatgtgtgtggtgggcatcctcctggtctggtcacttcactgcaccccagtctttccatatgctactgggggtagacttgagacaaaagtccaggaggccacagggagctgagaagttgctagaagtccacgctgctgtgacagcactgggatggatgctctgtaagggcagcacccgaggcctagcactctggagcccttcccccagagctgccctgggtggaggcaggttaccctggtgagggggctcctgcgggatatccacgctagcatccatactgatggcttcgtgaccccagagagagcacttggccccgagcccaagtggcccaggagtggatgcttcagcgggagcctctgaggagaggctgaggccagcctcctgggggaggtgtgtttccccagagatccagctagcctcccatggctgggtgcgtccttggccttgagagagagctgccttctctctgcagcggccgtagcctcccactccatccctggttaataatttagtctctcatccatatgagatgagggtgtgatgggagctgtgggggagtcaagtagtgttttatgcttcttcaggctggagagggaagggcctaggggcctgcggggagcaagtgtgggtccagggagggtctttccaggcgacactgtcccagccttctctatgtcctttggggatgggatcgtccattccatttctccctaggccctcgtgaccttgtgatcagaggccttggacaaggcaggatggtgaagctgtcttttgtgttcatcctgtctgtttgtgccttggcctggaaaaagtgttgctggttagcaaagctagcagacacgacccaagtcaaatgcagcctgggatggagcaggggtggggtctagaagctggaagtgcccatcctgtcgcccttggctgtgtgacctgggctttcccaccagcctcagttttcttgtctttaaaatggcagcgggggcagatgacccccgtggtcctggtgtccctagtgttgtggttctatggtttctactgtccactcagcaatatctgagtacctaccctgaggaaggctgaaaatgggatgtggttctggctggcagggttaatgagcgaccaggccagctatcccccatccccacatccttgtgtgggtgtggccactggtgtggccaggattagagggtgtgaggggattagagggtactgcctcagggagaggcagtgagatcccctgcaccctgggtctgccttcagggtgtccaaggcagggggctggacacagtgacctctggagtccccggggaatcactgcctcatgtggacccagcttaaccctggcctatgggggcaggacacaggtgcaggtgtgcaccctgctgccctctggggaattgcctctgtgcagtgtggcatgtgccctctagctgagaggcacgggctaggagtagaatgataggaggagtaatttcctcgtcctgtccttgaggaagaaggccatgctgtatgcaagggctgtggtcttaggaggggaatccaggcttccctatctctgcccatcctcccccttcctcctcccagccatcctcctgccatgtcctcacttcagatccctggtcccctccccacattcctgcccacctgcatccctgtgtggcagagtgtggtgctcagggttggagttggagtacctgggttcacatcagcttttcatagtcgtggaatgttactgagcttttctgtgctcagggcttcagtttctttttgagatggagtctcactctgtcgctcaggctggagtgcaatggtgcaatctcagctcactgcaagctccgcctcccgggttcatgtgatccttgtgcctcagcctcctgagtagcagggattacagctacctcccatcaggcctctcctgatgttcccagctaattttggtattttgagtagagatggggtttcagcgtgttggctgggctggtcttgaactcctgacctcaagtgatccacccacctcagtctcccaaagtgctgggattacaggtgtgagccaccatgcccagttagtttcttcatctctacaatggaggtgattacaccttagcattgttgtgagaaatcaatgagtgaatatacatcaagagttccgtacaatgcctgacacatagcaagtactggtggaagttacttacttaatgttattgttgttattcaatatgttatctaatatcatgattacccagggcccaggccaagaaccaccttcccctccacaaagtcgtcccacctgctccagcccagggacctccatagccctcttggaagcccctgttctgcccacttagcacataggacactgtggacgagccatctgctggctgtcaagtgttttcggtaccttatctcatggaagcctcatggcagctctgtgaggtgggatcatgatcccctttttgctgacgtggacaaccaaggaggctgcacagggccccagagcagaggtcagtggacacggaggggaggggaggaggatgggaggtcagaccccaggtcacggtgccttggggagtcattgcaattagcagtgagaagcccatggggatgggtttctcagtttgcaaagttcacttatccttgccactgggggacaagagggttgtccctgaggtagaagagggatggatggggcaatggtgacttctggtatttagggtgactagaaaccattgagggcagtctttcagcctctctgggcctcagtttccctacccataccctggggtgagggcaacatcctctggctggagcaactgcccatgggtgagtggctttaaggacactcccctcattgatggacatagcccctgtcctggctgtttcccagacttcgagaggggcagctgctctcaagattatcccaggccaggcttgggggaaggcaacaagggccacagccacagggagacctctgggacactgccttccatggtgaaaggtgacaaggtagtctgccctggatattctgggaccttgggtggcacaggcatcagtggtacggtgtccaggccggtggaccctcccattacacccatgggcctgtctccaggcacctccacagggccatctcctgggtgatagagcactgggctgggagtcaggaggcctggccatgcacagatgggccgtgccacttctccaggtggccagagggtggtctggcccccatgacaccactgtgaggacagtgggcctcacgagtgtccctgttcctggtgtttcattgcagaccgtgagcgaattgggcaggattcagcttatgagcaggaggggaaggtgcagtttgtgatcgatgccgtgtacgccatgggccacgcgctgcacgccatgcaccgtgacctgtgtcccggccgcgtggggctctgcccgcgcatggaccctgtagatggcacccagctgcttaagtacatccgaaacgtcaacttctcaggtgggggtgtggtgcggactgtgcctgaccctgggtatcctgggccatgcccgaggggaggggcccttaggctctgtggggtgggaatgggaggcctctcctgatgtttccaagaggtgaaatctcccagaatgttccatgaatgggtgtgtcagagaggtctctgccccaggctcatcatccgccctgcctctgggtaaaggctctgcaaagacacccgcccacccttacaggcatcgcagggaaccctgtgaccttcaatgagaatggagatgcgcctgggcgctatgacatctaccaataccagctgcgcaacgactctgccgagtacaaggtcattggctcctggactgaccacctgcaccttagagtaagtgggagggcagggagtgggtggagagtgactcacgcagttccagcccctgggaggggggcccaaggggaggctgctgctgattagccctgacctccaggaccgctgctgccaggctggggcttccttcccagtgccctctcccagacctcagcggctctgaggcccccaccctgaaatggaagacagggcagtcggagttctgctgccattctggtccctgccccctcccttagcctggggccttcttgcctgctacccactgaggaggggatggggggactctggatagaagaattcacaccagtgtgaaatggctcaaaggctttttgggtgggcaagtggggggtgatggggggggcatgggggaataaggtgaggagggggagggctgcatttggacaaaggaggaagtcttaaggcaaaggacccaggttgaacggtgggatttgtgccactgactggtgggtagtgagccagttgccagttccccagccccatcaaagcacgatagaaggcagccatttttctgggtcctcctagccacgctttcctagctcatggaatgtcccacggatgtggtgactttccctctctggccctcagtatcccagctgtgaaacagagcagtgttttcggagagaaaggacctttggtttgttcctcaacaaagtgcttgtggacttggtctctaccttgcaaggggaaggggtgagccataaccggggtgggcccactgtgaccccgtggatagactggagagactcagagacaggtcctcatctggcctccactctccttgtcctgggatcccgtgggtgctgcatcgaggccctgctgtctcctcttgtcataatctcttccagcgaggaacccctcgtgctctgctcttcaaagtactcttggcctgcagtcttatttagcccaaccttatcttctaagtcagaggaaatctcccaggaaacccagccctggggaggcagaaggactctcctaaaggccacaccttgtggcaggaacagcctgttcctaaatgaggctccttggattgctgggtggagagcgatgggcacaacagggtgtgaggagcacttggcaaagtgggataacaccaagtcgatgtgcccgttttgttttggtgcagtgggcagagcacgggggccggggactgcaactcactagccgcagcagctagcacttactgaatacctgctgtgtccgagctgctactctaagcacgtccccttgctgtgaagatgacagctctgtgaggcaggcagttatccccattttccagatgtcctaactgaaggtggcagggactgggcatgtgtgagcggcagtgggcccttcccctgaaagtcccctccccaggaatacaaggcccctccaccggccagaccgtcttcatggcccattctgatgcagctcacaatgccctcttagtcctcctcacctgtaaggcccggacagagctgaggtggtgggggggaggtgagatggggttggactttaaccatcaaccttccccactttctccgtgagtggctcagtttgggctgtgctgtgaaggccacagagcaagcaaggtacctgtaaccacctacctggctactgtcctcctccagggtctcagggtgtggcggcgtcgcatcactggtaccctggaccttcttgcctgtgtagttattctttcatagattccacagagacctgctgggcctctactatgtgccagcctgtgctgagggctggagacacagcagggaagttaacacaatgcctctgccctcatggagctgacgttctagtgaaatattaaaaagtatatccattatgacttctaaatggaggtcactccaagtaacaaagggcaaagtggcttcatatctgctttcattggttcagatgagaaaacaaaggctcagagaggagaagccatttgctcaaggacgcacagccaggtagcaacagaattgtgatcccaggacttgacctcagtcactgctctttccatctgaatcacagagttttccggaacactcaccatcgccccgtgtcctctggggaagggtctttcccctgcagttgcacagctgcagtccacagggaccgtctcgcctccaaattcctgcaggacaggttgcacttgtccttgctctgtgcgctttggcttctgagttaatccacatcctgtcatgcccagagccacaggacaaccttctaccttgaggttttcttcctaccttgccacgaggcatccctacttacccaccttacccctttcctttattcttttttttttttttttgagacggaatcttgctctgtcgtcaggctggagcgcagtggcatgatcttggctcactgaaacctctacctcctgggttcaagccattctcttgcctcagcctcctgagtagctaggattataggtgcacgccaccacacccagctaatttttgtattttcagtagagacggggtttcaccatgttggccaggctggtctcgatctcttgacctcatgatcctcccgccttgccctcccaaagtgctgggattacagacctgagctaccatgcctggccccttttcctttattctaaagccctccccacaccccccaaccagctagttacactttatcaggaggtagcacccagtgcaaatgcaccagtctagccaggcttgctgtgctctgagagtgagcacttcctaagagacactttatttagaacagtcgctttgaatacagctcccaggtgtagtcaagtccctttgcctgatgcctgagactcttttgggactctcactttccagaatattgtaacatattcagtagggtgtgacaacactcgtgtggctctattgctcacagccattgtgtcttcagggacgtgtaactgtgggtagcactaatttagagcaagatgtaaagaaatgctaacccctgagcacacattaagcatcctctgattaaacctttgttcagctctctgctgaatccaactctctgctgtttggcagaggtgccttgggctgggccgtagggcagcacatcttccactccagtgtgcacaggaatcatctgggggtcttgctgaaactcagattctgagttagtaggtctgggatggggctggaatttgcctttccaacaagctcctgggtgaggctgctgctgccgccctggggaccactgtgagcagcaaggccttaggggctaagagtcaggactcttgagttctctttgctctgcactgttgtttcctgtgactctaggttgtcactactgctttctgggctcagtttcttcatatgagtcttgagagtttcgggttcagtcaggattccctgtaggtcaattatgtctgagttatgccggagaccttttttaactccagctgttagattcagtaagtccctgtggggtccgggcagctggacttttagccaactagctgggtgatttgagtgtggggctacaaggtgccaccacccagtaggatggtccggggcaccgggtggcatgttctgaggcctgctttacggtgctgtcattgccagatagagcggatgcactggccggggagcgggcagcagctgccccgctccatctgcagcctgccctgccaaccgggtgagcggaagaagacagtgaagggcatgccttgctgctggcactgcgagccttgcacagggtaccagtaccaggtggaccgctacacctgtaagacgtgtccctatgacatgcggcccacagagaaccgcacgggctgccggcccatccccatcatcaagcttgagtggggctcgccctgggccgtgctgcccctcttcctggccgtggtgggcatcgctgccacgttgttcgtggtgatcacctttgtgcgctacaacgacacgcccatcgtcaaggcctcgggccgtgaactgagctacgtgctgctggcaggcatcttcctgtgctatgccaccaccttcctcatgatcgctgagcccgaccttggcacctgctcgctgcgccgaatcttcctgggactagggatgagcatcagctatgcagccctgctcaccaagaccaaccgcatctaccgcatcttcgagcagggcaagcgctcggtcagtgccccacgcttcatcagccccgcctcacagctggccatcaccttcagcctcatctcgctgcagctgctgggcatctgtgtgtggtttgtggtggacccctcccactcggtggtggacttccaggaccagcggacactcgacccccgcttcgccaggggtgtgctcaagtgtgacatctcggacctgtcgctcatctgcctgctgggctacagcatgctgctcatggtcacgtgcaccgtgtatgccatcaagacacgcggcgtgcccgagaccttcaatgaggccaagcccattggcttcaccatgtacaccacttgcatcgtctggctggccttcatccccatcttctttggcacctcgcagtcggccgacaaggtgagtggtgggggccgggggtggacggtgggtaggtgagggcagtgagcaaggggcagcctcctgaggctggctggcctcccccctgctccagaaatgccttctttcttgcctcattctgccttctttcatgcctcattctgccttctttcatgcctcattctgccttctttcatgcctcattctgccttctctcccagctgcaagttttctctctgggttctgggttttctctcctctttctctgtttttgcccctctccctcttctctctccccctttctctctgtctcatctctccttttttctctcctccttttgtctccttcagccccactttactccctctttccatcctccccctgttctccttcccccctcctcctctttctccctgtctctccatccctgctgcccttaccccatctcctttcattctttcctcctcctattctctcaccccttcccccctccataagcctggagcgctgtaccctccttcactcttcattcttttctagactcctttctcttacctctctccctgctcaaccctgtcttccttttggttcactcctctcttctccctcctccatctacccctcacaagatccccatgggatcccgcttctctccccagccccaagctgccctggaagcctaaaggctaggggctggcagagggcctttccttcccttggctggagttgcagagtggctacctctgcctcctgttggcttggtccgaggacctgggcacaccccaagagacctgtatgctcggcccacatcccagtcctggtgctggctgggtgactcgggggtgttatctggaagtactgggagtcactgaaggcagggcatcaaggtgcaccaaggacccaggtcttggtctgagtgccatgtataagtgtgggatctgggcaagccagttggcctccctggcctcagtttcttcatcagtaaattgggaccatgtccctttccctgcagtctttccaggtattgtcacaatcacatgacacagtgggtgcacaaacagttaatacactgtaaggagtgtggagctgaggaagccagaggagtggggaacgagatcagagaggtgacaggccagatggtggcaatgacattggcttttaccatgagtgagaagagaggccgctgcaggcttctgagcaggtgagggtgctatctgatgtaggttgaaaaggaccctctggctgccaagagcagctgtgagaaggtcactgtcatgctctgcaggagagggtgtccccagcagatgcagtggggagtgggggagtctgggcctgtctggagactggctggtcaggtttccaatggatggcacgttgggtgggagacgaggagacagtcgagtcaaggaggacaccatgctttgaggcctgagcaatcaggaaggaaggagtttcccatgctaaggaagagcagacaatgagaggagcctgggaggggcaggagaaggggtcctttggacatgctaagtttgggatgctcattagacgtccaaatgcagctgccaagtcagtggttgaatataggagtctggagttcaggggcaagttctgggctggagacatatctgaggagttgtcagcctgagcctggcatctagagctgtgagcccaaggctgggtgtggtggctcatgcctataatcccagcactttgggaggctgaggcgggtggatcacttgaggtcaggagttcgagaccagcctgaccaacatggtgaaaccctgtctctagcaaaaatacaaaaacgtagccaggcatggtggcttatgcttgtagtccaagctattcaggaggctgaggcaggagaaatgcttgaacttgggagacggaggttgcagtgagctgagattgtgacactgcactccagccagggtgacagagtgacagtctatctcatgaaaaagaaaagaaaagaaataaagagagagagagggagagagaaagaaagagaaagagagagagagagagaaagagaaagaaagagagagaaagaaagagcgagctgtgagcgccagtctgagctcccagggttgcctagttttcagtgaggcagccatgggatggggtgctcgtcatgtggagacagtttacctaacggccgtttggccccatggcagctggtgaggtctcatcatcccctgcttacagatgaggactcaggggcacagagagggggagtgacttgccttggtggcacagctggacttgaccccactttgtctaacttaggagcacccccccatccccagcacacccttcccccctgcagctctgggatacctcatgccctgggacttccttggtaggtgcccacctcttttccaacagctcctcaagggtcatcttccaatgggggccctgtgggggccctaagaggcagaccttggggctggcagtgagtgtcctaagatctgagatctgagactgggtctgcttcagcagggggatcccaccttgcaagcctgagccaagcagccctggtgcagccatggcgcccggcccatgctgtgagctgggtctctggcctccaccaggcctgctgtgggagaccctccctgctgagcgcaggtgcaggcagaggccctcacgcctctcaatgctcatgggccccatggagccagcagggaggccatcccataccccaggaaactggcagcttgagaaattaccctcaacaataccaggaggccccttcccacacctcctcagggagtaaaggtacctggctgggaggcccacacgtgatggttaagcccctccctccaccttgccatatttccccctggctgcctgccagcagcccactccccagtggggtccctgtcatcccaggatatcaggctctccagtctccagatgttgcaacccagccccccaactcagcctccctaccctttcaatctctgcaggtgacctaccagcctctgattcctgcctttttaggaggctcccccagccagccctgattatgaagggagtccctgagatgatcagttcataggcccagagagggacagggacttgtcccaggtcatacgacaggctggcctcacaccagtgtgctctctccctggtggcctaggacatgggacatacacctctcccactctgggcctctgaacgggaggcggtggaggagatgtgttctgaagttcctgcggttcagactaccaggcttcttagagactcaggcaacctggggctgtgtctgggccatgtcatgccgagctgcaagatgccccattgcaagctgcaggtctggctgctaagtgtgtgtgtttgcatgtagatcaagcggggtgtggctgttgtcaggagttgtggtgtgcctacagaggtgtgtgtgtatagacgtgtgtgtgcctttctgtgcatgtacatgctcagtggtgcatgtgtggtgtgtgtgcacaggtgtgtgcccatgtgcatgcagattaagcggggatgggttgatgggtgtgctgaagggtatgtagctgctggtgtgtgtatggatgtgtaggctgagcatatgtgcccaggagtgtttgtgcacacaagtgtgcagatgtgtgagtgcaaatgttagtgagtgtgtgcaggtggatgtgtgtagatgtgtgagtacatttgtgtctatgtatatgtgtgtacccatgtgtgaagaggtgtgtgtgtgtgtgtgtttgtgtgtgtgtgagagagagagagagagagcccagctgagtcagatgcaaatgtgcagctgtgaggtcaggtgtatgtgtcaatgcaggtacgtacgtgtatattgatgtgtgtgtgagcaggcatgcatgtatgcacacacgcacttgcacatgctcagctgcacccgttcccccagggttcaggtgctgtcacagagtgaagctgtctgtgccactctggtgagcaggcggctggatttcccagccttagcccggatttccagggcttaacaccacagccatttggaattacactgagcgggctttctccactacgtggggttactgctcagtcatgcttgggcaggacgtggctgcagaggcaatcagggtgtggggaagtttatttgtctggtttgtacagatttggaggatcttggttcctatcagggtcagccggcagaagcacaaggcaggcagagctccctggtgcccccactggggcccctcgaaccctgtacccaccaggcctagcacgaaagcaggaaattcatcatccacatctacagctgctccttcctgtgccctatcctcaccccaggtgtcctctgtcctcctgtatcaaactcagctcagacaagctccttcaccatggggagcacatgactagtgaggttgaatgcaggattcctcatggaggatggagtgcagtgagggcccatccacacaggagagcagggatggtgggagttcaggcaccagcgggctaagaggcaggtgggtgggagaggaggggagatcatagcccgaaggccgcctctcgctctacctccctttaggaccttcctggtgcctgggttcagcccctcgggagtgcctgctggggtctagaggaccactgtttctctgataagggttaacctgctaccacctcctggtggccatgtgtaccttcacagagggggctccagaaacaatgtctgacccagaggcaggctcccatggtggggctcaaattccacaccctggggcaaggagcagaactggcggtgggcagccccactcctgctgtgtacagggcctacctcccagctggggatggctagaggagcccccagggcccatgctgggagggagggttttgatctatttatatcccttgaattttgttcgcagaaaggctcctaggctgaaaaacaatatagaagagaataccaatgactgtgcccatgcctgtgttgagagttggctatataattttcagcgcccagcacaaaatgaaaacgaagggcccactgttcagaaattatccacgattcaatatggtggcagaaggaccttaaactgagagctaggcacaggcccctgggtgactgcacaggttgtacactcatagcgctggccctgcctgtgttcatggaggggcatctggtgcccagagaggggtggaaacttgttagcatcccacagtgggctgaggcagagtagaatctggaacccaggacgctggccctcgacatagaactgtgtccactgcaagggttcctctgcccagagaagggcctcaatccctggtcccaccaactccatgtgggcccaattgcactgcacccatcaacaaggagcaggcaaagggtctaagatgggtgtcttacctgggacacaacccctatttccaagaacccccagtgtgagaggagagccagccctgccctcagggaaccctgatgtaatcagggagacacaccttgtccctagggaactcctagtctcatggtgaagacccagatgacaagcctattctccattagcccgagactctacgatattccccaagcgtctgttttgatgctctggagcttcttcctgccttctcaccctggccaccagccccagtttgggcaggagagacggccagcacggccccgctggctggtcatgacctttccctccaggagagctccatgcccaggggtgagagtgtaagtagtatctgaggatggaggcctgtctgtgtctggagcggcatgtgctcactgggggacaggctttcatttcccctgggcctgtgacatttccctgaaccagtggccactctcggcctccttcccctcggagctctgcctgacctgggccacgccagcctggaggctgcactttgaggagtgtcagtgccttggcttgggcacatcatggctgtccggtcatgccctcgtgtcccccatgtctcttctcctcaccttcacctcagtgcctgcggtcactaaaagcaagtttcacatggcttcacagtctgtgcttggggtaccctcatggtttgggtgaggtagctgctttcatcccattgcactgagggaaaaactgaggcccacagaagggcaggattctccttttaggccctacggcttctccagtccctctcccaaaggtaggaaacccagggcagggtggctggaaatgaaggtcatcccatccagtgtcatgaggcatctatggagcggcgtgcaagggacagggaggaatataagaatgggaagacctggtccctacatggggggtactgccagatgaggccagggcccctgtgccttcaggaaacaagtccagacctgtgtccacactgctggtctgggtagaagaaatgaagggtatcatgggggcccatagagctgggggtcaggagaggattcctggaggaagcacaccagccatgtaccagggcaggacccaggctcagaaagagcagatttgggaaagagcatttcctgcttccttcatgcccagacccaggaggcctagcctgggtctcctttggtcccaccttggctgaggaggttcagaggggcggctgaggcctggaggacccgaaggaagggagaggcagggaggggaatcccagacggggacagtgggaattgccggaccctgcctggaaggctctactattgtaaaatggattatccgacacccagattaatgggctttcattttgctaaacatctgtcactgttagtgctggcgagcgagcatgaaatgagctctgactgctgccaccaccatatcgcgatgggtgccgaggatcccatgctctgcactgggggaccgttgcgggggcagtcattgaatggaggtctgatccgaggggctgtgacgtggccactgggtgttatcccaaagcaccaaggggtgctcctctcgccctcagccctgagaagggccagctgtggtctcctgagagcctctcctcaggcgcacgtcctccacatagcaaataacagcggtaacctgaaatggcacttaccatgtgccagatgttttccacacttttaaaacatttattaagtcacttaattctcacaacagccctaggaggtaagtactatcattatcacgcccacattatacgtgaggaaactgaggcacaaggatgtgacgtgtctaatatcacacagctggaagtagtgagccaagatttgaatgcagaaaccctggtctgcagtcccagctccaagccacgacttccttctgcctgaaggcagcgggatgccgggtgggtccctgggtgggaactggcgggagtcagggccctcagtcggggcagagcctgctctgacgccaccgtgccctccgccagctgtacatccagacgacgacgctgacggtctcggtgagtctgagcgcctcggtgtccctgggaatgctctacatgcccaaagtctacatcatcctcttccacccggagcagaacgtgcccaagcgcaagcgcagcctcaaagccgtcgttacggcggccaccatgtccaacaagttcacgcagaagggcaacttccggcccaacggagaggccaagtctgagctctgcgagaaccttgaggccccaggtgagtgcctggccccgttctgccctctcgggccccaggccccgctccttttgcagcaggtgggctgagctcctgcccctccccaccccgccctgccccgatgccccatcctggggaggcggcgggggacactgggggaaccctgaggctacaggtgggagccagcctctcagggagagccctgaggcaccacattagagcccgttctgtcctgcccctcctggtggcctggagagaacctcaaggtttccccagctggtgccctagcagcgcccttccagggatctgtgccccaccccgaggcaggccaccagggggcgcctgggccctgagggtgagcggggaccccgggatttccctgtgctggggcctgggtctctgcctgtgcccctgcctgtgccctttcagcccctctgggagaaggaatcgtccccggggccctgcacactggccctttggtaacccggtggggtgggagcggccctgagcccagagcagctgtaacacccagctcggctttgttcagccaccccctagcaggcacctgagctatggggacccgggacatgggccggccaggaccggtgagtgagggcagggtgaggcagaggggcctacaggactgcctagcggcgctcaggtagttgcctgtctgggggactgtccggggagacccagcaggagagggtcatgctttgtggtgggggagggcaccaggcagggacctcggcagctgaggggcaggcctgtggtctggagctggccaggacaggtccctccagggctggtaacggagcagtgccaccatctttgccaacttccctcttcctcggagatccagcctgtgcacctctgttgtggagagtatactggcttctgatacccttccctctctgatcaacacccctgatgcctgtgtgtcccccttttcctgccctgcgacctctggttctttccagtcctcctcctccccacagaacaccagcttccctcaacctacgaccctggggttcccttcgggtgccatgctggcccccatgcagagcggggaagggacagaggggcccatgggactcccacctttggcctttcatgtctacctggatgttcggaaaccccagatgaagtcctgaccaggcctttctgccaaattggggaccctctccctgttccagttttcctccttcccatggagaccttccttcccaggtcccaggtcctgttccatccagaccacctctctgctgcgtgcaggagcaggtctgtcagatatgcttttccccagtgctcctgagagctagggggtattagcccctcccggaggtgacaccctggccccaaagggtgacaccgcgggtgctgtgacagggcagagggtcccataaagggtggggccctcacagagagctctgatggctcagtacgggtactgccctctgcctctgctccagccagtcacctgggaacatgggacaattacccactcctgccagaggaggggtgtggaggcctggggagggagaccccgtatccccaggcccctgcttcctgcccagaggggcctgggggtctccaggctgtggggcagcccccatgggcctcacttccagctgctctggggttgggagggaccgaggggtctgtggtcacccagaccccctgcaggccttggcatcctcccctctgaaagtcttaggggcttccatggtagggaagtggggagcccctctccccacctcctgtgtgaagggcagcaaccagcaccctgtgcccccactgtctctcagctcagtgacaacaggggccatggaggcaccgggcaggagccaggtgattaattctggggacagccggatggagggggtgtgagcaggaggagtgggaaggtgtcactcctgtggaacagggacatttttcactctgtcactggcaggctacatatctttaaacaaacaacagaataaataattcaggggcctgattgcaggcagattgggtgcggagacaaggggtgacaaacggggactgtcagctggtgcctagcactgcctggctaattgttatctgcgcctccggcaactgaaaaccagcagccagggcctattgtcagcaccgggtgggctcggggcctcggcccacaccccttggccttcccctcacactgagggtgctccgggagtgttgctgtccctatccagtccccagtgctggaataattccagccctgtccttctgcccagcattttgcaggatttaaagagtgtttctgttcacctcttggctgaccccacgtggtgtttattatcaccccatcttacagatgagagactctcggctctgagaaggtcagtttgttagaagggccacatggcaggtgtcgagattcccccacagcattgcgggcaggactggtccccaagtgtcctgacttccggtgaacctttcccttggagcctcactgttagctcatgggggccctgggcagactcacggctcccattttccagatggtgagactgaggcttgggtgaagagctccccagcttctggaacctgtgagctgggttttctagggcagacaggtagggcattagaggagagcagaggccctgtggtccttcctctctacactttctctagtctgcagctgcccctggtgcccctcagctgccctcaggctcgcatcccctgcagtcagtggagattttgttgtggctgctgagagtttttttcacctctgagccaggagctgctgatgggttttacaggcttggaagctcagttttatcagttcccccagggggtgacggagctctggggaattgattctcaccagcctggcctgctgtgattcgcatagccactgctgttccttttctgaccatgggggatagaatggggtgaagatgttggaggcagttggaagcccctcaggagaagtagtctaggcaaaaagggccactttgctcaagttacaagcagggaaactgaggcccagcaaaggaggggaagagctgcctgaggctcagagagagtgtgaggcctcccagcaactagaatctcggctcccgccctcaggatgctggtctgtgctcatctccctctcagcacctgccatcccaggctacctcctggatgctgccccatccaaaatgacctgtcctgtggtccctctgccctcttggtcatccagcaccctggaaggacatgggtcatttcagagatgaaggtgggaattcttcatgagctgtaaggtgccatgctgtgttcttattctttttttggatgttgtggcaccattttcttccattggcacctgtccaggtagcacataaaccttgaaacttgcccaccaccatccggctaagtgattcttcatcgtctgcttgaatttttctgttgacagggagctcataggccactgactccacccaactctggccaggagaaaattcttcctttaactgagctggaccctgaccttcatgcctccctactggtcccatggtggacccctctgctcaccccatcctcaagcagtttgcttcgtccacatgtgatagactgatagttggacaccaaacttctgcctgtgttagtgggcttccagttacactgctgtgacaaagaggtcccagaactgagcagctcaaatcagacagatgtttgttgctctctgccgtaataggacatggtgggtgggtgggagtgaggacccaggatccttccatcttgttgctccattggctccctgaagattgaggctagatgacctcaatggttgttctgctcatggaagggaaaagagaagacgcatgggggaaagacccattttaattgaatgacatgggagctgcacacagtccttccatgtgtatttcatgaggaagaacacagtcaggtaaggcctcagctagctgcaagggaggctgggaaacctagtccttcagagtcatgtgcccagtgaaataggggagagaggatcggggggacaatttgtagaccaccacacttgtcccccagttttctcttctccagatgcccctggctgagtctggcagatgtgcctcctttttgagccaacagatcctgaccgagggtcagggcagcttttagacaaaggacagctggtttctcccacccactgcttctctccagactcgcagatcagcccctgccccaggcagcaatactgccctgattaccaccactgaggcggctcccaggccactgagggaggccctaaaccctggctagacaggacaaaaccaagggtctggccaggcccctcacccctctggcctcagttcctcatctgtcaagttgggcaatgcttcattggctgcctcactaggctgctgtggggtctgcactctggaggggtgggggacactcacactgctcatgagagctgctggcgtcactcagctgtggacaggaatgggagatacccccatgtaccaccccagtcctggtgtggagtaagggccagagggacaggggcagaaaaggggggctcaagactgagagagacaggggcaccaagaagtagaaagggtaggtgctcagagggccctggggatctgggggacttgtgtttccttgggtgtagggcggagggctgagtcaatcgcatgcctcagtttctagccatgcacggccccactctggttttcattatttatttcctctgtccctgttccccactctcttcccttaggccactgttctagtttaatgtatattccttacatgtgcgcatccaaaatgcgtgtggttgaacttctgaaagacttccctttgataatattttaaggttatatgatgtcataaaaaaaggtttcttttgaagggtggtagaattaggaggtggcaggggccccgtgctggggagcccctcacacaggagtggggtttgggaaggagtgctagaggaaggagtcatctctagagtacaaagggaagaggaaaggcactccaggcaagcagcccagcccggcaaaggcgtggaggtgcgaaacatgggcccagtccctggatggggagctaggaacagcaggagaagcaaccgggtgggccaggcggggccggtgcagtttggggcagtgtcgattgctcagctcaggactggatgccatgagaggcggggagctatggtaggttcttgtgcagggctgtgcccatgtggaaggacagtttgagaaaagcagcccctgactcctgggtacccctggtctctctccttccagcgctggccaccaaacagacttacgtcacttacaccaaccatgcaatctagcgagtccatggagctgagcagcaggaggaggagccgtgaccctgtggaaggtgcgtcgggccagggccacacccaagggcccagctgtcttgcctgcccgtgggcacccacggacgtggcttggtgctgaggatagcagagcccccagccgtcactgctggcagcctgggcaaaccgggtgagcaacaggaggacgaggggccggggcggtgccaggctaccacaagaacctgcgtcttggaccattgcccctcccggccccaaaccacaggggctcaggtcgtgtgggccccagtgctagatctctccctcccttcgtctctgtctgtgctgttggcgacccctctgtctgtctccagccctgtctttctgttctcttatctctttgtttcaccttttccctctctggcgtccccggctgcttgtactcttggccttttctgtgtctcctttctggctcttgcctccgcctctctctctcatcctctttgtcctcagctcctcctgctttcttgggtcccaccagtgtcacttttctgccgttttctttcctgttctcctctgcttcattctcgtccagccattgctcccctctccctgccacccttccccagttcaccaaaccttacatgttgcaaaagagaaaaaaggaaaaaaaatcaaaacacaaaaaagccaaaacgaaaacaaatctcgagtgtgttgccaagtgctgcgtcctcctggtggcctctgtgtgtgtccctgtggcccgcagcctgcccgcctgccccgcccatctgccgtgtgtcttgcccgcctgccccgcccgtctgccgtctgtcttgcccgcctgcccgcctgcccctcctgccgaccacacggagttcagtgcctgggtgtttggtgatggttattgacgacaatgtgtagcgcatgattgtttttataccaagaacatttctaataaaaataaacacatggttttgcacccgggctccacatccactgagggtcctgccatgggaccacaggctcagcctgcagctggagggcttagacctagagggaagcgggaactgggctctggagacccagggcttgggggctgtggagactg

SEQ ID NO: 720 - protein, 1183 aa, Homo sapiens
MGACEQVRVFTSNSYRASALTPMLAAPAELSLQNPVSQELSSPFVQQVWITAVLGRPRTCPGLSRHAAAVLLCTDSRMFTVPSHPGTQAAWRRASVLCMAASQCLTPCLAHRRRSVHVCGLHEGKVVAAGRQERPEELCVCVHAHVRVCACVCVCCVLWPQASRVPGTEQPLLPERTLFSPECLPPGHLHPLRTQPSVTAFGQPSLAAISLPTGGVCIAQSVKIPREPKAGEFDKIIRRLLETSNARAVIIFANEDDIRRVLEAARRANQTGHFFWMGSDSWGSKIAPVLHLEEVAEGAVTILPKRMSVRGFDRYFSSRTLDNNRRNIWFAEFWEDNFHCKLSRHALKKGSHVKKCTNRERIGQDSAYEQEGKVQFVIDAVYAMGHALHAMHRDLCPGRVGLCPRMDPVDGTQLLKYIRNVNFSGIAGNPVTFNENGDAPGRYDIYQYQLRNDSAEYKVIGSWTDHLHLRIERMHWPGSGQQLPRSICSLPCQPGERKKTVKGMPCCWHCEPCTGYQYQVDRYTCKTCPYDMRPTENRTGCRPIPIIKLEWGSPWAVLPLFLAVVGIAATLFVVITFVRYNDTPIVKASGRELSYVLLAGIFLCYATTFLMIAEPDLGTCSLRRIFLGLGMSISYAALLTKTNRIYRIFEQGKRSVSAPRFISPASQLAITFSLISLQLLGICVWFVVDPSHSVVDFQDQRTLDPRFARGVLKCDISDLSLICLLGYSMLLMVTCTVYAIKTRGVPETFNEAKPIGFTMYTTCIVWLAFIPIFFGTSQSADKVSGGGRGWTVGSVCFDALELLPAFSPWPPAPVWAGETASTAPLAGHDLSLQESSMPRGESLYIQTTTLTVSVSLSASVSLGMLYMPKVYIILFHPEQNVPKRKRSLKAVVTAATMSNKFTQKGNFRPNGEAKSELCENLEAPAGGLSSCPSPPRPAPMPHPGEAAGDTGGTLRLQVGASLSGRALRHHIRARSVLPLLVAWREPQGFPSWCPSSALPGICAPPRGRPPGGAWALRRWPPNRLTSLTPTMQSSESMELSSRRRSRDPVEAPPAFLGPTSVTFLPFSFLFSSASFSSSHCSPLPATLPQFTKPYMLQKRKKEKKSKHKKAKTKTNLECVAKCCVLLVASVCVPVARSLPACPAHLPCVLPACPARLPSVLPACPPAPPADHTEFSAWVFGDGY

SEQ ID NO: 721 - DNA, 2699 bp, Homo sapiens
  source (1)..(2699)
  CDS (201)..(248)
  CDS (1341)..(1795)
  CDS (1888)..(2319)
  CDS (2367)..(2499)
ccaggagaggaacaggggccacagggagctgatcatgaaacacactgagggtgtttcatcagggaagtgacaggagcatagtcacattcaggaaagatcactgcctctgggaagacagagggtcagggcagagcctggaggccaggagagtgccaccttcaaacagggtggaggaggcacaattctggacagggatgtccatggccagaggagtgatccagctcctagaagatgaggagagaccgaaggtgaggatggctcttcagtttcaggtttaggcacctggacagatggtcttgccttctccagcggcagaaagcactgaaggggaaagaggttgggggaagggactgtgtaggctgagcagcctaagtctgagaagctgggccacttgcaggtgttggtccagggtgcaagtgcatttggtgaagggggagactaggaagggaggagaaagtctagtctgttactagacctcaccatgctgcaggtgtctgggccagcaggtcgcagctggagctgtgcagctggctgctgtcacatccctttctctcccagctgccttcagctgagcttaacgccagcagaggccgaaacacttcacaaatgcaacttgtcagctgggaggtgcactcagagctcaggaacactgttttccctctttattgttttccatcatttttttttttcagtctgggttttgggccccgtcagttccttttctgttcaacactgagctatgtatccacccctctcaaggttgaaaaagagaaagactgtaaaagtgccctgcaaagaagaggcttccaactctctgggggtggggggggtggggggctctcttcctcctcttgtcttctgggttcattccaaattattccccaaaggaaaaatcactgaaggactgggggcggtggtggggaaaaggacagtctcccaagaggtcaggtgaagccccagcctcatggtgttgagggaggggctgggggaagcgggagcctgttcctaggagacactgtctactggacacctcatcctagaaggcttccctgagttctgacactgttctaggaggaggaatcattattccacgttgtggagaaggaaaccaaggccgggtaaagtaatgtagggcccttaaagttgcagagccaggaataaagtccggattgggactcaggtctgtgggcaatccaaggccatcccctttacacttcaaatgctctttccccctccggaagccctcgcgtcctcatccctaccccacctcttgttccccaagcgtggctagggctaggactccagggctacaccaagcacccttcggtcttcccgggaagaattttccccggccgggggctagggtctggcgctggggcgctcctgggacctgcgggatcaccactacactctggcgcgccgagcgcggtgagctagggcgccaaggcacaggtggggctggagtccagcgcggaggcgcggggggcgggacgcgggcccggggagcggccagggaccgcgacagcgccgcagtgccagcccggcgccggcgactgcctgccccagcccctcagtggcggcttgctcccttctctcgctccgaaccagacacagccgctgtcgctgccatgtggcgtgccgcagactcccgagaacagccctggctgtcagcgggcaccagccgcttcctgtgcccatcgcgtagactggaggggcgcaccacggccaccgagccagaggcgcttcaggaagcaagagaagtccccgcgcgctccgggacccggcgcagctcatggtgagcgccctctggggctcgagggtcccttggctgagggggcgcatcctcggggtgcccgatggggctgcctgggggtcgcagggctgtagttgggatcgcacacaaaccgactctgcggcccagcccgaaatgctgccgccaaggagcaacggcaccgcgtacccggggcagttagcgctgtaccagcagctggtgcaggggaatgccgtggggggctcggcgggggcaccgccactggggcccgtgcaggtggtcaccgcctgcctgctgaccctactcatcatctggaccttgctgggcaacgtgctggtgtccgcagccatcgtgcggagccgccacctgcgcgccaagatgaccaacgtcttcatcgtgtctctacctgtgtcagacctcttcgtggcgctgctggtcatgtcctggaaggcagtcgccgaggtggccggttactggccctttgaagcgttctgcgacgtctgggtggccttcgacatcatgtgctccaccgcctccatcctgaacctgtgcgtcagcaggtcatcagcgtggcccgctactgggccatctccaggcccttccgctacgagcgcaagatgacccagcgcatggccttggtcatggtccacccggcctggaccttgtccagcctcatctccttcattccggtccagctcaactggcacagggaccaggcggtctcttgagagctggactgcgagggggagatttctttagacaaaataacacctttcaccccaaatggattccattaaactgcattaagaaaccccctcatggatctgcataaccacacagacattgacaagcatgcacacacaagcaaatacatggctttccagtactgctccctttatcatgtgtttctgtgtagtagctggtgtgc

SEQ ID NO: 722 - protein, 355 aa, Homo sapiens [sequence omitted]

SEQ ID NO: 723 - DNA, 6929 bp, Homo sapiens
  source (1)..(6929)
  CDS (201)..(303)
  CDS (4550)..(4689)
  CDS (5740)..(6729)
aacaaaagcaaaaacgggcaagtgggaagacatcaaactcaaaagcttctgcacagcaaagaaacgataaaaaataaaaataaaaagcccacctattgaatgagagaaattatttgcaatctgtattaggttattcctccattgctataagaagtacccaaggctgggtaatgtataaagaaaagaggtttaattggctcatggttctgcaggctgtgcaggaagcctggtgcttgtgtccgatgatcttcttgggaggcctcagggagcttttactcaccgtagaaggcaaagtgagagcaggtaggtcacatggagaaagcaggagtgagagagagttggggagagtgctacacaattttaaacaaccagcgaatatcagtgaagcaaaacattttaggatttgagttgagatggagaaacaaagaagaggtcaacatatccctataatggaaaggaagggcagggtatgagaatgatatcggagtgcataagaaggagaggtagggttatgccattttttccttttccctctgtgtctgaaatctttttctttctttctttcttttttttttttggagatgaagttttactctgtcacccaggctggagtgctgtggtgcgatctcagctcactgcaacctacacctctcgggttcaagtgattctcctgcctcagtctcccgagtagtttggactacagatgtgtgccaccatgcctggctaatttttgtatttttagtacagacagggttctgccatgttggccaggttggtctcagacttctgacctcaagtaatccacctgcctccatctcccaaagtgctgggattaaaggtgtgagccaccgcactcgacctgaaatctcttgacatgttatattcatgtagtctatgaaattggagtacgatcaacagctaggatgggaactgcctgcctctattccttgacttctttcctatgatatggcacatggaaaccctcaaaagggtcctgtgggcaaaagagactagatattattactcagactgtcttctcaaaagggttgcgtggaaaggcgttacagaaatctgggttcccaagtgaaaaacaatcaagggactctaagaattttttatctccacagttaattggcccctgaggagaatattctcctgttatcttcaggctcactccgcaaaatatctcattctcctgatcacttggaacaaactccaagtaaagccctttggggatgcttatctcagtgcatacagcacagtctaattgacatcttgagtaatggtctccagaagccatgcaagatgtgtcctctgggatggaatccctgacgccattctatttagtgtccacaatttgcttcagctgacataggtcctctgggttagggggatgttttatttctcccagatgatgtctgttttttcttatgattggctcacatcagaccaagaatgttcttactctaacccccatgattactattgagaagacatttatgcagtcagaaaagtgcttcctgactgcatcagccaaattcatattttattaagtagggaaggaagtgtaaagctaagaagagagtgccttgagagatccaaaacagtggaaaaccataacagattttcttttgactctgggcacattcatgattaaactggtattcagtttaccttcttaataaagtaatattaatggaaattcctattgcccaagctccgatattggaatggagggttgtctcaaatatacatatagagccagaggaagcatatgtgtgattcaaaggtccaactagtagaggctaaagttcagttacttaatctgtcctgatgtgtgttgatggagctcacaatatgaacacacatgtgtcccattggtcctggtgatattctgccattagggtaattagtgcaaacaacaatgcctgcgttggggcaatttcttctatgccgttccacagtaaatgtaacgtaaatggaaatttccaggcttagggaaggaagtctggtgagcacctcagaaaaggcttgttttgatcaacagtagccaacaggtgggtcagtgtggacctctcttgccctctgcatttcatttctatgctttgtcttcctacgagtctctgcagggaaataacaggtaagataatattagggcttgaggtatttaggaaacctttattataaattagggcattgtcagcttatcccttaagtcaatccataaggaaagcttccttggaaggcagagaaaaaaaaaagtcacttgaaggccacaaatcagaatgggaaattattagcaaagttgctgaagggaggaagagagacacaggtcagatggtgaaaaacttacaccatggagatttgtagagaaagatggacactaatgtggaaagtgatagagaagtatatggatacttaaataaaagggaagtgtgtggagatctctaatgggttggagtgatcaggaggagcatgggagaagttgagcttctagtccaccagaagctgagtgtgaaataacagtgtgaagtgacagccagaaagatgagactgtagactgcattaggagagagacagtaatagatgtgactttttttttttttttttttgagacagaattttgctcttgttgctcaaggtggagtgcaatggtgtgatctcggctcactgcatcatctgcctcccgggttctagcgattctcctgcctcagcctctggagtagctgggattacaggcatgcgccaccacgcccggctaattttgtattttcagtagagacggggtttctacatgttggtcaggctggtctcgaactcctgacctcaggtgatccacttgtcgtggcctcccaaagtgccaggattacaggcatgagcgaccgcgcctggccagatgtgacctctttcttactgatcaaatgcttgggagaatgcattcagttctgagttctttgctttaagaagtaaatagataatcgtcaccgtatgaaggtctagaaagacatttaggagaaaaaacacaaaaaagaatagggtggatatttgaggaatcaattaagattactttttttttttgagacagagtcttgccctgtcgcccaggctagagtgcagtggcacaatcttggctcactgcaaactccacctcccgggttcaagggattctaatgcctcagcccctcgagtagctgcaattacaggtatgtgccaccaagcctggctaatttttgtatttttagtagagacagggtttcactatgttggccaggctggtctcaaagtcctgacctcaggtgatctgcctgccttggcctcccaaagtgctgggattacagacctgagccactgtcccctgcctgaaattaacaattattaatacatcttatgttagatacgggggatgacagaggagaagaaaacaaatattcagtacacatacacacacacacagaataaatgcccataactattacagtttttgtttctgtagctgctcacatggtttttggctggtatttataacgacttgctttcactacccattccaattctctttgtctacagttattcatgactctttgcctggtggggtaacccaaacctttattcctgaagcatctgggccactagcagtcttgtctgaattgggttgtagttttctattggcttacatcatgagacatgagagtacaccctagaaaatctgactgcagacataattctccatatcctcactgtatagtagtgactgaatttcccattgctagtcagaatcagtcttactagccaatagagtaaccttatttgcctattgattcagttctatgaggagccccaagtggcatggtggcagtcttaactatcagaaaatgggattattgttgtgacacctggtagaagaatttctccctttggaactaagacctctaaaacagcaaaagctaaaagtgaagggatagaaaactaaaattgtgctggtgggtcacagttatgggggctatagtgagaggactcattctctcttctacctggtgatttctggttccatgaatcttgctatgggaggaagagcagcataaattggatgcagatttagagtatatttcacatcctagaggacactgccccagcaccaaaacgtgttgccaaccagatggtcttcaaaaggccttcccttggattctcctttagtttttctgacttctgggtcaggtgtgtgcattcttttttttttttttttttttttttttttatttttttttttaagacggagtctcgctctgttgcccaggctggagtgcagtgatgcgatctccactcactgcaagctccgcttcctgggttcacaccattctcttgcctcagcctcccgagtagctgggactacaggcgcccgccaccacgcccggcaaattttttgtatttttagtagagacggggtttcaccgtgttagccaggatggtctccatctcctgacctcgtgatccacctgcctcggcctcccaaagtgctgggattacaggcgtgagccccgcgcccggccaggtgtgtgcatttttaatctggccattaagaagcgccccagcggccgggtgcggtggttcacgcctgtaatcccagcactttgggaggccgaggcggggggatcacgaggtcaggagatggagaccatcctgtcgaacacggtgaaattcccgtctctactaaaaatacaaaaaattagccgggtgtggtggcaggcgcctgtagtcccagctactacggaggctgaggcaagagaatggcatgaacccgggaggcggagcttgcagtgagacgagatcgggccacagcattccagcctgggcgacagagcaagactccaactcaaaaaaaaaaaaaaaaaaaaaaaagaggcgccccagcttctgcaggatatccacaccgccaatttcagaggcaacaagaactgacatgggtttcagtctgcctttgtgggattgcagctcatgcttgtgggttccagcatgactttgatctgccactctttatatccattttttttttcctgactacttgccctctggaattaaagttccagcatcagacacaaaggtaacagccacgcatagattgcctaaccagcttccacaattgtataagagaaatctcttagtgttatagcttttctagtaaaatcctcactgataaaataagcaacgcccccaagcttttctccaaactgtctctctgtgtgtgtctgtatagagagagagagcttaaaaatctgccttcacaaacatgatcactctgaaatctcagaatatctagactccattaagtatcaaacttcaagtctcttctcattaagaaagacaaatgtgtgtgtgtgtgtgtgtgtatacatatgtgtgttttggaagcctaggaagtaaatggggaataaatatatacacacatacatatacatacacacacacacacacacacatatatatctttcttaacgagaagagacttgaagtttgataatagagtccagatattctgaaatttcagagtgattatgtttgtgaaggcagatttctaagctctcttttaaaaaaaggttatttgaataattagagaggttgaataattagaaacggaaatttttttcacaggttctgtcctctatcaaaaggtgcttttccttgggtatgctggaccccagtatttccagtcacactctttatctccactctctgtttcctcagggattgagaaaggggacaatgtggcagaagaatcagacctctctggcagacttcatccttgaggggctcttcgatgactcccttacccaccttttccttttctccttgaccatggtggtcttccttattgcggtgagtggcaacaccctcaccattctcctcatctgcattgatccccagcttcatacaccaatgtatttcctgctcagccagctctccctcatggatctgatgcatgtctccacaaccatcctgaagatggctaccaactacctatctggcaagaaatctatctcctttgtgggctgtgcaacccagcacttcctctatttgtgtctaggtggtgctgaatgttttctcttagctgtcatgtcctatgaccgctatgttgccatctgtcatccactgcgctatgctgtgctcatgaacaagaaggtgggactgatgatggctgtcatgtcatggttgggggcatccgtgaactccctaattcacatggcgatcttgatgcacttccctttctgtgggcctcggaaagtctaccacttctactgtgagttcccagctgttgtgaagttggtatgtggcgacatcactgtgtatgagaccacagtgtacatcagcagcattctcctcctcctccccatcttcctgatttctacatcctatgtcttcatccttcaaagtgtcattcagatgcgctcatctgggagcaagagaaatgcctttgccacttgtggctcccacctcacggtggtttctctttggtttggtgcctgcatcttctcctacatgagacccaggtcccagtgcactctattgcagaacaaagttggttctgtgttctacagcatcattacgcccacattgaattctctgatttatactctccggaataaagatgtagctaaggctctgagaagagtgctgaggagagatgttatcacccagtgcattcaacgactgcaattgtggttgccccgagtgtagagtggaataggataagctccttaaattaattcatataaacctctaaagtttttcagggagctagcttccttatgctgttttactactggaagaaaaacacatttaacacacaattccagtattccagcttggtgtcaggtatccaagcactgtggagaacatttgagtagatctttagagaattagggaaaactttttaa

SEQ ID NO: 724 - protein, 410 aa, Homo sapiens
MVLQAVQEAWCLCPMIFLGGLRELLLTVEGKVRAGVCIFNLAIKKRPSGRVRWFTPVIPALWEAEAGGSRGQEMETILSNTGLRKGTMWQKNQTSLADFILEGLFDDSLTHLFLFSLTMVVFLIAVSGNTLTILLICIDPQLHTPMYFLLSQLSLMDLMHVSTTILKMATNYLSGKKSISFVGCATQHFLYLCLGGAECFLLAVMSYDRYVAICHPLRYAVLMNKKVGLMMAVMSWLGASVNSLIHMAILMHFPFCGPRKVYHFYCEFPAVVKLVCGDITVYETTVYISSILLLLPIFLISTSYVFILQSVIQMRSSGSKRNAFATCGSHLTVVSLWFGACIFSYMRPRSQCTLLQNKVGSVFYSIITPTLNSLIYTLRNKDVAKALRRVLRRDVITQCIQRLQLWLPRV

SEQ ID NO: 725 - DNA, 22684 bp, Homo sapiens
  source (1)..(22684)
  CDS (201)..(615)
  CDS (753)..(878)
  CDS (17062)..(17263)
  CDS (17606)..(17723)
  CDS (19946)..(20099)
  CDS (20577)..(20637)
  CDS (22148)..(22484)
gattagcagagctgcggtgttctcctcgggcaggcgggcaggtgggcgcgctttgctgccccctgcagctcgggggcctgcgatccccgcacagagcattccgtcaccccaggcccacgctctccagcccaccgccctcctctggacgccgcgagtggaagagagctgcgaactgagaagccgtactttgggcagggtggagggcccgggggctggagactgagcccctccgagaggagccgcccggccccgccccccggcgcagccattggccgcggcggagcggctgtacccgcagctccgtgcactcggcggctcctctccgggaaggtccccacttgacagctctgggcgaccggaggtggcgcccaaaggctgcccgggagatcggggctgggctggcgggggccaggaccccgcgccctctcggccgctcactctcgcgtccactccctcgcagtcacgccgggcgcgcactcccactccctctccgcacgcggctgcgggacgcgatggacgcggcactgctccacagcctgctggaggccaactgcagcctggcgctggctgaagagctgctcttggacggctgggggccacccctggaccccgagggtaggcgggaggcgagcggtcggaggctgcgcgggctccttctctcgcgcgctgggtgcgcccctgaccccgcgctccgagagccccgcgtccctgcgggcccctctgagccctactgcgctctctcccgccgccaggtccctactcctactgcaacacgaccttggaccagatcggaacgtgctggccccgcagcgctgccggagccctcgtggagaggccgtgccccgagtacttcaacggcgtcaagtacaacacgacccgtgagtgcccccggccctcgctgcctgctctacaccggcctcctgagaaggcggtttagggagtaaagaggattccggacccagcggtacaaagctgctgacggccgcggtaccgcggaccgcgggcgttaaggaccccttacagtgttgggggcgcgccttctgcttctacccccaatacagcgtctaatctcagtaagccagtgatttgcccacaattcccgtgctccatgcggtgacagcccaaaaaggggagaaggaaatacttcctcctcttggagtgtaaacctccttccctcattgtaggttcccgttgcctgaagttccccattagggcttcattgtttagacaatgcttcccctgcccaggagggggacctatcccaggagggcggatatgctaagtcccaaatcccccagagtgagtgcagtgaccagaccctactaccagaggggaggaggagggtaggaggcaggagggctggggcgagcgcatgtttcgtggggaggacatgcaggcgtaggttctgctaagccagagggtgcggggtgttgcatcttccctaatccgaggtcccaggactgacctgctgggctgagtcaggggctgtgggcagcattattcctgcgcccccataatgagtggtgtctgaatcagcaccccaacaccatctctcaaggagaacaacctgtgcctgccttcctcctggcaaatcatggactggcttgaggctctggggaaaagggcagtagaggttgctggagttacacagcctccaggtggggtcgttcagtgtgggttctgggtgtgtgcgtgtgggtaggtgcctgtctgtgccctgtggaacatgggatgggagccaggtgtgtggtctgcgggaggctgtgggggcagcaatcactgccccacctagaacccccctgatatctccagccggaccccagttgtcaagcacgctgagaccctatctggattgtttgtctgaagcctctcatcctggaaacatcctcagagtgtctgtgtctgattggtagcccagctccacctccaccacacatacacacacacacacacacacacacacacacacacacaagctttcagaagctgaggctgagggctttgccatgagagatggttagaaggcaagagagatgtacctgcacctgatgccaagccgcactctcctggctgcaccagctgagggctctggtgggcccagggagcacatgcttcccatccatgattaaaacagatctccctagaaggaagtaagatccccaagctaggaggtgtgcaagcagaaggaatgatttccctgtgccttcctagtcctgaccttataaaactgtatttttaggattccgtgagctgtgtggggtggggcaatggagatcagcatgcctgattcagactgggcccggagattaagggccatccagggtaaagtggggtgatggagcatctcagcccacagcctgtgaacctcagggagctctgctttcgttcttaccccagcctgggctatgccttgttctccccgaccagcctgggggcccccccttcccagggcctgggtctcttcttcatagccaagctgagtacagtaatactcagtcaatttgtggaatacccactatgtgccagccactgcacaggcactgtattgaggctctcactcacaattgcaacagacaaaaagaacagaatgatgaatgccctaattaggggggaagcacaaggtctatgggattggggtgtgggggcggggtgacaaggaagacttcccaaaggtgctgcagacagcacatatcaggccattcatatcaattaagtctaatgagaagctgataaaaggttggggcaccacccaggctggtaaaagtagggccaattagcccctggtatctaatgaacaattttcttcatttagaccaaagtgctgcctgcactgcaactgctggagaatgagaggagcttgtggagggtggggagcacttaccactaaccagcacctggggtgtgaggtcagcctaggtgggaagagcagaggctgctaatggctgtggaaatgcatgattgatttccctcctcccctttcttcacatcagtgctgcttcctgcttctctgtttgccttttccttgggatccttcctttaaaaagaatgacagagggagaaacctccacgagaagcctaggggaagaacaggagcgttcaggctccacttcctgccccaattttgttatgctatagccaaacccgcattgaagcctcattccttagagagcaggaatcgcccgggtggggatagcagtttagatattagtctctgcgatttttcaactcagctgagcacagagaatctgccacaaagctaagtgttgatcattttccaggtgccagctaccactgagagagctttgtatccatatctcaggcatccataatcccactcgcccacactccctctgagatacatactgcttttatgcccatattgcaggcaagaacactgagtctcagacacatgaagtaacttattgaaagtcctaatcagctcctatgcaccagtgcaggcaggtgaatccacagccctcgctattaaccatggggcagtactccctccacaagaggcattcggtttgcgaggagagcttagaggtttggaaagaagactcatacctccggcctggaggatcagggaggacttagccctctgagctggacttctggggacaggttggattttagcaggtgagtgtaataggcacaggagaggccctctaggctgaggggactgagcaaaggcaaggagacaggctgggctttgtgccttgggaggagtgtgttgtatggagaacagggagtaggagaaagaaacaatgaggctggggaggggcatggaggtcaggtgatgcagggcattctacagggcttcaccatctggagagggagcctgggtgagcttgtgagcagagaagctcaattttgggagcacactgtcctctggagggaaaggagaagtaaggggatttctgcacagacccaggtagaccgcaggctgtaagagcaaatgaggttgaagacgccagcaaccttgggcatttgaaattgacaagatatggtgagagatggcaaggtaaaggttgggcacacaggaaacagctgagcacagttggggatgtgttgactttgaggagctggagggacagctgagtggagatgttcaggaagcagctggttgggtgggggaaaagctcaagagagcaccaagagtggagataaggcgtttagaagtcctcaggatgtggggttagcaaatagctacagtgtgtgagtttgggaggctgggtcagagccttgagccatcttacccagagttatttccagatgcagcagggccaagggaagggaagggactagcgcatggccacacatgttagtcagtggcagagccaagttaagcacacgagtctccttgggtgttctctacacaacctgtgctggcgcttcagtggctgagcttccacatgtttgtactgtggtttaactcatttaatccttgcaccatcgagtgacagagacatggcattatcctcattttacacatggggaaactgaggtgtggagcaatgaagtcacttgtaacagaacaaggattcaaacccaggttctgctgcctttcaaaaagcaactctgctaggttaagcagagaagaaattttttaaaaagatattggggagcttatggaatcactgagtgggctagagaaccagatttggggccccaagccaagaacacagggcagagctggccctgtgaggggacctccctctccctgaaaggccctgccaacaccaccagccctggccaccactagtggcatgatcaaagatcactgcaatctcaaactcctgtgcccaagcaatcctcctgcctcagcctcccgagtagctgagactgcaggcacatgccaccacacctggctaatttttaaattttttgtagagttgggatcttgccattttgccagagctggtcttgaactcccagactcaagcgatcctcctgtctctggctcccaaagtgctgggagtataggcgtgagccactgcacctggccaacctggagtcttaagcttcctgcagttatctctggagaggctttctccctgtctccatctgggggcctccagttcactaattccctcgggtaggtgcatctgatgggtgggggaatatgtggagccccaaatcccatgccaaagctctggctacaagggatcctgggaagtaaggatctggcattttagctctaggcggggaggtagcctcggtcttaccccaggattctccgaacccaggttcaaatcctgggtggctagaaacaatcctaaatgtccatatacaatttaattggggcaagtctcatcccttttgtgggcctgtctccctgtctgtaggccgaaaggaagtggattagcatggaagtggtttggccagaagtggggcacttatattccattttcctcccacctctccccattccacacggactcctctgagcccatctctgtgtgtacatctctgtctctgtgtctctctcattgtctccctgtctgtttctgattttctctatgtgtggttctgtttctgggtgtatgtttctgtctttctcagattctctcattttctacctctctctctctttctccatctctccctactgccttcttcatcccccgactccatctccaaacccactgtctccccactcccatccctccttctatctgccctcctcctgcacctcatcttgcctgtccctacggtccttttggctgcaaaggagggtcttgccacctccctcctggccatggtccattttccttctgtggaaccactaagtgcagcttggctgagcctcagcctccttgacctcaagctccgcaatgtcctactgggaatggctggggtcatctgtactgaggcatctgccaggacaggggaagaaggggcatcccatctaacctagccacatggggaggttaggggtccccacttcccagaaccccattctagagacatgcttaagcactgattgtgttacaatggaaacacataagctgagtggtctccagccagaggggtctctcccattgggtctgcctgcttatgcaggaatcccttcttcagccctaagagtcagaggtgataagaaaggctgagacctgccctcaggaagccccaggctgcttatcaaggaggcttgtgcaaatcaacagtcagagatcgggaagaggggcttggtggacactgggacattcctgggaggctttctggagggagtgggggtaaactttaaaggtcttggagcagttgggatgccacatttgttaaggacaggcgcagtgcaggggtgcaagcctcaggaggaccccagatagaccctgccctctgggttgaagaagtagaagctgtaaatccggaaactcaggtctgcattctcagactccagcgagacctgatcccccctgactctattccattctccaagggccacaagttactccatgtgtgagaacaacttccctgctgggagagagggaaggtgggacaggcatggccatcacagaggtttagctaagaaaagaaggaaggaagagaaatagagcagaagtggatgcccttgtggccatccagacaccccagagctgcccggctgcagagcgctctatgttccgagtccagccttcccctccccacttaagggtaggaaatgactggccaggagagggaaacacagctgctcagagttctacagcaagtctgggccctgataggcctctgctggctctgggaactcctggcttctgctctagcttctacccacctctgcatgcatcttgatctttcctgtctcctgctctccccaggaatcctccagccacctgatcgtcttgctcaggctcaccccttattggggttctgagtattttaccctttcccccagaaagaattgaggagcctagagacaagcttttcaaagatgcataagacctgagcctgccttccaggggctcctgttctaggaagagtgacagacaggcagactctcaaagagaactttttgatataggctcccaagtaaaatagcacagtgaagacagtcagagcacatggaagggagttattccaagagtaagggaaagtaaatttggaagacttcatggaggaagtgttgttgaacagtgccttgaaaaattgagctaatgatgtgtcagatggaagggagggtgggagcggaagtggaagaggagggagggaagaataagccagatcatggaggcctcaaatgttggaccagggcatgggcctcgattctgctggctttagagacagcggctgcttgtccgtagccctatggcacaggaccagaatactctggaaggatactgcttttcaaaatgtgccatctaaatctcaatcaagggctggctggggacctgggccttggccctttcctctcctcccacctgctccttaagtcagaggtcccagcatccttccctgtgcactccttaccaccagtgccacagcagagcctggagccctgaagacgggctgaaggaggagccccatctcagtgatcctcagggagctccccacagggcttcttggctgggccccaggtacaggcatttgggcccctctgactgcccaccctcaccaggtgcttcagagtcaggcaggcggtccctttcacacacagcacctgccaggagagcagctggggcaagggagagtgggaggaacctgggctcagatttagcagggctggatctaagtcctgggtttgccatgactcactgagggactggcaggccctccttgtccaagtcccagttttcttatctgtgtgaaggggacagagaacatgctgacctcgtggggccatggcacacaggggagatgatgctgcttggggctccctgtagacagctaaggcattgtcagcaaggggaggggagttgaaggtggcctggggcctggaaggaggggccatcatgtccttgggtaggggaaatcctgctcacaccaagaatggctatcctcattctggggtggtggtctcctgctatctctgagagcccccagaactctgtggcttctggggatgtcctgggagggaggattctgtctatctagattgagaaggtctggtacctaaaagcctgtagagaaaggcagccccttgcccccctggagggatgctgctggcatcctgccagccagctgtcttctccctgcattacttcataggaactaggaactgagagccagatctaatcccggccatcctactgactgcttttctccctttgggcaggtggtctcccctcttcagacctcagttcatctgcaccaggtgggtggagggcttgatgagttctagtgatgtttctcagttccaaggcagcttctgccacaggggtcctgtgttggtcccctccccactttcctccacaggctggcgtcatggcgacgagcccactgagtgttgctaggatggctggaaggagggagccctgtacagtagaggcgggagcatgaggtaggggcctcctcccactgcccctctctggggagggcagagcttacacagtgagctgggttccactcccccttccctttttcatagacccagtatggtctccattaaactgctcagtgcctctatgactcagtttccccactgtctcctgtaagtgtgcttacaggtcctgcttaaggatggcagggcaccatgagtgaaaagtcctgtggaaatagggagttgagggtctctgaaggtccagaacaggcagtcgaggctcagagagctgtgtccatataacactaagaaatggaatccaagttccctggcctgaatcccagacagcaccagcaaagggccctggggatgcctttcccacccagtggctggggttggcaatattagactcccaaactcaatctagcacttctacgtcagtctgggtctgagcttgggtgaacatcaccagctgcctgttcccctctgaccaccaatttgctgtgatcggatcaagacagaaatatgccaggtgggcctcaaagttggtcagtcctccttaacctgcagtggcctccaagcaatgcaggatgctgactcaaggagatgcacctcgtttgggaagctcaggaaaaccatgctgttagtactaggactgtacgtctgaccaccccagctctgtccaccttccccaaaagtctcttaactggggatgaaaagcaatccactccaggaagtggaggccaagctgggaggagacattgattgagaggtttttcccacagaaagcaagaaagatggccaggcatggtggctcatgcctgcaatcccaacattttgggaggctgaggcaggaggatcacttgaggccaggagtttgagaccagccaaaaccacatagtgagaccccgtttctacaaaacaaacaaaaaaataacaaatgatcatggcatggtggcacatgcctgtagtcccattactcaggaggctgaggcaggaggatcacttgagtataggagttcaaggctgcagtgagctaagatcacaccactgccccccaacctgggtgacagagtgagaccccatctcaaaaaaaaaaaaagtaggtaagaaaggtgactcaaagtcatggtcaaagatttctcaactaggccccaggccagacaagaagatggctggatctggagtggcccaactacaggcagtaaagggaactgagggtgggatatctggcccctaaggtattctcttctgaggatctggacaccaagtggtaatgacactgaagaggtggcataactggctgcatctgctgaaacacagggtcacagggagagtctgtctctcctaggtacaccaactccagggtctcccgtgaggaagcgtgtcccaagggagagagatcttctgcctcttcatggttgagtgaccccagatgtgtcagtttctctcttctggtcccaccagaccaaatgcagaagttgtcttccttcctaattcccaaggagatgcctgataactcagtttccaacttgcttcccttggaacagtcaaagctttcatgccaggaacctggagaatgctgcccacaggtttgctgtttgagactgacacccctcccccatgtggggttggactgcaatgtctgcagttttggcagctgggtcagcctacccatggtgtctttgtgtgagaccttgcttcctcctgcatgtatgtgtgactgttttgtatttgccatgcatcttggtgaagcatgggcatacaaggtggcagactgtcctcctggcccactctgagcctcctaccttcaatgagttcccaagtaacctaggaaacagcatcagctttggtccatcctgagatcctgtgtgctcagctctgtgcagtgcttaagaaaaggccagagatgacagcaacccaggacatgcctttagaggctctcagccttgtacaaaataaggtaaacttctgctccagagaacctgggctggttaggaaagtacaacacctttataggggtcagtgaaagatcaatcccagcctagcatgagccaggcagtcacaagcagctggacccttggggagctggaacagtcatggaaactacctggaggagctggggctggagctgggccttgaaaaggggcatgaattagcttgacctcaatgggctgggcccatggccaaggtcggaatatcgggtgggaaggctggttcttaggagctctccgaggtccccaaccttagagataggcagggatgaagaatggagttgtgctgtccgcggtgctgaaagttccgatcccatgtagtgacttcattccttctgtaaatattgcttctggccctccccacctcaatgtcatcaccttctctccctcaccaccactactactactagtactacctcttcttcttctcctcctcctcctcctcttcatcctccttcttcttctatcatcatcatcattatcatcatcatcatcatcatcatcatcatcatcatcatcacagggtctcactctgtcacccaggctggagtgcagtggcacaatctcagctcaccacaacctctgcctcccaggctcaagcaattctctcacttcagccttctgagtagctgagactacaggcgcacaccaccacgcctggctatttttttttttttttttttttttgagagatggggtttcatcatgttgctcaggctagtttcaaactcttgggctcaagcaattcacctgccttggtctcccaaaatgttgggattacaggcatgagccaccatatccagcctctccctcacttcctgtccttttctttgcaaatagccaatgaccccattgttgtgccttaccacagtcccattaactcttttccccatgcctacccctgtcccttgtactccttcccccaaaactaccaccaaaagtagtccctcatggtccctgtctcctatggtccatgtctttccagaaggtatcagagatagaagtgccaaccatttgatggtgatgtcaggatgcttggagttgtcacaatagcttgagggtgctaactggcatttagtagactggggagtctcacataacatataattgatccacctgagatgccaataacatcatagagaatcaatttactgtaatatttctaagaggcaaaactgagaccaagagggaaggggcttagtcatggtcacctagctatctagagacaaaactacagctagaatatagggtctcatgtcccagccaggcttcaggaccaccccaggtaactgcctgaaccaggaactctttgcaaagtgtcagcatctgaaacggggagagcccattgtaatgggggtttttggcaggcctgggccactctgggcatggaaaccaggcctcccagactacagagtcctgcaagagaagaccctgcctgcatcattcagaccctaatgcccctggaagcccacactccacatcatcagcactgatcctcagcaggggcacctgtgttgctatggtaatgggcacccacctctctgcatccagccccacaattctagccttgccatcagccctcagagtgtgtgcccatccgtctacgtttcccacggggtggatgagattctttctgtcttactccctcctgtccgaggctgtgcctgagggcccagtgccctcattggccacagcagacagctcccctgaagagtggggcacatctatcctccagtcctttgatacccagtgtctgtaaccagaagctcatctgcaggcagggctgggctgccagagagggaagtcccctcccgcttctgcatcccacctgctttcccaggggtcagcaggtctgagtcaattctgttcagccgacatttcctcaatggctctgtcctgagggagatatggtggctccaatatggcttctacttacttgtctatccccaaggagctcaagtccagtagcaaagaaaagaaggattaggtccaaagagatgaagttcatagtgaattatggcaaatgcactaaaacagaatttgtatttttcaaactatggattgtgacacaagagtggactgtggagtcaatttagtgggtcatgatcagtgtgtgtgaaatgaatagaagacattagaataggctggaaaggaaaatagtacagctggattctgtgtttgtgtgtgtgtgtgtgtactggattataacataaaatgtatgtgttattgtggttcaagggcaataaagtggaaaaactacgttacaagagaagggaagggatagaggaggaaacaaagaaaggactgcttcagacctaagggtgtcggggatggctccatgcaggaggcggcatttgagtgtggggttaaagatgggtaggagttcatccgtgagcagtgggtaagaaggaggaggtgctttaagtggtggatccacacaaagagggtatgtgccaaacctatgtgtgccaatgccagtggccatgtagaatgctggagatgggtcaggacagttaggctgggacctgggtgtcaagggccttgactatcatgctaagaaattggactttattcttgagcacaataaagagccactgatggctttaagcagaaatcaacatggtcaaggtggcaagaaaagaagcagggaggcaagaggagaggaggctgttgtagcagcccaggcaagaagactagagagcagatggagggatgggcaggaggggagttgactctggaaaaagaaaaggaggagacagaatccatggaacttgggaccccatgggcattggtgtgagggagaggaaaggtctctgatttgcagcatttctatcctgaccccctcccacctgcaagcccaccccatgatcagtgccaccatgagatatcatattcgggaaacaagtattccaaggccctgtcctcagggagcccccacattgatcagagtgaccagactcactcacctagacagctccaggctggtcatggggcaagggctggagtgtggggctcaggcggtcaggactggaggtgctcaggagagagagagctatagagtagaagcaatcaaggaggtcttcctgaaggaaggggcctagcactgagcttcaggaaagctggataatatctatgaacatatagaagataaatttttctgccctttgaagcacaggcaggatcctggtctgcctcacctcacatagactgttcagaggcaccgtaaacccccatcagggagggactgttcatttcacaaaagaacttaccctccttacatacttttgcttttttagttcagtgacatcactatcactgaccctcacgagttgaggtaacctttctctttcatgagcacgaatgttggtaaggaaagatagtgctaggtatcaaattagatcccacctggggagttgggcgccatggctaggggtggggagcaggcttcctcttcctgagagtcagaatcagcatcagaccagggcattccctgactcacttggcagggggatggcagggccctgccagggatgggccttggcccaggaggaaggaataggccagtcacgtccctgggtttgaagaatggatgagctccaggcaccaaactaaaaaacaattaagctaatagaatcttccccattgattttgctcttcggcaagtgctccttcccaattccattgcttccaactcatcgggctcaacggaagtgggtttttaagtaacttaattatttcagaacacactgcttccaaaaacaacctaaggttccccctccagctctgcaactctgtgctctgcaagctatttattttaattagctttacattgtacatctaacatatgctagaaagaaaaattcacagacaactgcccattagtcagagagctgaaccctggtacaaatcacccccaaacaatggaacgttcagcatttgtaacccacccggtaggtcagaaacacactagtgatgaaggccaagcagaggcaggcttcgagagctccgggccttctcaggtgggagggcttcctcctgattggagctggtgtatggagggggtggcttaggagccagaccttgacagttggagctgagatagagagaaaggcaaatgtgagcattttttaactttcctaccttcccccttgacaaaacctgcacttttgtgcacaggacattgctgcttgaaatgtcttttcacacttaaatcatgttccaacttaaatacagaggctggttcttgaacatttagaaacatctcgtggtagcctcccaggcagcagcagcccgagggcggtggcccagccctgagtccccagcattcactcattcctgtttgccactacttgatatggcctaaaggttaagaacagaagacccgaagccacaacttctgagtttgaatcctcttgtcatctttgtatccttggccagtagcttaatctctttatgcctcagtttcctcctctttgaaatgggttcatattaatgcctccttcatgggatggttgtggagattgaattgacatgtatatccatagcagttagaagaggaagtggtacatgggaaacatatgctatataaatggtagctattataaaaatggaagtgctgatattggtgaagtatggacctcataaatataaaacaattgagacaaggatgtaaattatgtggcatgctgaaagcagtgaatcttcaggcacaacccactcctcacagttggattcagttttgaagcaaatgaacaaaatgaaagtgtacaaaatgctagtcaaagattgtgtctaaaatgggttttagcatgcctttagctattttgtaagatgagccttttgtgctattttcacataagtgacttacatgtaaactttcagatgcacattgtatttgctgccctaggagagctgaggtgcgtacaccttatcctgtgggcaccagggagccagggagggttcttgaggaggggagtgacctgactcttggcagttggcattttttgtagggaatgcctatcgagaatgcttggagaatgggacgtgggcctcaaagatcaactactcacagtgtgagcccattttggatgacaaggtgagtggccctcacctgctgtgaccccaggcctcacacaggtatttggactcaggttgagcagagaagatcccaaggggggcagaccagtccttttgtcacccagtcactcccttctgtacctcctgcccctgcccccagtgtcctgccctgtgcttagtgacactgtaggggagtagagaagggggacatggagtcctaccttcaagagagcttgggctgctagaggacaaagccaaggtggcatgtgacacaaaaagggaataaccgtgtaatcaatgctcctaacatcttaggggttgtgtgactgcacaccttcctctccctctgggcctcagtttccccatctggcattctgattctgtgactccacatggaaacaaatgcagccccccaagggctgtccccatgagaagctgggtcctgctctgcctctctggagccctgctccagctctcgctctggaattcaattcagtgctgctgaggcaccgaactcctctccttgaggctacgcctcattcctgacctgaaaggatacatctcagctccatcccctcctcattacccagcatagtcctcagtggggctgggactttgccccagatgaagtccaaattgagagggaaaaacattcacccgccctgagaaagtgattctgcaaaatgtgagccacaggggttctgcagggaggccactcaatgggcaggggggcctccagcccttggtcctcacctccactctctctgcccctccagcagtggagaatcaacacaggggttgggtagggtggaggggtggctctccctggcaggaaggagtatttcatcactaactttgtttcaaattgccaacacttggtgataattaaaagtcaactgacttttattcagtttgaatagaatttctaaattctctatagacagtgcaccccctcgtgtggtctccagggcagactaatctcaatgcaccccaccccaggcctcccataggccattgcttcttaggtaggatggcaggttggccccattgtatagacatcaaaactgaggtccagaaataaaaatcgactcaccctcagtcactcagccagctgggatccgggctgagactaaactcaggagaagcattctagagcctagaattttaaaaaagaatctgtacccatacctctcaaaatgtgcccccaaaaatgcatgttggtgccaggcacagtggcacttgtctgtagtcccagctacttcagaggctgaggtgggaggattgcttcaggcctgcagatcaaggctgcggtgcactgtgatcacacctgtgaatagccactggaccccagcttgggcaacagagtgataccccatctctaaaaaaataaaaataaatgcatgttggaaggcctgaccacagccatttataacaacaagagccacccagggccaacaggaacgaaccctaagagccaggcacggcaatgacacctggagcacttctgcccccaaggtcaggacacagaggtggccacggctggaatacccagccccacccccacgtgcccatgcctccatctgccctgcccatgtctgtctgtccagcagaggaagtatgacctgcactaccgcatcgcccttgtcgtcaactacctgggccactgcgtatctgtggcagccctggtggccgccttcctgcttttcctggccctgcggtgagtctgcccttccgccttgctttctcctcatccctccccctacagcacccccttcacctctcccagacattctcacctccattctggggcccagcagataaaagggcccgtggagaaagtggggtttgggtggggtgccagggcatgaatcaccagcaggcatgtggggtgcagagtgggagctggactcagaggcccaactgtggccaccatgggtgggaagtggctcctagtgcagccctgccctcatcccaggctgagtctctacctggcctcagggggaacccagtcccagttgacccctgaacctggctgacccctgacctgcacctcccacaggagcattcgctgtctgcggaatgtgattcactggaacctcatcaccacctttatcctgcgaaatgtcatgtggttcctgctgcagctcgttgaccatgaagtgcacgagagcaatgaggtcattgctcggggagactcggggctatacctggggggctctgggctccgggggcacccatctgtctgtctggtctctgcttggacccctcctttgtcaggaagctcactacctgctaaagcagccctcttcttcttgagcagcttttactcttacaagctcttcctaatgttgaacttctgcaactccaccccattcttgcccccactctgagaacagatcccctctgctctctccaggctctgagacagaccccttggagatttgcacacagagactgatgttcaccagtccctgctactctcagctggtgacaactgactttctggctgctccttggctgacccatggccagaatgctgtcatctgggctgtggctcaggtgcaaaaccagacctgagctcacctccaccctagccattgtcccaacagagctgggctgggaggagcaggaagctgccaggctgggagcttcacaaagctgactctagacacatttatcctagtccactcctcatcttgtggattcaggtgccctcaaagacccctttgagaaaaggaagctagaactaacctctgttgagctttctctcacttaatcctaatgagaccagcagggatcattttccccattacatagacatggaaactgagactcacagaggttaagtgactcgccaaggtcacatgcagtgatgatacctctacataaggggctatcccacatgctaactgtccactctggatttctgtccattgctgtgtactgtgtccaagctattgtaaaactgtagactagtcttgggccatcacagagccctgtggcacaccgacagagacttctcagtacatttcctttgggtggcctgtgcctgagcagacaccagcctggtgtgatccttaacatggtcccacatagaacactgcctcagaatcaaacaggttcactcgagttgagggtgccttctagctccaacgtgggcttgtgctaatagaacatcatcaaccctggatgaaaagtagggttgggaggaggggcttggtagcttcccacctcagcaggactttctcagaaaaaaggagacagccagccacagggactgtgcagggaagcccagaagcagccaacagctcagcacaggagggttatctgagaactggggctgtcagagccagacagagaggatgggctgtgtgcagaagcagagcccctgacgcacagctccccggaccttgagctggctccatcattccccatgtcccagccttggctctcagggtgccctggggatgagcctgtggggaagatgaccaggtggggtctgttgagaggagctctggcctggaagcccaatgtctagaccctggccctgccatggcccactgcgtggctctaaaggggcagggtcttcccctccctgcctcctttgggaaggtagccttggtgcctggggaagggtggccttgctcagagggacagggacacattcccctctgctgggaaggcacggaaccacagcaggcacaaccacagccacaacacagctaccctcatgcctgtctttgccatcctctatctccttcaaccaccctggaaggcagggttactttttgaggttcagagaggtgcagtgacttgccgggggccgtgtactttgcaagtctccctccagagctagtaataattgtgccaagtccagaagttcccaaacccagagtctttggagaatcccctccctggccgcagccccacttcatacacccttgactcactttactcacttttattttttcatttttttctaaatgaaattccatatcccatccccaaaaggaagcaggtctgacttgctatggattgaaaatgactcaaaaaaactaaaatgaaaacacaacaagatggttgaattccagcctctgcctacagaaagctcagagccagactcttgctctctttactagaatgaaaaattagaaagagttagagagaagttaaaaaaaacacgttggccccagtggagaatggcaccttaacttaatctgaaagtgtgaaagagcactggagaaggatgaagcttttcagagtgaggttcgctggtatttgatggcatgtccacgaaccccctttggggagccctgtgtcttgttgccctgcctggggatgggtatgtcctacctgggccccaagctgcctcctgacagcctctctgccctgcacacaggtctggtgccgctgcatcaccaccatcttcaactacttcgtggtgaccaacttcttctggatgtttgtggaaggctgctacctgcacacggccattgtcatgacctactccactgagcgcctgcgcaagtgcctcttcctcttcatcggatggtgtgagggtcccaggggcagcagggcctagttggggggaggacttctcaccaggccatttcccttcgtcttgggtccaaggaccagagcctggccctgccctccacccccagcgcagtccggtggatgcagctacttccctccatgctggtgaggaacaagcaaaggatctctccaaaggatattcctcaaatagctcttctccccctgccaggaaggacctgtccaaaggcctttgtctctggctcagaaactggctggctctacttctctatcacaaaatcacgcagccctgcttggagagaggggcaggggcatgggccaggtgttgagggacagggcacccctggggttgtgggtggcctgctgttggaagagtaaaaacatgatcctagccctgttgtggtaccccacggtatgtcctacaagaaagtccctgtccatctgtcccctgcagcccaagtctttccttctttcaggcatccccttccccatcatcgtcgcctgggccatcggcaagctctactatgagaatgaacagtaagtggatgggccagccatggggggtcatggggaagggaatgggggtgttaggacaggtcagccttgggctctggccaagccgtggagcaggaattgtagccacacctagacagatccacgttcctgttgtccttaaattgaaaaaaatagtcctgcactcagaggtactcacatggtagggctcaaggaactttgctgaattaagttaggaattgtggttccttgaagtgccccccgacccaacgcatgacccctttggtctttgtaaggcctcctcagacttggatgtggcagctctggcccggggtatgtggaaggggccaaggccgcacatgacatccagagctgtccatgagcatttaaagagtccatgagcatttaacagagcttgtttttttttctgaagtctcagtctctgcctgggtgcagtgtcccatcctgaggttctccctatgccagaggctgtaatatgctgagccacagcccaaatgacagcaactctggccatgggtcagccaaggagcagccagaaagtcaggtgtcaccagctgagagcagcggggaccagggaacattagcctgtatgcaaatctccaaggggtctgtctcagagcctggagagagcagaggggatctgttctcagagtgggggcaagaatggagtagagttccaggagctcaacattaggaagagcttgtaagagtaaaagctgcccaagaagagggctgccttggtaggtggtgagcttcctgtcaaaggagggctccaagcagaggccagaaaccctgggagacagggagaatcctatctgaggcaggtctgcactggatgacctccaagatttcagaggaatgagttccccaaagttgatggcccctccctgtggtccagtagttgctggccgacccagaccctaaagcatttcccctgaccagcatccccggagaatgaattatgcctctggcagccagtgaggccagccaggcagcagctcccctcactgggtgcacaagcattggctcaaagacgcaaaatcccaggctggaggtaggaaggctccacttccacatctgctgctttgtgtggccgagtgagtgcctggcacacggaacagcgggtttcaagcaatatgggaacaggtggcctaaggcaattggccctgggccagcaagggggagcccagctctccctttattcctgtgcctcctgcatgcccagtcctatgcctagcagtctgcaatggggcaggtaaaagaggaggagaaagagacccatggcctgtcctcagtcgggctggggagatcagacccaccatgtagagcaaaagacagcctggtgggtaagggtggtcagtggagctggtatttccaccaaggctttctgggaaggggcagtcctggagattgggtctcaggaagggtaaagctggaggaccctgggcccaagtctgtgggggtcccccagttccagctcaggaggccccctacagccaccccatcttcacaggtgctggtttggcaaggagcctggcgacctggtggactacatctaccaaggccccatcattctcgtgctcctggtaagccctcagcggtggctgggatggggctgggtgccaagaggacagaagagggcccacccaggcagagacgctgggaaagatgtggcatgggcagccctgcgcacacactctatatgccacccccgtaccctgtccatgccaccctgtgccccagcaccacccggccttcccttcctcatgctcgatgccctggcgcagccctgcaccactctgctgacctcagggctctttctctgggaggagaaaggatctgatgggtagacttcctgtgccctcccggtctgacactgtacaatgctgagaaagccaggtgagcaggcagctggtgacaagagaagagtgtgcgggcttctgttcattccagacctacgttcccctcagcccccagtgaccctctccaggtccagcccaccacccccagcctgaagcggtgaataccgggatgcagcataatgaggaat

SEQ ID NO: 726 - protein, 470 aa, Homo sapiens
RARGLETEPLREEPPGPAPRRSHWPRRSGCTRSSVHSAAPLREGPHLTALGDRRWRPKAAREIGAGLAGARTPRPLGRSLSRPLPRSHAGRALPLPLRTRLRDAMDAALLHSLLEANCSLALAEELLLDGWGPPLDPEGPYSYCNTTLDQIGTCWPRSAAGALVERPCPEYFNGVKYNTTRQDTEVATAGIPSPTPTCPCLHLPCPCLSVQQRKYDLHYRIALVVNYLGHCVSVAALVAAFLLFLALRSIRCLRNVIHWNLITTFILRNVMWFLLQLVDHEVHESNEVWCRCITTIFNYFVVTNFFWMFVEGCYLHTAIVMTYSTERLRKCLFLFIGWCIPFPIIVAWAIGKLYYENEQCWFGKEPGDLVDYIYQGPIILVLLVSPQRWLGWGWVPRGQKRAHPGRDAGKDVAWAALRTHSICHPRTLSMPPCAPAPPGLPFLMLDALAQPCTTLLTSGLFLWEEKGSDG

SEQ ID NO: 727 - DNA, 14368 bp, Homo sapiens
  source (1)..(14368)
  CDS (201)..(316)
  CDS (7452)..(7694)
  CDS (10721)..(10850)
  CDS (13980)..(14168)
cacaccgccatcttggattagaagtgtagatgggatcttgactaggtgggggagggtcctgctggggaaataatagcatctttgcccagaatcatgtccatctgctttttttttttttgctccttaggttaactttgtgctttttattggcattatcgtcatccttgtgcagaaacttcagtctccagacatgggaggcaatgagtccagcatctacttgtaagtaccattgtgtggctgccacagccatttctgacagccgagcgggccctgcattcaggtcacagcagaaggcggcctgggctttgctgatagggtgacctagcatcagcatttgcagatcttcttctgattaaagagcctttaatatagttgcccttccagaattcagcaaacccaggagctcctcagctgcatggccatcatatggatgggcaggaagagagagagagagagagagcctgagagagagactgactaggaaagtcaagaaggaaaacatcagatttcctaagggaggtagggtcttggttggttagaagttgagtttcctttggggttcctggttctgtgggaagctcatgaataccactgaatacattgttgcctgatattccgacccccagcccagactgtggaagttgcccagttcccactagcgagtcaggcggacacattctcactggtctgggtgttggaaggtgggtactttctttcctccacaggccctcggggcagctctacctctgcatgtggtcctatttcttcaactccttcctttctgatgaacatctaattggttggggattattgggttacagggcagcctcttaccatagagcgtagggctttctccacttccatggccacttgatttccaagaagtatttctgcagtcatgtccctaacagcctatctttgcctgccctttcccatttctctctccgccctgtctcattatgaaatcagacatagcagcttccacctcccatctctggctgtgaatgggagcatgaccagctgggtgtgtggggtatgaggacatttctgatgctggggaggaaggttggttgtcccctgtggttggctggaggggtggatgggcacactctggttctgagggcagtccttggggtccgtctgttggtaaggcaaaagccctatgtgtggcttctccgctccttcagaagaaagcagatgaggaggagctgaggtatcttcactgggtgcctcattgggtccatggtcctgccttcatcagagaccccagtagatgctggggtcacagcatctactggctgcccagtagatgacaagtgggacagtgagagatcccagtacagggttcccccagggtccccttcctcagccattctcctagagggagaggcaagaactgctcggagaccaaatcctagatccttccctaaggctccctgaggcttcctcagggaggtggagcttgttcttggtctgtcaatctgttcagcctggggaactccccatgtggaaacccttcctcaggggtgggggactagcacagggcctggggtgttcagccaggttttttctacctatacaatgattacattacattggaaaaagtgctttttttcctatccatttactgttttttctttcatgtttttgcaagtttttaccaattcttgcttatatgtgtatattatgtagtagaaaattattcatcaatataaatcataaagtcttagaggccctgccctgtggggtggggggccagccctttgctactacataacctgccctagagatagcattcctgccttcatctcaaggattcacaaaatagggccccgctgctcgcctcatctcctgtctagtgttggacactgcccttgtgtctggcctcagtttctcctgcttgggcgtggatcaggtcacacactaatagttgtctcccatatttgaagctggcagggagctaagtcaacctcatctctcgtttgagctctagtggtcttgatttcctccccttcctggtaggatttgttcttctactgagggccccccaacctcttctctgggggggtcctctcagctttccctactaaataggataccctactgaaccctgaacatactttgccaactcagacattctgctttgggcagcaagaacccccagggcctggtgggaaagaagtgcccgccaaggtttcaggttctccacggaccaggagccttgagtcttgttaggtcttcctcatgcatagataagagctacctgtaattagcacatggtttatacatttaagtactgtattaatctgggacatttaaagatccagctagttggtttgcttctggcattaaaaaaaaatccctttgcaatctcagcaaatcttttttttttagagaaagtcaaacctctgctagtcttgagtgcccatgattaaaaactcagatggacaaagtctgtgagagtgggagtgcccacacaggacagggaatcagcttgatcccattcagtccagcagcatgtttgagtgacagggtcaaggagaccctgtcggccaaagtgagtagtaatccaattgaccacactgctaagaactgtagagcacttggaaatactcgcgaccacatccatgcacatttaacacctgcaaacatccagtgaatctggtggaataggtaaatcactgtcaaatagaatcaccatgttacagctgagggaactagttatcagtgaagtgacgtgaatccaggaggaaggaggatgccatggctgtggtgcgggcaggcctttcaccccaagcttgacagcaccgtcatccctgtcctcaaggaatgcacagatgaaaagatagcattaaacaagtgtgcaaaattaggcttcctggaagaagaggcccctggtgggttccagcctgtgtgaaagccccctcagcccagagtgcttggcagagctggctttgagctgggaggtgtctgcactgggaggaggggagaatgtcaggcgcaggggaggtgagagggcagtgaatggggggagagggagattccagggctgtgccagagtcccctggggtaccagagttatgtgtggggccaagaagccccttcagatctgcccacaacagctctccggttttttcctcttatttccagaacaaatttaagcccgcgagtccccaagaaagcccgagaggaccccctgcctgtgccctcagaccagcattcactccctttcctgtaggttggttccagctgctcaggtgataagggtttgtcctccatagaccaagacggtattcctggcccagcctcagaagcacctgatggggtctggggcctctgcggggggacggtggcactgagccactcgtcctctctgacctgatgctcctggtaggatgagtggctggggacaggacttgggcagtgggcatcaggggctgggtcagggcttagcatgtgctcagggtcgacttggtctggggcaggggtgaggggggttagggcttagccctcagctggggttggcattaagcctcgggtaggtcagggttaactggagttgacctctgtgagcaggtaactggttcagaaaggggagaggtgaggcttccagggtagacattaactgttcggggagagcctcagccccctgccttgaagtgagccggcttcattctaggggtctcctccctggaagacaagcactggaagctgcagcttgggtggaggagggaaaacccatttgtactcccatggggtctccttggccccattggggaggatgcacacatctctggagatggctgtgccggggccaggcagaagtgcggccaggcagctttcagtctagaggcttcctccacatccagagccttccagctcacaaagcctccatcttccacttccacagcacctcctcccctgccaaggagcacctgatcctcaaagttcatgttaggggctggcagtagggactagttaccctcatgttgcagacagagaaactgaggcccagagaaggaaaatggcaccacctaagatgacccagcagtcagtggctgagcaaaaccctgagctagggtgcccagacttctcagctgggacccctccagaccggctgggagtatggaggagtggctcgtccttgtggttgcggaggaggtggtggtgggcaggaagttcccaggatctgtgagctgtgctgctagctggggtgccagtgtggtagggagtacttcgaggactgggcagggctccgggggtgcacagcatcttagcatcaggagagaccctatggagtgtgttcagctcagtccaccacattctgtggaccgccaagtggccagcaccacagtgatccctaggaatgcagacgtgaagaagacagggatgctgcctgcaaagggctccctgcaggtgtctctgtctagcgttcctctgggtgtttcccagggctgtagcccaaccaaccctgcacaccacagctgcggaagcatttctggagtttggccctcatagaaactgtgctggatccccggctgacagatgtgagtgctaagacatggaaatagctgtgactttcctgcagacacacaatgaagctgtggcgtagccagccccagaggccaaggctctctgaaaggcagacgtgggggtgagccctgcacctgtgatagggtctcccactttctgaatcaggctgctctgctctccagacagccccacccaacacccttgcctgagcttttagtctcttttggatccaactcagaatttaccgcatcagtcagtctaggttcatcccttcttcctgacttaatttattttcccttttccctaattgtcgtgacttttaagacattctgacatcttcctttctcccaccgtgtctctggctttcctgcactatttgttctttttcttttccatgagtccttttgtgcagagccattgaaggtttggggaaagccttttctttagacccatctccttcaagagccctccagggccagtcctcccccaagctgctccttgatctgccctccctgacccccatcagagccacacaactttaccaggtgcagggtttcccagtgaacttgtcactaaatggtctttggaatactttcaaaaaatccttaaaaaaaatcagaggagtctgtgtttaccatggaaacatctagggtccgggagggacaggaacaatcttgaagctaaagaaagcagggctgcagaggagaacttcagaatttggggtgaaggtttaagcttggcatgtaggaggcaacagatacagttgggggggggtctcctggaccctgatttctgtggtttacccaagccaaggttgaggggtcactggccgtaggagagaataaccaattattattatttttaatttttagacagagtcttgctctgttgcccaggctgaattgcagtggcgagatcttggctcactgcaacctctttctcctgggttcaagtgattctcctgcctcagcctcccaagtagctgggactgcaggcacctgccactacgcccggctaatttttttgtattttagtagagacagggtctcaccatgttgcccaggctggtctcaaactcctgaactcagccaatccacccgcctcggcctcccaaagtgctgggattacaggccactgcgcccagcctgagactaaccaacttttcagctaggaaaaggtacataataaatttgaagaatagaataggtaccatttctgtatacccagttaagctattttaattattgagaaaaacatacttatttgagtctgtctctttgtatgactgtgaaacagacttttgacattcattgaggaatcatgaagaaacttctcagatagatgaatacctcctaatggcgcttctcaagctttggcatgcatgtggatcccccagggatctagttaaaatgcagattctgaccacaggtccgaggtggcacctgggattctgcatttctaagaagctctcaggtggtgttggtgttgatggtctggggactgcagtctgagtagcaaagcatcaaaccaaacctcgacattcctcttctggaaaaggggatctgtagtgcccacctcacagtgtggtgtgaattgaatggtgctgtttgttgaatgagaaccccaaatccattatgcacagatgcagcggggcgggggggggggggggacctgggcttgccccatcttggaaatgtgtgacacaaattctggcctcagcgaaatgacatgtcaccacctgtcaggtaccttcaggcttactcttaaagagctggaatcacacaaggcagatcctgaatgccaagggtgtggtctctgtagctgtcctcatttgcatcaggtccaatctgatttattaattcattgaccagcaccgggagactcagagccatgtggtacctgaggagagttagtgaagtagcaagtcttttgcaatctgagaagataatacagctcatcatctatctctgacacatctgtcagagaaggggaaagtgttcatggcttgtgtcagcccaagtccaagcaggaccactgtgggctggagacacagagagtcagcctgagacctccctgaggagacagaagtcctgggtccacccaggagaatgtagagtgagactgcagcctgggcccccctccttgaggtggtttgtttctgcaagccatggggcagtgcccaaaggtgctcctctcagtcttcagcccctgcccattgaacttgtatcaagaagtccagcccaacactgtcccctacaactccctgcagtgatgggaatgtcctatgtctgtgctgtccgatatgataaccactagctccatgtggctgttgagcccttaaaatgtggccagaacaactgaggatgtgggtttttaatttgattaatttaaattcaaatagccacatatgggtagtggctatcatattggaatagtttaggtctggatgaattaacaattcattcaatctgacttacctctgtcccctatgtatgtgctgattctgagttgctggggggctcacagggaggaagctgtggaccagaggagagggagagggtagaggggaaagaccagtggacggacacccaagttgaccttcacagccaagcccagaactggcctgatttgaggctcaggttgcctgtgctaggcagtgcagaagatcggcagtgtgagtttccagctctcatcttgttgagtgggaccttgacgaggcggggctctaagcttggagccaactctggaggcagcctctggctccctgtgtgagacctagcccaggccaccttctgaatacacaccttccctctaaacccacccacctagcagtggtcccagtgtgagtgttcgtgcgtgtgtgcgtgtgcagccatgcacactcatgtccacgtataggcgtgcgtttctctgtccagagctgcccatgtcttggcccttggctccctcattctcctccacatgactgccctggccctgtctccataccctcctcttttctgctttccctgtaaactgagtttcttcactgcctggtgccccccagctgacagaagtgctaatcttgtcacacccagcagctgcgtgcagaaatgctactgcaagccacagcgggctcagcagcactcttgcaagatgtcagaactgtccaccattactctgtaagtgtgcgtggccgaggctgtggccgggaatcctggaggggtgggggacgcatgctgccactgccgctgctggaggagagtggagagccagcctctgcctcccagccccaacccattcccggctgttgcatgttggtgtctgtgtgtcttgtgagttctctgcagcctcgtggtcatggggtgggtgggcagggtgtggggatggatctacggccattgtgggtgcttcctgaggaagcagcacccccatgttctctgctgctgctgcctggtgtgtggccttcctcagtccccaacttctctgagcttcagtgttttcaactgccaaattatttccaagagtcttagagcctgagttcgtatagaccttcccccacacagggcagggaacttcactccagtgtccacagcactttgtgtgtgagtcagcattaactcactaaatccccacaacaactctatgagctgggtcctggtatcatcaccattttacaaatgagaaaactgaagtgctgagagatgaagtcactcactcaaggacccctaattgacagagggaggatttgaacccagagaatcctaagcacttcgccccaaggagtctctggctggaatatcagatttattcaatttggacatcccttttacttaaggtgccattgctcccctgggcagcccactgttatttgggcatctctgatgcccttcttggtattttgggactcttctgcccattgctggctcctcagggcaggaggacagaggcctaggccccgtgtcattttgggtaatggctcacatcatatgtttctgttgcaagacgtcagttagcttagaagcacagtcccagaaccctgggctctagagactccttgtctgtccctactgccccatttgccaaagtggccaccgggatgccctggctccccagcagaagtccctgtctgttctggggctgctgtggggctgctggggagggaaggtgttgcccttggactgtgctgtgggatgccctcactaccatcactgcatccaccttgtggctgggaaaggcctgaagggtcactgtttctcacactctgaatccatcccatgtaattccaccacagaagctggagagatttgacttattggtttccagggccctttttagactacagggacaagtacttggaaatggtcccacctatgggaacagatgccaggaggaggaaggcaggggccacaggcatgttctggggccagcttcctttcctgggctccttcaatagatatctttttaaaagtagcccctataggtagggccacagaggagtccccaagacatccatgtccctgtgtttctggccattttcctctgcattcccgactttcattccttctgcaagcaccctctgttgccttctggtgccaggcatggataaccagagatgaacaagacccgagcgcccaagagagaattcagttttgaggatgctgaggctctcaaagtaggcctgtgtgccacatggatttcttcatggaacaggcagctccctgccccagataaatgaggcaccacccccaccttcagggagtcacagtcagagatagacagataagaggaaggatggaaggatggactggtcaggattgcatctgggcttagcaggaacctgctcggatcctggtggcccttgtctgtgagcagggcggaaagggtggacacccacactcatggtcctcttcctttacgggctgagctccctctgcctaaagatctcctcaggctgctcctcctccccctgtgtctcctccttccttccttctcctctctgaatgtaagctaggaagtcaagggcctcacacagactccaagagttcagcttctctagagatctggagctcccatgttcaacagaacattctctcccagaaaggctgaatgcgggagagagggacacatggtgtaattgccccaaatcaaacgactgcctcatgcctgctgtccaccccgggggacttagctgtgctgggagatggggaggctgatcctctggaggagatgggccaggtgcagcctgggggcaggccacatctgcggggcaggccacatctgcagggcagagctggactctctgggggagacccacagggagccagtgtgcccactctgggtgaatgcttgtgagtgtcccctatagagcaggacccacaagtgcacatggtccaggtgtcctagctgtgggcttctgtggccctgtggcttcagaacagagccccaccgtgctgtcagcctagggccagaggcaggcaggggaactccaggagagctgcctcaggaagcactgcagtcctccggcccttcctcccctgcctggcccacttcagagcattctcttccacctttgactcagtttcccagcaggaggttcctcctgcccagttggagattgccgatgcccagggtccgtaagttcctcctagaatccctcccgagtttcttcctctgtgatccactcactgagcctttcctccctccctgccatcagcacttccccatcacttggtgagtgtcccggctagccccaggctccaaaaagccaactgtctctgtggcccatcgagggctgcttctttcaggcacaaagagctttcttccagaacaggagagcggctgctctgcctgaggaccctgcatttcccacaagcttgtcagtctgatccctgtgttttgccctgactttgcttttccagaaggttttgcacgtcacccaaggggtccctgtaaatcgtgtgcacatttttagtggttctacaggctattgactgagtgtcttgcagactggggatgtctccccacaatatcccagagtcctggcagcccaggccacttgtactgggagagaatgctgaggggtctgtggacacgggccccagcttggagggagaataagggactggggctgagttctctgccctccgtggctctggccccgagccctggaagtccccagagcagatgttttgctttcctccgacaggcgactggcccggtccaccctgctgctcatcccactattcggaatccactacacagtatttgccttctccccagagaatgtcagcaaaagggaaagactcgtgtttgagctggggctgggctccttccaggtaggtgtggcacatggggaggacagaactcactgggagccagggcctggttgctcacctgcaagtggtgctggagcctctttaatcttgactgtaaagtgagtgctagagtagaggtgatgagggagccctgtctgctgtctacccttagggctcctgtaagaagacacactggtgtctgcccatcactgcatctgagtatcctgagccagctgcccccactcctggcccccaccctgggtgacctgagatggcatctcccagcagcctggggtgcagggtggagtgtcctcaagagcccagtgtgtccacatcctgccttcagctttttaggccatgtaccccttgagttctgtcttacctacatctagatccccagcacagggcctggccacagagagcccagtgagctgcacaaatgcatgagcaaacagacatgagtgagtggggggatgagagggtgaacagaatgctgccttagtgcctggaggaaggagtggatggactggaaatgagtaaggggctaggtgaatcaccatgaggaaatgagcaggcaggagcagcagtaggtggatgaaggcaggggcagctccctggagtgtctggggatagagcgcctctccctaagccagctgtttgaattagtatttgatcttgatggtcagaaagttactctccatatctgacttgaccttctccaccattttaatccaaggccatttaaccgggcccaggttcttagtctggtgagactgactatgggtctcacctgagactggcctcatgggctcatagacaaagccctggcccaggagtgagagcccagggctcttgtctctgtgcttgctgaccagttctggggtccttgagctatcattcttccaacaccttcaaacgacagcacagggcacagggattgcaaggaactaatttgcagcattcaagaaaatgctcctgcttttttggtgtggatttaaagaatatatagagaatagctaagtgcatacgctgtgccaagtactcgctctgcgtggtgttctgcattgctgtgtatgatagtatctggcccaaggagggcagattggggagatgatggtggacaaggatggcacaggtctgttctgtcctggagggttcctaccctcagaagcctgcaggatggttaggagctaagagaaattctagggcattcagggaaggcttcttataggaagtgggatagagctggcctttgggaatgggaaggatctgaccaagggaatgtgagatccaaagctagaatgtatctgtgggacaggacttgaccaccagccacgtggcctcatgggtgtgcccatcttggtagagtagaactgtcccatcttaccccagatccctgggcaggtgcccccatccaggtcatggtgtatttctgcttcctagagtcatcccctccatgccccacacagcatttcagaaagtcctttgctagcatcctcaggcttattttctctattcccagggctttgtggtggctgttctctactgttttctgaatggtgaggtaagaccttggccctctggcttcttggcagtggaagtggggctttctggggagcagacaggggaaccacctgttggccacatgggactgactcttcagagagggctctgccaggctcccagcactgagaggaggggctggtcatacagctcctggcattgtgtggtgccaggacctcctgatacccacaccctgtgctggaatctgtcccactttgccagctgtgcagctaaggccccacccaaagagcaaagctcctggtaaaagcgtcggctctgctgagcgcagatctccctgggagggtcctctccataagacactccgtggtgaggaggaattgacaataaggaagggtggggcacaggacataggacctacaggccatgaggctgtgctaggcagagctgctgagccaggagctgcctggcactcagggttgcccttaactggccagccagcctggcccaaactgtcccctggtagaagggagactgtgagaatttggaagagaccccagggagagacctggaaccttctattaatactccattgccagagctgtggttcgggggctccctctgtaccctattggggtaaagcgcttgagcacaacccaaaacagaggtgctggggcagcggtggggactgaatggctagggtggatttgagagtaggcgggagtctttgcaccagtgcttgggtcttagctgcatcaccttggcaggctcctccctcttttgcatctgagcaacagagattgggctctgtgatcgcccagacaacctacagaaggatcagattaggacagacaagagaggcagaaagggccctgcaggtagtggccaggagagcttagaagtgggcatgtatgtagcttgttcagagcttgcagtgaaagtaggagctggaactggagagggtgggtgtaggcgctgcttccagttgtgcagtctgtgcactgcacgaaggtgcttgactgagaaggcacatggaggctgagactcagcatggcccccactcaccatgctaagagctacatgggtgtgtgttttcccagaggggtgcattatttaatggttctcaaccctgactgggaagctttaaaaaatatgatgtctgggtcttgtgcagaacttttgatataattgttctggggtatggcctgggcatctggaatttttaaagccccccaggtaattctaatgtgtagcccactcttactggtcagccaagagtggggatcctttcctgatccacctgccctgtgggactgcttgttaaagatttcctgaaggacccaatggactattctctgcctggcctgaaaacaacagggagccattagagggccttgctcagaaagtggcaagggaaggggctgttccggtcagctcctcagaggcttccttgcctacagctgctaaaagcccccactggagaccttgagggccgcaggctgcaactggggagtggggagggtgctgagggtggcactgccagcctgggaagggccccaggccaggacagggcctggaggctgcagaggatgtccatctggaagtgaccgcccagtttgctccctgcaggtacaagcggagatcaagcgaaaatggcgaagctggaaggtgaaccgttacttcgctgtggacttcaagcaccgacacccgtctctggccagcagtggggtgaatgggggcacccagctctccatcctgagcaagagcagctcccaaatccgcatgtctggcctccctgctgacaatctggccacctgagccatgctcccctcctcctcctctcctccatccacaggctgggaccgcaggcaggtgccagcccacgcatgtttgcgcctcttccctccccttgggcaggccctgggctggaagcttggctcctgaggggggagaaggaggcagggcacagactggaattgtcccctccttgttttggtactggtcccacccactgtggt

SEQ ID NO: 728 - protein, 225 aa, Homo sapiens
MSPASTCKYHCVAATAISDSRAGPAFRSQQKAAWALLIGAAHVLALGSLILLHMTALALSPYPPLFCFPCKLSFFTAWCPPADRSANLVTPSSCVQKCYCKPQRAQQHSCKMSELSTITLRLARSTLLLIPLFGIHYTVFAFSPENVSKRERLVFELGLGSFQVQAEIKRKWRSWKVNRYFAVDFKHRHPSLASSGVNGGTQLSILSKSSSQIRMSGLPADNLAT

SEQ ID NO: 729 - DNA, 19994 bp, Homo sapiens
  source (1)..(19994)
  CDS (201)..(257)
  CDS (4967)..(5303)
  CDS (6000)..(6097)
  CDS (7252)..(7349)
  CDS (8096)..(8258)
  CDS (10118)..(10271)
  CDS (10562)..(10622)
  CDS (11104)..(11173)
  CDS (11910)..(12037)
  CDS (12562)..(12691)
  CDS (13414)..(13455)
  CDS (19702)..(19794)
ctgagctgggcaggtgtcctgcaatcctggtgaatattcagcggtctgtgtccccttggctagctcctgcctatgcaaacagccacctgagaaggggaagcagagggtgcggtggaaacggctgtgtcaggggacagcaggggaaggaagatagccaaggcttactgaggctggtggagggagccactgctgggctcaccatggaccgccggatgtggggggcccacgtcttctgcgtgttgagcccgttaccgaccgtgagtagccagctgagaccctctggcctctgccactgggctccagatttgggagccacagggccaactggagcctggcggagaccctactgcccttctcctgctctagagtccctccctacgagcaggtggcaggctgtggcttggagagcccctgacactggggctccctccctcatctccctctgcccagcaatctgtagtgactctgggtagtgctattaacatgtccttccaggggctgagctgagctcaccttcttgttgcttcccccagggcctggctgtgccctctgggggccacagagactctgtctgccacaagacagtgcctcagaattggtgaggcaaagtcaggctcccctcttagtccctgcagtttgctctttctctcagctgtgcacctgtgatgcttccacacgctcctgtggtaagctttctggacccttccttagccctatgactccctgagccactctccagtttggtggtttcctttgaagagggtgtggccagggaaggaatggaacctaaggagttggtggagaccagctgcttctgctccagcacttaggggatccatcatcttctcacgatgctgagggctggagaggcttttggcaaccaaattgtactccatgggctagagcgctggagcacggggcatcaggagagagggcccttcctgaatgggctgcagtttcccagtaactttccaggaggttactgcaagtgacagcagggaccaggctgggagtcacaaggttctgggatggtgagggcctgaagcattcttcctccgctgccttattggagggtgctgcccctcccgagcaccttgctgcacctgctcctgagtgcacaggctttgagcttgaatcctggacgcatgaaactagccgtgtgaactgcaagttcctcagccttcctgagtcttgcttttatctcttttgttaaaagagaaaatatccgctggcccgggtcactgtgcattgagtggaatctgatttgtcaagggctgggcataggggtgcaacacaggaaacttcgactgcccccctgtctgccatctgtgtgcactctacagcaaaagctttatttttagcaggggtacccaagatctggtggtggccattcagcagatggtgctagtaccaaagctagaactcaatcactgtttgccagtgtgggcatcatcccctgcagataccaggaagagcagcaggcatagatgcaaggcctgggggtccagggcgatggagcctcccctcaggggtgggtggggtccacgatgtgtgtgggggggtgactgggagccccaggatgtgtttcgccagtcctaattcagcaggagcatttggataaatcttagaacgatctatccttccactcccaccacttccctccctagaatctctccttacatctggccctatgcccacacatcctgagtcattagtggggcttctctgaatttccctccttctcttagaggtgtgggcactgtctgttcatccttttggcatgaggctgctctcctggcatcctttgccctcagttgcttccccaaattggccctgaaaagtttcccaggcagggttggggcttgccagactgtgcagtaggcagaaggataggcagagaccacagctcttccaacagcccagggtcaatatcaggctgatggtgtgagaaagtcccatacaggcccatctgccctcctgctcttccttccccgctttgtgcgctcagtctgttgggagatgtaggggagacgcaacggggctctgccctgagatggacctgaggttactgagtcctcgggaggaagccaagagctgagtccggggcacccaccaaaataagacctggagcctgggtagtgggtgacatctgcaccctggggccttgcagggccaggcaggagatggcagagctgcgtccaagccatggacccatggggtcagcagggcgggacaggagtgacttctcctgccagggtagcactggtgggggtgaccctccttactgggctggctctccagattttctcctatcccacaaatctgcggcagagctctcgggtctctccacgtggtcacccaccatctattgtccccactctggtggtcaaagtctctactctctgaccccagccctggtcttacatctgctacactatttgctgtgcctgcatttctcccaaagaacactagctgttaattaaacatttgctgacatggatcctgctagacattgagggtgtgtgtgtgtggggtgggggtgggggccatggggagagaaacattagtcctgagctgatacttcccaaatacaccttttcccacttcccttgtccttgcacatgctgtgctttctgttccagatgctcttctccccactgtgtgtgtctggctctaaaaaatgctcccttgtccccaggtccagctcaaatgccacctccccaatccctgtgagagggacattccctcccatggtacctgtcttgcttctttttgttttttttttgtttttctgagatggagtctcactttatcgcccaggctggagtacagtggcacaatctcagctcactgtaacctccgcctcctgggttcaagtgattctcctgcctcagcctcctgagtagctgggattacaggagcgtgtcatcacacccagctaatttttgtatttttgtagagatagtgttttgccacattggtcaggctggtgtttaactcctgacgtcaggtgatccgcctaccttggcctcccaaagtgctgggattacaggcatgagccactgcgcccggcccctgtcctgcttctgatcacagtttgcgcagggtctattaggatccagcccttctcccttccccagcccctcctctcctgtgaaagcctgggggaacagacatctacactggttgacttggatgtgtgttttatacaaaaatgtgtatgctgtatacccagttcacagtgcagaaagtatgttttgtaaacttggcttcccttgtatgtatctgtttgggctctggcctgctgggcgatcagttttggttttccttcggtttggggcggtgggagggagaagtgctagaaattcctgctgttcacttccagtttcctggagaacttgttaaaatacaaagtgctggatccaccctagatctctacatattcctgcttccatcccaatggatctctagctggttcttgaggcacactttcagaagtactgctagaagattcccaaaaaaaccccaacttgtttccagcttccagagatcatttctcatggccactgtgtagcacaagatctgggaggctcctaaaactataatctttcaaggttgctcagccatcaaggttatgatcctttcatctacacatccatgaagccacacatccatccttacacagctctctcactcatccaccatgcacccatccatgcagccagtcatctgtctatccatccatccacctccccagccatatatttgtctgtctgtctgtatactcatccattccactagccttccttccttcttttctgccttcctgccttcctgccttccttccctccttcctttttttatgcagccttcacctcattcatgtgctcactcatccatgtgctcattcattcatccatcttctctctcacttactaagctacccatttgctcatgtgttcctgcctgtgtgcacccctaaaagcagagactgagacaaaggtcagaaatttaaaatggtttccagtggggtaaatccaaagtattggcagagctgcattcctcctggagactgtagagaataatccatttccttgccttttccttgggttcatgccctttctccatcttcagaccagcagtgtggcatctttaaatctcagttcccacggcacacatcctcatgtcacctcctctgattctgactctcttgcctactgcccatcctataaggagccttgcgattacatcaggcctactcagataatcaaggatgagctttgcatctcaagatcctgaactcaatcacatctgcaaagtccttttgccgtttaaggtaacatattcacaggttccacagattaggatgtggacatctttgggggccattattctgtctaccattattatgcagaactgcttccagggagcaggagtggagagcaaggagaatgacacagggaaggaggaaaggccctgatgagaatggagttggccatccctgtgagatcttcagaagcatattgtctaatgtgtctcagaacttacttacatgagacagaatggagaaacatccatccaaacctaggcagacctaggtttgtataccaacttcctcttttccggggtgactttgggcaagtcggtcaaccctaacctctgcttcctgagctgtgaaatggaaagaacaagagcattaactgcacaagagaggattagaccttctgttcctccctctctccctccctccctccctccctccctccctccctcccttccttccttccttccttccttccatctgaacatctaccaaacacacctgaaactactgtgagcaggtctttgcctaggattagggcacagatatgaatcaggccttgtccctgttctcaggtcatgtggaccacagagcccagaaagacacccaaatggcttggctcatcctgttcactgtttccagcaggtattgggccacatgcacccagaatgtgacttcatcacccagctgagagaggatgagagtgcctgtctacaagcagcagaggagatgcccaacaccaccctgggtatggggcctaggaggcaggtggtggcttctctgattcctttatatcctccagcctcacccctcggattattgggacagccctgcacctgggctgagtctctgctgctcctggctctctatccaggctgccctgcgacctgggatgggctgctgtgctggccaacggcaggctctggcgagtgggtcaccctcccctgcccggatttcttctctcacttcagctcagagtcaggtgaggggtgctgggtgtggcggtgggaaagggaggtgctttcatctggaagtggcagaatcatcactggatttgggggcaggctaacctgggtttgtataccaacttcccctcttctggggtgacctcgggccagtcagtctatcctgatctctgcttcctgagctgtgaactggggagaacaagagcattaactgtgcaggaaagtattagagtgcagaacctgtaagtgctggacctggatgccctccaggtgttagcagaagcctggctgcaagggtggaggagggcaggcctgcctgactgccaagacaccaccaactgcccaggatggagagggtggggcactctgctgctctgcttcacttccctggcctaggtgctgggacagtgagggcctcttttctccctactgcccttaggatgctggcagcccagctcaccactcctcacccctcaggggaataatcctctttgtgaagagatggcacctttgaagccagagaaggaaggccccatagtgtgtccctgggcaggctagacctgggccccaggcctctggagccaccctctctgttgctcagaggagctgtccatgcaaaccctgccagggtcacttgatggtccctggcacccccagccccctcctggggagagggaaggagttgtggctagagagtcttgcttgcctcccaggggctgtgaaacgggattgtactatcactggctggtctgagccctttccaccttaccctgtggcctgccctgtgcctctggagctgctggctgaggaggtaagagtcttctggcatcttggaggaaggactgccatggacatttgtatgggtgggtgcacaactgtaggggccgccattctctagcctgcagattggaatactacttacagcagttttccagcagagagcagtgaagtgtctggaggagatggggtcttttgctaagttactgaagggtgacccacgggccaagttacttggagggagaagcggggcagagggcaggtgggagatctgccggctgctgtcttggttctgtgtccaggcctccagggcagggagcttaaagtggttccagaggaaacaaggctcctagcagccctgggaagctcctttccttctctggccctcagtctgtggagcagtgtgcatggttgcgatgtgggcaagtgagggaaactcaagcccagggtgattgcagagagctcctaacaccagccagcacaccgcacacttgtgtatccagcagggcctttgccaggcactcccaaacccatcatcccatttctctgtccccttgatctctgagaggtaaagcatgactgtaaccatttttcagatggaaagactgagtcagggacaggaagtgattgcctggaccccacaggagagctgggattggggccagtgcccaggcccctgctcccttcccttgcctgcaccctctatcttcagggccaggctggactctgactgatccaaacacttggccacggaaaccttttgcctgcctgcctgtggctgtccccaggtgtccctggctatctcctttatttggatacattgtgttcccaagctggtgagcaagctggatgtcaataaacaagctgatttcctcttgggcttttgtcattccccagggacatgtagtttctgcggctgcctctcctcaccctcagagcatcatgaatgttaagcatctccactcctcgccactacccctccctcacccgcaggtcaggtggaaggcaggctgtaaactaaagctccagtgcacagggggagctttccatggtactcgcggacacctctgcctccagatggggagtgttggggtggaatggcaaaggcttcacctgcttgattgtcaagcctctctttcctccaaaggcccagaagctgagactttcttctgtctctgcccttcccaggaatcttacttctccacagtgaagattatctacaccgtgggccatagcatctctattgtagccctcttcgtggccatcaccatcctggttgctctcaggtttgtcatcctcatcaccagctcaagaaccttccttggctccttatttcccagagggtcaagtctgcttccttgcctacatagccatgaacttcccagatctaggcgccatacccatgtctaactttcccttcccttttccccaccatgtagacccatctcttcaaacaccagaactcattcctacctctgcccctttgctcacgtggtgctcattctatttgcttggaattcctcattgttctcagtgtatttataactgagaaagcccagctcctatctgcatctgacagtcctctgcctcctgcccagagcccctcttgactgttataactctctgaccactgtcccctttaagaccccaccccctcctccagccttcgaagtctgagcactgcatctggcctgtgctgttcttggtctcatggggatgagtgtctctgatcatccagggggctcccatgggcagtacctgccgtttctgcctctgttccctgagactgtgagcaccctcgaggcagggaccagatattcctctctttccacacttaccctgagcacaggaatggttgctcagctgtcctgcaagggttaaactgaagcctcaagttcagctcaattcaattcagtttgattgcatccagtttgattcgattcacctcctgccctgttcagcccagttgcagcacaccagaatcccctctccctgcttgcttcttgttcctcatttctcccattacccccaggaggctccactgcccccggaactacgtccacacccagctgttcaccacttttatcctcaaggcgggagctgtgttcctgaaggatgctgcccttttccacagcgacgacactgaccactgcagcttctccactgtaatggccatgggtgaaggggctgggcaggtgggggagagaggaggtaggattacagacccagatgtgcctgcgtcaggcttccctgccctgtgggctgaccctggggctcccgcatggccaattacagaacaggaaaatgctcctttcccatgtcaccccctaagtcctcacgcctttcctggactgtggtgtcgatccatgtcatttcccatattgcatgctctactccgcgttctgtagtccaacctagaccacgtttcactatgcacagccttttcctttcctttcacccctccctgagcactcataggtctgtgctgggggtgtgtacgcaaggggctgggaggagctgggtccctccttcaggaagagcccatgggacagaatgcacacagattaggggactcccaagtggaggaagctgagagctaggagagaacgagagggggcttcagggaggagaggaccctggagctgtattggcagcaacaatagggagatggggaaggagaacatttcaagaggagagaccagggtgaacaaactctcaaagacaggaggacctgggccatgtccaagaaactgggaaggcaccatgggagagatggggtggagacaataagaggcaattgaaattaaagggaagttgggcagaatgtggagacccagcacctgctagatcctctgcaagtgtgctggaaatgaacagcgaaatcagggagcaaactaacacatgacctcaattaactgatgaaagaattaatcatacttcatactgagcacttattttgtgccaggcattgcactaagtgctttacatatgtagttgtcccttgaacaatgtgggtttagtggtgttgacccccctttcagctgagaattcaagtataacttttgtgtcccccaaacttaactattgattgcctactgttgacctgaagccttaccaataacataaatgaccgattaacacatatttgtctgttacacgtgttatatactgtattcttacaataaagtaagctagagaaaaaattttaagaaaatcatagagaaaataaaaattggctgtttttaaatggaagtggatcatcatgaaggtcttcatcctcatcgtctttatgttgagtagcctgagggggaggaggaagagaagttgatcttgctgtcttaggggtgacagagatggaagaaaatctatgtgtaaatggacttcagcagttcacacctttgttgttcaagagtcagctggcattatctcttgaatttttaaaacagcttgaagaagaaagcatcactttaatcccattttgtagaggagagacagttggcaaggtcacccagtggcacacgggtggggctgggatcaaacctgggccaactgaactcagaggtggtcctgctcccctgccggcaggtgatcaagtcatgcagtgagtgagtgaatgcacgggtgcctgtgtgtgttttttgcaagacagagctgtggctgaataagtcacagctctagggattgacttcagctcaggaaggatgggggtaagtgaaaatagaagcaagtcttaggcagtttccatttaatccttatgatgaggacttgatctaggtattggaggtttttccttttacagatgaaaagctaaggtgtgaggagatttgcacaggaaatagatagtaaattagaagccaggctgtctagataccaaatctgtgctcttaaccctcactgtatatcaccacatcccctcttgggtggcccaaggagctgcaggtcccagcctaacatggaggggcctggaggttctgtatctgagtagggtagaggagactgggatggggctccagtgggtgtcccagctctgaagcacccaggtcctggcccccaggttctatgcaaggtctctgtggccgcctcccatttcgccaccatgaccaacttcagctggctgttggcagaagccgtctacctgaactgcctcctggcctccacctcccccagctcaaggagagccttctggtggctggttctcgctggctggggtgagcactgagggcgggttgggcaccatggggaggtaaagggctggaaaggcccagggagtttacataaaggcccctccacctcactctgaggcccagagaaggagagggacaggccacagtccggcagcaagtgttggagggtgggaccagggccctggctctggggtcctgcctggccctgcctttgcagtgccctacgtggctgatggtggtggtgggaggtggcgccagatctcagagtcaaggatgcagactccctcgcttgtgtcttccctgtactcctgtagggctgcccgtgctcttcactggcacgtgggtgagctgcaaactggccttcgaggacatcgcgtgagtcggagcggccaccttgtcatacccgctggtcctacatggggtgtggagtggacagtcaggccatgggctgttctccaggctgggaagaggaggagaagggactgcccggctaggatggggggtgggagaacagtctgtgagtagcacagaaggggcatgagccaggcaggagagtggagctcagattcccagggctgtggggctgggggaaggtggggtgagggagctgccagggggccagcaaggaggcattgaacagagttcagaaacgtttgtccatctaggtggatagaaagggtgagcccagcctggattggggtgcccctttgggtgagaccttaactggctgagacaggagaaaaggctggaggggaggtgggtgagaccagaaggcatgaatgcctgagagggaggtgcctgcgtcaccacagtgaaggggactttccaacaacggccttctttcctctctccccaggtgctgggacctggacgacacctccccctactggtggatcatcaaagggcccattgtcctctcggtcggggtcagtccctgggccagtgccctttgctttattcagtcaacttccctggaactactgacgggctgtgcacagcaggaaatgcaactccaggctgggtgtcttgaaaactgggctccagccttgctctgccactgattctctgtgaggccctctctgggcctcagtatcccattggtaaaactagaggggtggtggtctccatcagcatgcaggctgttccagctcaattttgatgagcctaatgtgctggttgcagatcatttaccaccacagtgagagactaggggtgccgggtgggggcagtaaatggagtctgcagctaaacccctctcctccctctgctctcacacacaacacagaggcagtgaagactgctttgcatggctttggtaaatgtacaaatgttttgcaacttagcaactgtgcaaagtgagggacatctgctttgtgctagagaagagcctgggaggtggctggaggcaggtggcaaggcctgatcgccccccttgatcccaggacttggtccttctctgtccaatgctcaaatgtgggacccccgcccccccatctccaggctaccagttctggagcaatgatctgtgcattcattcacctgcacattctcacgtctcaaggatttaaattttctagtccccaaatgggctggggctcaccccagccacccaaggctaccccctgacccttgtcttccaccttcctatgcctctatttccaggtgaactttgggctttttctcaatattatccgcatcctggtgaggaaactggagccagctcagggcagcctccatacccagtctcagtattggtactgtgtgtttgtgtctggggatactgggaaagggtaactggagggggattcaatgtgtctgtctcatccaataagcactcatgacctcagccccatactctttcttccctatgttcccagagacagaatagacctggccccttccttctaggggatcacaatattggaaggatgaggactccaaacagccagctcccatgccaaatagaacgatgagtgctgggatcaatttctatgggagcctggggagagggatcctttctagttgaagggtggtgtggtcaaggaagacttcctggaggaagtggttttgatccacactttgaaagatgcatagactttgggataaactggggcaataacagttggtaggggaatcagcaggatccagcgcccagaaataaaaaagcccagagtgattgtggggaggtggcgtttcccaaggtggctgttccacagagtggatatagggaggtggtaggaagtgagaggagatgaagtgcacacgacagtttctaatcccagtcttgggagcctaggatttgtctttcctgcaggcgtctctccaagtcgacacttttcctgatcccactctttggaattcactacatcatcttcaacttcctgccagacaatgctggcctgggcatccgcctccccctggagctgggactgggttccttccaggtgagggcccccacaggcactctttctttccattgagggtgctggagggaggtgctgttgcccacgggccttggctgagttcatgacagggtgagggctatgtttttcatccatctattcaaatatctgtctgtctgtccatcttccagccacccatctacgtattcaactacccatgcattcttccatccatccatccatccatgcatccatccatccatccgtgcatccatccatccatccatacatccatctacccacccaccaacccatccatccatccatccatccactcacctaaccacctacccacccacccatccacccacccattcatccacccacccacccatctatacatccatccacccacccactcatctatccatccatctatccatccatccacccatccatccaatctattcaactcttactgatcccctattatgtgccaagtgttgtgctcattcacaagggatgcagaaataaagtcagagaaatggggccaacagtacagccctggcaggcttgctatgacaattctatgacaatatgcctggcacatagtaagtaatgaatgcatttaaattcccctttcaatcaaacctggcccaagccatagcctggggatgagtagggaaaaggtagcagaaagacggtggacaccttcaggccaggccaaagggttctgatggggtctttcttctttggacccacagggcttcattgttgccatcctctactgcttcctcaaccaagaggtgtgtgatttttgaggctatccctcatggagtccccctcccaccagacctaaggcccctcctcctctctcccactcaggccctgtaaaccccagctcaggccacaccttcactcttgtgagcttttgtggtagtctgtcctgagcttctggatcaagctgaaccggaatgtttcctgtaaacatctcttatccatccttcctctgagctgggccaagttctactagctactcttcaggaggtggaggaggcctttcagggataaggagggggattagggtagggagtcagaaggaatcccccaattctgtgttcctaaaattgaacaaaaaggagagttggggagggggtacgccagctgagggagagacaatcagagagaacagatagaggagccaagaaagtcagaggtaaacatacagggaactaggaaaataatcagatgcagagacaaagaggaagatctggagcccaagaaacagagagagcacctaaagaaaacagacacacaaagagagtggacagaaggggagatagacatgaaaagacagaacagatggtgctgctgcacatgtggaaacgtggggacacgacagagactgacgcaaagtgaattccacccaggagacactgaatttcccccttaggacagtcctgctctggggagagaggcgggggagaattgatctcaatgccccggactcccaagttccacctttgtgcacctgcagggccatgcgctccctctgctggccatggatttgccatgggctctgcattctgtgagagttggctgcagatgccctgtccccttcgctgtggagttttgctcccatctcatctgccacctctgtcccttactgctccttccactctccctctctttattcctcacctgacctctctaagtcccatgcagccttatctggtgtctggctgtagcagaccatgggccctgggggtcctgggaggggcaagaagcatcccaggctgaggctggtggggtgtggaaaaagtgtttccacagagaggtgtgaagggagctgtcttgggaagcagtgccggagaccaggtggttacatacctctggtgacagtgagcttactacatcccaatagctctttctgttgtcaggcagctgtggaaagatcatctttatgttgaacagatatctgattccttttatctttcaccacaaccccagttcggctctactgcatgaggcacattctctcagcaccctatgcccctgaaagccccttggagatgtgaagatacagacagcacccccaccccccaatcccaccgttccatcttgccccaggctacttttcttttacttactttcagtttcctcaactgcaacccctcagacagagttctgaatcctctctcccttcaggtcatgtcctctggacagatttccagtggccagagttgagctcacaaaattgaatcccagagcaaggagtggtctaagtgattaagagagaacagggtggttatttggccaggaactcaagaaagcacctataaatgtctttaactgggctcagacaaaggcagggctaaaaggcagagaaaggagctaaaagaatggtgagaaatactcacaggaaggaaaaagtagtatcctccagaggtagtacttagcagtacctgttgccaagcatgacttttcctgccccatgtctctgtttctcttacacggcctctccctgcaccttagtctcattggggttgagtagcaaagccacagggggaccttcctaacgtcctcttccttgtccctggaggtgaggactgagatctcacggaagtggcatggccatgaccctgagcttctgccagcctggaggacccgtgctaagtggaccacgccttcccgctcggcggcaaaggtgctgacatctatgtgctaggctgcctcatcacgccactggagtccacacttgaatttgggcagctaccacgggtctgccatgctctggaggagcaagggggccacatccccaccccagctgttacccagcccggggcaggtgcagcccttcctccctgtctctgcatctgactctcttttgaggtccctgtatgtctacctctgacttctgtggtccctctgtgtctgctctcatccattcctcttactggggcctggggctctagcccaaggctcagaggagccaataaacctgtaaatgaatagacgcatgtttgagtgagtaaatgggcctttaaaggggagcgcacctgcgttctttatttagacgtctggtgctgagttgcgttcatcattcctcagttcatgctacattatgattatttatctgtgcaaggggcctcttgttttatttattcttaaaatgtactctcttttgccttcaccactcccattcgcctcctctcacaggcaaagagagcatgcttaatgtgaatacttgtgtttctgtgtgtcttgcaaaatacgtggtgttttgtgtgtctgtactttaatttacataaatgctgttggtcatatgcctcatcctgcttctaacgtttccccctcagcactgtgcttttaagagatgctcccggggtggacgcggtggctcatgcctgtaatcccagcactttgggaggctgaggaaggcagatcacctgaggtcaggagttcgagaccagcctggccaacatagcgaaacgctgtctctactaaaaatgcaaaaaattagctgggtgtggtggtaggtgcctgtagtcccagctacttggtaggctgaggcaggagaattgcttgaacccgggagacggaggttgcagtgagccgagatcacgcccctgcattctagcccgggcgacaagagcgaaactctgtcttaaaaaaaaaaaaaaaaaagagagagagatgctcccgtgtttccctgcatacatctggtctgtcgttttggctgtatgtggtgctgtgtagagtcatcacccacgtgttactgtcctgtcctgtctcccctgcactctagtgaacatgcacatgccggtcccctccaggatctgtgagagtgagcctctgtccgggactcacacccaggaggagcagtgctgggcatccgttatgccacctgttgatgtgattcggaggtgccagattgcatgcttcagttctgcactcccactagcagctcttgaggtccctaagtcccacagccccaccaacacttggcattacccagctttgtaatgttcaccagccaaatgggtgtaaagtgccatggcactgttgtcctaatttgcatctccctgatatctaatgggtgtaaacatctcttgctgtacccgcttgccttttgggtttcttcttctggaaattgcttgagtctctttccctattttcctctggagtggagatgcctcaactccaggtctttctcttacgtcgtccccattgtgtgccctcctgggtcccagcatactgcctgctgtcccccacccaactgaggactcccttaatgtaacacatctacatagtctgtccctcttccaacctccttcttggcagcggggaggagaaggagacccaggctctgtccgtggggacctatttattgactgacagtggtggagggagattccagtacagagaataggcctactcgggctgatcgccaggtgccatttgccttgtcctggtccttgcctgggtgcctctcttctctgtgatcccctgcatggtggccctctcctctgcacggaggatctagcttgtcctccatggcctgcctggaccaggtatcttttctcatgcactgggaacagaaggagtaggcatcctttacctgtgctggctcacaagtgtgtatctggtggacgcagcagatggacatcctccttccttacagtcgtgagagttccagggaatggagacacagctacatgaagcccaaggccacattgttgcccatgacgcccggctgcctggcaccttcctggtcagacaaatgtcaaagtgcgggcccagtctgaaaacccatcatattcagtctcaaatcataaaagtaattcatattcattgcaggcatttaggagatacagaaggattttttaaaaaatcaatcatcatcttattaccaagacattcaccatagatacttttgtatgtttccagaaagattttttttctgtgttttggaagtagcttgagattatatttgtaaaatttcatatgatttgtatgcattaaaacaatatacattatatatagatggccaataatcacttgaaaagatgttcgatatcattagtcattaggaaaatgtaaatcaaaaccacaatgcaatattgtttcatgtccatgaggatggctaaaaggaaaacaaaatagccaataacaagtattggcaagaatgtgtagaaattggaaccctcatgcattgctggtgggaccagagaattgtcaggtgctttggtaaaaagttgcacagttgctcacaaagtcaaacactgaattattcagaaaatccactcctaggtatataggcaagggaattgaagatgtatgtctacacaaaacttgtacatgaatattcataacatcattattcatagtagccaagaagtagaaacaacctaaacatccatcaacttatgaatgaattaacaaaatgtggaatatccatacgatgggatattagctccattatttctgtttgaggtaatgaaaagttctaaaattagatcgtgatgatggttgcaaactctgagaatacacgaaaaccactgaattgtacactttaaaatggtgaatgttgtggtacgtgaattctatctcaataaagcagttattaaaaatgagtaaatgagtgtttgctggagaacatttgcagacaatttttccgctacataatttgaaaagtctatataatattatttatttagccaatagttatttaacatattttattcgtgaaagtttctgtcgattttaaaaataaatatttattacaaaaatattagctaggcatggtggcgggcacctgtagtcccagctactcgggaggctgaggcaggagaatggtgtgaacctgggaggcagagcttgcagtgagctgagatcacaccactgcactccagcctgggcgacagagcgagactccgtctcaaaaaaaaaaaaaaaattgtgatgataaacttccttgcatacatttttttcatgtatacctcaaaaagacaaaaacttaaactcctagaccttcagaataaattatcctaatgtggaagaatgtttgaaccaatgcaatgcacatgataagtcttttagtacctgttggcaaattgcctcccagaaaattggtctagagaattcttgcacaaacaatataagtgttacagtttttctgcattgttattattttttgagacagggtctcacctgtagaccaggctggagtgtagtaaagtgatcacagttcactgctgcctcaaccttctgggctcaagtgatcctcccgcttcagccttcccaagtagctgaaactacaggcatgcaccaccatactggctaattttaaaatgtttttgtagagacagggtctcagtacatattgcccagtctggtctcaaacttctggggctcaagcaatcctcctgccttggtctcccaagtgctggaattacaggcgtgagccagtgtgcctggctggcatcattatatgtttctctgagttttaactggtgttagcactgttagtaatggtgttagcatagtggtgatagtagttagtgttagttagcttggttagtgctctttaatactagttgtgactaattttagtggttagcagttggtagagttagtggctagttagtggttagcattagttaatgttagtggttagtgttggtgattagttaccagttagtttagcagctagctgttagtgttagttaatgttatttagtggttagtgttactggttagttagcagtgagtagttagtggctagttagtgttggtggttcattagtgattagtgttagtggctggttagcagtgagtggttagcgttagttaatgttagttggtggttagttagccattagtgtcagcagtgagtgtatgatattggcagtggcagaagcagctcactctgtgaactgtccatccctcgcctacaggtttcacaatggctgcaggttcaccacttgctcccttttagtttcaactggagcctcaaattcctatcacttctcttgtctctcccatgacagggattcgcagactgggcctacgatgcagattcctgggcagatcctttgactggcaagctcttcctctctcaggactccagcttccacaactgagcgggggggtggggggagttgctcaggagatgatgtctgaggacgtctcaccagggacactggatgggaagcaacgagctaggctgagaagcgcaatgatcatcctggccaccaggtggcagtctaactgcagccaagagccctggctgggccgacggtgctgcctgcctgagctgacgctggagatggacgcaggaccc

SEQ ID NO: 730 - protein, 476 aa, Homo sapiens
MDRRMWGAHVFCVLSPLPTVLGHMHPECDFITQLREDESACLQAAEEMPNTTLGMGPRRQVVASLIPLYPPASPLGLLGQPCTWAESLLLLALYPGCPATWDGLLCWPTAGSGEWVTLPCPDFFSHFSSESGAVKRDCTITGWSEPFPPYPVACPVPLELLAEEESYFSTVKIIYTVGHSISIVALFVAITILVALRRLHCPRNYVHTQLFTTFILKAGAVFLKDAALFHSDDTDHCSFSTVMAMGEGAGQVLCKVSVAASHFATMTNFSWLLAEAVYLNCLLASTSPSSRRAFWWLVLAGWGLPVLFTGTWVSCKLAFEDIACWDLDDTSPYWWIIKGPIVLSVGVNFGLFLNIIRILVRKLEPAQGSLHTQSQYWYCVFVSGDTGKGRLSKSTLFLIPLFGIHYIIFNFLPDNAGLGIRLPLELGLGSFQGFIVAILYCFLNQEGFADWAYDADSWADPLTGKLFLSQDSSFHN

SEQ ID NO: 731 - DNA, 35135 bp, Homo sapiens
  source (1)..(35135)
  CDS (201)..(639)
  CDS (10360)..(10481)
  CDS (11997)..(12102)
  CDS (25906)..(26028)
  CDS (31306)..(31415)
  CDS (31902)..(31999)
  CDS (32475)..(32607)
  CDS (33548)..(33747)
  CDS (34791)..(34935)
aggcaagcctcccagatctgaaatgaagccccctcccgccgctgcgcccttcctgcgcgtcaggctgacaccccccaacccaagtgtctggcgctgcgctcggggcggccgatcgccgcagactgccggggtgggggtcgacctagctatctcacgcccctcctgatgcggagaagggagaccaggggggcaggcaagccatgcggccggagggacccggagggacatgcctccctacccttaggtggacggacgcacctacgcggatcgggaaggcagggctggagggtcccccggggctaggtaccgcaatccgcacggggtttgaggggtgggcaagcaatgtgctaggtgggggttggggtaggggccagtgtagaatgcccctctgtggtgacacatccgggattgttcaaaagagtgtcgtcttcgtttcccgtggcgcggaggggctggggttggggatgccagggcttcagtggtccccagaagaaacgccctgcggggtctgtggggaaacgcaccggccttcccaggttgaagtgggcccgctgagacccctgcctgccgctttagaggcagaagctcctgcggcggctgcggggggcggaggccacatcctcggcgggaccttggcaggttagggggctcagaagggacaggggagccgatggatgcaactagaccctcaggagggaacccagccggaagccgattgcatttcacgtggagctgaggaggggagcctcacccctggatggagctcagcccctttttggaagatgggggtggggtggtggacacctgctaattcttccgaccatttttatgtttttgagtgcaggtgcgtcagactccctttatcttccccagccttacaatgtcccgcaaagcccccctggccctctccaagacacagcatttggctcttcccatgagcggccctggggaggagttgggggatgggaaggggctggacgcagcatgtggagggcaacttgccctgggactgcagctggccagaggcagacaagcatcctgaaggtcaagctagaagctttgagtggcggtaggattcccaagcagatggaaaactatgtttgagcctttgggggcaggggcagcaggcagcacccaggttttctcaggagacccccaattaaatgagtttggtgctgggtacaagtagcactggtggagtccccagtcctaagctaagttctgctcctcactgaccttggggagggcaggcagaggcaccagcttggacacaagccgaaatctgaacatacagattggaggtggaacacgctgagcaggccctgggccagctcttccaactgatccatcaacaagtgtgtgtggggtgacgatggaggcgggcctgatacttttcctctttggccatgggtggttcatgggtggttgggtgtctgggacaagacccccaaaagtctgtttgtccccatgtgtggtgaggggaggtgtctgtggggagcctctgaaaggatccctctcctgcactctcgggactgatctaagctaaggggtgcattaagtcctgttttgtataaggttcaggctggcaggggattgattggagaaacactttgggacccatggcttttcacatggccacctctctctgttgtgcgtcaactttgggacactccctcaatttgtgtcgaataaataaatacacacatgggagtttatagtatatgtggctgagaggctaggaaagctaaggccacagggtggcttttctcttggggacagggcttaagctggagtgtcccaggttgccgccctcccagggacaagcatttcattgacctggggctggcactgattaagtggaggacatcttgtgctgtctgccacagggcagaaccaaggtgtgccaagtgcagagccggagcttagctcggtgccaggaaggccttgcttgcctgagacccacccaccatggggctgacactggaggtgacaatgagtttcctgtcctgggcaggtttgtgagcagagggatgatgccccagacaggagctgccaagtggctttccaccctggaaggcctagaggcctcagagaccctcagccttccctgaggagaggaatctgattccagggtctgaatgagttgggcttagtggtccagccgcctggcaagatggagactggaaactcctcagctgcgacgtgtttgtaccgagctctggatgccgtcagaggcaaatggtgacagccacccccacagtgacacacagagagggaatgacacacagctgggacggcatataggctttctatgacacctgccagagagctggggcacaatagtgacaagcaacaccagaaagacaaatggacgttgagacacaccctctcacacagatctgggcacacccggggactcagagatatttgcccaaagatcacaaaggtcttcattaataaaagtccagctgagtattgaattgaatggaggaaagtgtgtgtgtgtgtgtgtgtgtgtgtgtgtgcacgcgcgtgttgcataagcctagaacaagggtaggcaacctttttctgtaaagtgccagatagcaattattttacgcttgtgtccatatacaactacttaattccactgtgtagcctactgcagccttagatgatatgtaaacaagtgagcatggctctgttctgatacattttatttatggacactgaaatttgaatttcatacattttgcctgtgtcgtgaaatatgattcttttaattctttccaaccatttagaaatgtaaaaagcattcctggctcactggccgtacaaaaataggctacaggctggatctgactggctggaaggggttgccagctcctgcgatgtaaggttaggaaagataaataaatggtcagagaggttgacaaagggaggggcttagctctgatagctgcagatgcctgatggtacctaggatgcttcgctccattctacgtggagctcagagtgcccatctgtttaatgggtcaggcctaggagagggtccctgcctggcctcagcaccctcccccagattggcctctgctttgtccctgtgattgattcccccactctaaagacacctggagacaacattcaggactgaaaaactgactgctgtcacttgagcttgccaaacagttcctgagcccccttcaccattcaccctttgtgtccaagtctgtgcccatcctcatgggtggggaagccacacggaaacctgggcatgccccttgtttctagacaagactcgaaactcacaatgaacatgatgagacctgaaacagctccaaggagaggggctccttatctcagggctagggcttctcagtggagggcaaggtcataaagggcgggtgctgcctgagtgggcttcctggaggtggtggtgggggtttgagttggccttggaggatggctggacactctcatcccagctctccgcagactccatgcattgccttagctgccctcatctttctccctcctgatcgatgggcactgcagagggttggctgagacaaacatatatatatccttcctaggcacctctgaacttcccagctgctgatctaaggcctgtggacttgtgtagtgaaccaggtcctgccttctgtttcttcctttctctactgcctcctcctgaaatttccttcctgccacctgtggtgggggtgggccaaggagacacacctctctcatttttccgtgtctctggattctgtcccccactttccatcccaaccgccttcctgctcagcttagtcccccatcacctctaccctagatccgggaaagggcctcagggtacatttctgcctgcactttcccccttcatctctgctccccagcctttgaagggatattttctaaatgagaagctgatcactccactccattgcttagaactcttcattgccccacccctgtctggtggaacaaccctccagcttccacagactggcaccagccctccaccttctcatccacctcatcacctcctgatatcttgttgtgttccttgacaccctggaatcaccttcccaaatccatccagggggcgctcatccaggttttctgggcactcgtgtgtcttgcctgtgccaggtgctgtgggcacacgcacgtcagagctgggctcatgctcacttaggagaggctgaagcttaaccagcgtctgcacaaagggaaaggcgctcagtgcagagctactcctctccacaccacaccccctgccgggtaggtgctcagtgaacatttccacaagcttgtgcctccctctggccaggcttcctgttctccttcctcccctccctcctctcattcgctccgtcctttcccttcctacctccctcttctccccgcatttatcttctgccttcttcctccccctcctcttacctggcccagggggtgcactccctgactcctccaggtcaggagaggtccctgcaccatccagtatggaagagaactcctcacaggaccctgggaaggactctgcagcatgaccttggggaagtttcctggtctcctagggcctcagagcctcaccagtgagatgggatgatactgccaacgggcacaggtgccccagcctggcccttccttgctttggacctggttccctacccaagcttgtgcgaaatgcagggcatgagtgggatcatcactggggcccctctggtggcctgactcctgtcaccttgtcacgcctgccattgccgggaggcccctggcccaggagtttgtctgtgccctttatcagctctggtcttgaggaggaaagaggttctagagggtttcccctccttccctgcagcagcttctgtccctccctttgaggggtgagtgggaggggggcagtgtttcatctttcagccttctgtcccttgttcctggccctaggagggagaggaggaagtaggggcggtccagctcccctgtcatgagtaaatggagcacggggagagcagggtaggcgagtgatgtacttagcctggccatctcctttctggtatccaggcttgtcctgccctctgatggggagggatgctgagtggccagaagattccagtaggaggtggcacagatggccccagccccatgatgggcagatgagagtcccagggctgtgtggcccaaagaagaggtggggtaggctgtccacacacccctgtgtgggcttatgtgaggcagaggaaactgtgctgctctgggctggttgggaagggcacagggacatcagagcttcccactgtgggcctgggccagacgctggagtggggcaagtgtccatctcaagagcagagttgccttcagccaggggaagcagaagggctctgccaggctttggacagtacagggatggctggagggtctctgagtcccctctgcacggagatgtggaaagtcttcgagcccagtgagtcaccgctcgctcccatgtgctgcctgatgatgctatcctgtgtgtgcaggggccaccacttcctggtgcagcgactcagaggaggacatggctgctgtagtcagtttcactccaggttcggtggctgggcttatgaggcctgaggaggaaaggggaatggtgtgctattgggatccccctgaattcccttacagtccaggtatctgtaacacatcccattcctgccaggcaagcctccaggctctatattgtgtgaccttggaaagtgtgtcgccttctctggcctcagtttccctatctgcaccttgggaggtgggctttaaagtctatttcaggtctgaaatgttgtgtctgtaactaactcttcctaaggaggaaactagatatagatatgtgaatgggtgtagtggcggacctgaccagcccctggaggtgtgtgtgggggtccctactagggtaccagtggactctgaactgatcttcatttgaccagtaagagagggcagtggaagcatagggatggagtgcaccaactttggagccagactgcttgggtttacttcccagccctaccagggacttgctgtgtgattttggggaagttgcttaccctctctgtgtgtcggtcacctccgccatagaaggagctaatgctagtaactatttcaggcaggttaaatgagttaacacatgtttattgcttggaagagtgtctggcacatactaagtatttaataaatgttagccattagtaaataaaagcacaggaggcctgctattcccattttgattgtgacacggtgctgtgggggtggaggtgacagcaacagggtacaaaaagtctgaacacaaagtggtgagataataataatagttaacacatgtatagcccttactgagtgccaggctatagtatatactctatagtttctttgtataaatttgctgatgcctcactgtaacatctatgagatagacattaatattattcccatttttcagatgataaaaagaaggcacagagaagttaagcagttttcccaagctcctggggcagaaacctctggcaaaatggtcccaagtctgtcatactaaatgccaggaggtgactttaatcatcctcaaaaactatctgccccaacagagtctggacccaagagagagagccagggaatatggagtgacccattttcccatcctgagccacttttgtggctgggctgaaatccatcctcagggaggggagagatcaaccctgggctgcagtggtggggcttggcctgtcccttgagggtgtcactagcagcttgggagagtctggaggaggaggagccactggcagggctggggtggccagcaagtgaggggaggcatcttagagggacactgcagagaagcacttggtttggggcaggcagcctaagtctgtaagctctgagcgttgtccagttgggggcagtgcagggttgcggtgggggcagaagtgcctggaggggctgaaaggattaccgcccagagaggggagaggctgcgggaggtgatccctgaggtccccagcggagtcgaggcctgggagctcccaggttctctctctcctcctctttgctggcgggggcgtctgtgtccagttgggcagggggtggactgtaatgggtgtggggaccaagagaaggtaacagtgggaatcaagaaccctgggtctagttccagaagaggcaccctattgagagtgccccagctcccttaccctgggtcactgggctggggacacacctgtctcctagtaagcagcctggcgatgaagcagagggctgggggtgggtcggggctggggcctctgctggagcttgtcttcagtccaccgcagctacagctgagaagctgcccttcccacagcaggggcgaggcccctgcaagtctgggcatccctgcatgtgtgcgtgcatgtacacacatgtgcatgtgtgcctatacctgcacccatatctgaatccaagtatatcttattgcctctctatagctgaatgcctttgctgagtgagtgtgtgtaagcgtgaattgttctgtatatctacagtctgatatgtgacatatctgaatatctgaattgtcatgtgcttacatctgcacatatctttgttctgtgtgtggtcctctatgtgtctgtgaaggagtgtgtgtgtctgtgaaggagtgtgtgtgtgtggtgtgtgtgtgtgtgtgtggttgcctgtcggtccctgaaggaatctccaccttgtgtatccccatcatgggagtttgtattgataccttcaagtggtggccctggggataaatgtctctctttgtctctgtagggttgacatgtctttatgatcatctctgtggacctatttctgtgtatttgtgtgtgtttgtgtgtgtgagagagagagagaaagagagagaaacagaatcagaaatccaccagtcctcaaaacacaaactcactctctgtctatttgctgccaccggctcccccaccccaccagagctgttcaaactcctagttcctctgtgccagctccctgggttctaataaaggttaaaatagaggctttataattctagctatacacgagcatcacctggagaactttaaacaacactgctgcccgaaccacagctgagagcttctgattcatttggcccggggtagttgtggaaagctctgatgactctagtgggcagcccaggtttcatactggggtcagaggttagggctttgctggggaagcagtgagtatctgctagggggcagcccagtcctaaccggggtagtgctgctgccacctcaacgtgttgctgggagcaaggagctctgttttcacctttttggcctgaggtcgcggaaggtgcagggaatcgacgcctgatcttggaggctctctgccttgcaggatctgcctgcaacactctgctggcctagagagatggcctccagcctctgtcactggtgccagacactcctccctcgcagccaggcaagtcaggagggttgtctctttgcaggcagagccttgggttccccagggctggtagaagtgaccaagccctttaggggccaccagtgctaggtcacgccagaggcagcctgtggccaccaggggcgtggcaagccctgggagctggtacagagacggaagcctgagtgcctggtagagatggtgcctcagggtgcctagaagtgctgaggccagtgcttgcccagcctgccctgtcctccctgacccacaggaggaggctgggccagtgttgccatggctcccaggcttctcggagcatctcttgggatatctgaggcctccctccccatctctgcataatatggggagatgggggctccctctttttgagccttcctgcagctggttttatttctgctttttggatgcctgcttatctccagcttaagcttggagaggccctgtgggaggcaaggagagagggaggggacgtggttaagcagagagtgagggacacaaagacccctggggtgcagcagctctgcctgctggtgggggggtgtgcgaagactaatggttgggatgcacatgtaggatttgcttgggccccccatggcctcccgggccaggcacctgtgggttagcagtgccctgatatgggcctactcaatctcttttataataatttaatagtaataataatttttaaataaccataaccatcgtacagctgaactggagcctatttagcagtgcctgttgacggatgctttgctgtcccattttttattgttgatgctattttaaaggatgctgtggtgaatgtgcttgcatatgcttctttttgtccaattgcaaatatttatcagatgcagaattgctgtgttgtagggtatatgtcgtaatgatcaattttagaagcagagtatactcttcccctgggagcgtgctgggctcttgcagcctccttttttgactccctgtaacctgtctctctggtccccaccagtggccccagtccttgcaggcctgcccccttggagctcctgcagctctgaggcctgagcacatgcttcacctgtcaccgtgttttccgtgtcatggtttaagacttcatcccgaagatgaagtagagtgaggtagggcaaaaagtgggtgtaattgttagggtaccaggccaggcagctggaacaaagaggccttttaagggggtaaattagctagaaggtggtttccctctggcgtaacagtctggggctaggtgggcctccaggcaggctgggtggctgggctccacgaggttgcttggcgatcctgcctcctcttgcagcattgcgccctacccactcagatacggttcacgtccacactgtcaaagtggggtttgttatttgggaagggttaaagagcaagagcagagatcatgccatgccctcatgcacagagggtgcagatgggaccacatgctgccactcacattccataagtgctaataacttcatcatgtgcccacacctccaagcaagagataccaggaaatatcatctctaggtgagcatgcatgtgccagctaaaactttgtcactgtggaggagggggaaaatgcaaaggtttggggaggcaatccctctgttgccaaggagaaagccattccagaccatgccaggagactggtggagctgagccagtgtgtgcccacagtatcgccagcacctagcacagactgagtgcctagcacatgtttgcagggcagaagaagaaagagcaagacggatgcaggcagggaggtggggttatccttggaggctgagagccgtgctgcagggagctgggggaataaggaagggaggtggtcttgcccccggccactgcactgggctcacaggattcacacctttccttcctctctagcccagagacacattggggctgacctgccgctgctgtcagtgggaggccagtggtgctggccaagaagtgtcatggctggtgtcgtgcacgtttccctggctgctctcctcctgctgcctatggtaagggcccaggaacatctctctgggagccccaggctcacctgagtccccgctccagagaactcatgttttttctgtaccctcagctcagctcttcatctggctggtatttctgccaacaccaccactgggccacccagtgcctttgtgtgaatcagaaaagacatgccttcctcaagaccctgtactgatttgaccagaaatgattacaaaatttacaaatctttatgatgcaacctttagagttgcacagtacacaacctgctcaactgaatgcaggagccctggtcagggctgcagaagcctctttcaattttctcgtcaccagcccacaatgccctgccaggatagaactcagaagcctgccccctgctcaggtctctccctgagtgaaggtggggatggggagtgagcagaggaggactcccaggttttggtcccgccactctacctgagagttcagagtagcagtgggtgaggctgtcctcagaaccctgggtaccagtcctgcctctggcctgactcactgtgtggccatagacaagcctgtccctttccctgagaactgcctgcacatctgtgaatagtagggattggactatgtccccaaaaatggcccttggcaatcaaatgccttgtgactgcctccacacttgctgacatccccctgggaaccatccctgccctggggttttgagttaaagggacggcatttggcagcagctgtcatgatagcagtgcatgggctgtgaagttacttggtcctgaacttgaagcccatatctgctattaaccagtggtataactttgggctggagtttcttaacctctctgagccccagtttctccttctgtaaataagggtggcgagtaggccccactaaatagcagcactgctccttagcctgcagctgccgggggcacttttttcctgagttcctggagaagagagaaaatgagctttctcagcctgacttctcccctaccacttgttttctcctctaaactgcagtagtagcctcgtggctgctagagtcaggcctcctgggttcgaatcctggcttttcagcctactgagccatatgactttgagcaagtgacttaacatctctgtacttaagtttccacatcagtaaaatggaaaatgataaaaatagtacttcatagtactctccagatccatacacacacacacatatgacactcagaataatgcatgcacagagtgaagtgctatatgcgcttgctaatattattataagatgtggaaactgagaccccaggagggagtgggacctgtccaaagccacacattgagttggtgactgagaagagcccttatggtgtctctcaaggtgaatgtcagggcccctgctggccctgacatctcttgtcaccctcctctctgcttctgctccccactccccccaagacactgcccctggggctttggtaggagagcttacagatgggcctcctacccgctcccaccatccatcctgtgttctcctacaggcccctgccatgcattctgactgcatcttcaagaaggagcaagccatgtgcctggagaagatccagagggccaatgagctgatgggcttcaatgattcctctccaggtgagcggggcggcagggagcatgccacgtccccagtgccagcttttagaactgttttcctgtgctcaggctcggccagtgagtggtcaaggtatgggtttctggggacttcagaaggccctcgagaatactgatgtcctggatctgctctgggcaatgatgctggggttgctctcctcaaggctgatgtggtctggatgcctcacagctgttctgggtgactggacatggctgccttctctcccacaggagctgggatagcactggtgcctgagctgggcagtggctgtcaagagcttgttagcaggcagcatgggcctggtggcagcagggacacagctattgcctgtggctgagctgtacagcacttggtcaacccagggcaggaaacgtggggtcctttcccacctcttctgctcattgcatcagaagccagagaagaaagcagcagcaggaacttcagtcttgaagacttgggtacaacgcttctcctggggctgcctttgaggagggtcctgcttccctccactggaggaagcacacattgcaggacattgagcgttcttagcctctccctctaaatgcccataacgtccccgatcccaatgacaatcacaaaatgcctcccaagatttcaaatgtcccaagggagtggcacgatccctggtaagaaccagtggccccatcgaacccctctcctaactctccattgtgcagatgggaagctaaggctcacagagcaaaggcgccctcagctcttggcctcaggggaagttggggatttaggggagggggcatcacagaggcctctccaacctcacttttgccttaatcgttgaaggactggctccgtgctgcctaagggtagggctctctgctcaggctggagggattcattttccttctggatcctcctggctcctctgagcaccatgtatttaagcacttgactaatctgcagcccagttaaatggaatggtcccactggacggagctgcccagccagttgcttctcagtgagcattaactggtgagggagctactctggaccgtgccggcctttgcctccgctgagctcttgctcagccctaaccaaggttgaacgtggattcggggccccaccagtgagggaaactgaggcagggggccagaagggcacacagttggaggagacccaaagaatatcccaagaatatctggtccaagtctctgtttggaggatgggactgccgagccctgagggcagggatggtgtggatcacatggaggatcaggctgaggtgggtctggaacccaggtgtcctgctcccaacccagggccattgttcctgcattgcgtgtctcagatacatttggggttgagcgacaaaatcatccaggagggaagaataaaggtaggggctggggtgggacagggacctcggtgtaggctgtgtgcagtttaattgctcacctgcttgttgaactctgggctgacagggcaagacaggcctgtccacagggatgtcgtggcagagaagggagatggatgccaggctggaaatacagcatccctggaagggccaggccagtgctggggaggaggtctcacctgcaggtgtcctcaggagaggaagagatgagttctttgtgggaaggattcatatattgaaactggatccttgcttcttaaacctggctgcacatctgaatcactggggaactttcagaaaaacgtactccagccacaatccaaaccaattaaatcagaagcttgggtctgtcatagtcaccatagtttttaaaagctccccaggcgattctaatgagaagctggtgttgagaacccttgagctaggcccaagggataagtaggcatttgaaggtggtggagaattgagggacagacgaatgggtgaacactgtaggctgaggaatccacaagaggcaggagcctggtgtttttggcagtagtgagtaacctcctgtatttggaactcagtattggagcagatgggttgggctattgagggggcatggctgagggcccagggagcagatattgtgtatttcatgtcatctccactggagatgaaggtgggggaaaacagtggccggctcccactgagctggcatctctgcaactgccccaggggctccacttgtgccctctcagggaccttgtgagtcagggctggccataggaggtcagggtgtgaaggattctccaagaattgagtgaatagctctcctttaaccctgtccaggtgggagaggaggctgcaccctctcacgatctgctaaggagaggatccctcatctatccctactcgtcccctcccttgaatcatagggtggggctttataaaatagagctgagctaattaagcagaagcaaagggcagccattaggtgggaaagaggaaaagagtaaaggcccagttggaccaccaactccatgaccctttcctgctctgggcctcaggagcttctcttttaaaatgagtggagtggggtggatcatgttaatagccagaccctctatagacttcctgtgtgccaggctctgtgccagcacttcattctatcaccacagcagctggagggtgggggtgggtctattatgacccctattttatagataagtgaactgaggcacaaggaggtactttgcttaaggacatagtccattaagaggcagaggcagcctgtaccctcaactgctgggatgcaccacctctaaagagtgacatgctgtgggtcccagcacccccccgggcgcagcaccagccatgggatctttgaagggcccttaacaccttaattttcatgtctgaaaaatggaggaaaaatgatacctaccacataggattattgcattaagtgataaaagcctgtgagaagtgctaaggacagcgtatgggatttactaagcacttaactaagacactgtagttattaggagctgtcatcttggagtgttgggggtttccagggctcccaccttctgctacatcccagttcttctggggagtagagagacatctctaggaagcaggtcagcgccacttggaacaatcctggaagcccctctggaagagcaggggagaagttagggagcagatctgggcttcagagggcagatggagagtacaggaaggtggagagaagcgttccgctggggaagggtggaaagggagcagtgagtaaggtgggtgggcaccgtaacagccagcacttcaaggcgggcactgggttctctgtctctgtctctctcagacacgcacgcatgtgcgcgcgcacacacacacacacacacacacgtacaagaacgcatttaaccctcaccagcctatgggctgggtagagttttacccccacttaacagatgaggctgcttagacacagagacgttaggttgcttgtctcttacctagtaaacccctcagccgggaaggtggagccaagctgtgcatgtggatggttctggagtccgtgccttcacccctgggctgcatttgctgctcagaagaggagtgaggagacgccctggccctcagctttccccttgtcagggtgaaaggtcatacagcagaggcagttgcaatgaggctggaaagaggccttgggagacagggaccctgaaatgtgctccaggtccacccttttcttagctatgaaaaggccaaagggtgtttgtgtttctaaggcccaggagagaatgaggtctcggcctctaatgacttgcttgggaaggagaggggcaggccagggtgaggggaggcccctggggaggctgtcctgagaagcagtgtccatcttgctcactttggggctgttgtctgaagagcttgccctgcaggctgaggttgggggactcccctcaagggcctcaagttcagggatagcattgaccttgctgtcactcatcaggggaggccttactcttcccccattgaaccttcaagaacctctggcctgctcttaggggtacctggctggagctgggcttcttggctccaaattaaacacacttgtgaaagatgggcctctacccctctcatcatacctgcagcactgtagagcccccaggagcatttaaaggtgctgatgtcgaggcccctctccagaccaaagtcctcagcatttgggttgggggggtccatgcagatctgtgttaaaagcctccaggtgattctaaagtgtacccaggtctgagaaccactggccagagcacagcatccaccagggtactcaagtgatctcaggcagagagcagcccctcagggcccagataaaccaggctggggagctcactactagctgagtcaaatctgagcgtaccaaagaatcgacatctgtgcgttgtgttattaatccgtgccagtcctcctgctgcatctctttcctgcaccttccctgcccgggtggtccccaagcacacacgccatgcacagaacgctggccaaaggtcagctgatgtccttgaaacacacttgaaaaaggaaacctggcagcttgttccaatgcctgttgagtgtaaactcacaacagtgtcttttatctaggtttaatatacttgtatatattttgtgtgtctctcataattttttaaatctagtaatatgagtcaattggaacaagagccctgatctgttagttgaattatgtctgtggcactgtgtgtgtggctggggggctccagggggatccaggaaagtacttgtttccttcaagcccctgctcctcactggtcctgggacctctaccctaaagagaacctaggatggtgctgtgcagagtggccttcagagtggtagccaggagacagatgcactgaggggaggcacccatggtagcaggcagcttaatgggggtgaaaaatagagcccagagaggtggccgtggggagtgaaagcaagcttggagcctgccttgcattgtttgcaaaatccttggcatgttttaaaggtgtttattgaggagaggagggggtttggagacatagtcattttgtcccttgttccaaacccccaaatgctaatgggatttaagccaataccaagttggctctgtcatatgatgcccacagaggctgaggccagaggtggtggtcattggccaaccacattgggggccagagccagctctggggtgggatccaggtctgttatatcagacagggagtgccctttctcccacagtgctcttgtgaccagaagggagggacaaaggacgcctgtacctgggaattggcatctccaggccacacagcccccaggctccgttccttctgcagtctgcctgcccagaatgagaccagccagcatctcctctttgcagggctgcaggttttcatcagcccagaaaccttccctgcatctaagcagggttggtcggtgtggtcctccatgggggtccccacactctagtggaggaggaagaggaggcctgtggtggccatggcaggggcagcagagagcagacttggagggaggagggaaaggcctgctcattgctattctgacctggtctcagaggcctgcccagggcaccaaatgccttgaaccagtcctctctacgttcaatagaggggagaggccaagaggaaggaagcacatcagggctgggcccaggcttccccatccttagagcaggaggagcttcttgtctgggcctctcagctgctctgagactcaaaaggcatcaagcctgaggaaagggtggtgtctgcagggaccctcatgctgaggaacttattcgctgtctgacacagggtgtcacttctatccaaacttgtgtcttcgtgaagtctggtcattctaaaacttgaatatcagatcttctgttaaaacacagattgctgggcccacctccagaagtttctgattcagtagatctggatgaggcctgagcatctgcatttccagcaagttcccaggtgattttgccggtctgtggtccatatcttgagaatcactgacttccaaaggcgagggcggcatctttagtcctatgccacccccagcactcagctcacagtgggatcctcatttcatggaacagaaacattggccataaagtaaatttcggtaaattgaattgtttttacccttagattgcatgctaaaatggggaccttgttctaacaatacctgggcatcctcaggtggcttctcaaagggaggaccatggctttgcctgagtctctttggtgccctgctctatggagttttgaacactgtggaactggacaaaatcatcaccatgacaacccaggattagctccttattttgttccagacaaaagctaatagcttatgcgttctctttcagtcgctctgcctgagtggatccctttcctcctgctctcacacttcactgccactcctgggcactttataaggtcttaggtggaagcagctagggagagtgtacgcagcactccccgacccacccctgggcctgaattcctctccccatgtcccccagtgggggcctatacacagatggagccatgaggcttggagtgttgtcaggagtggagaggtctcacagagaacaggatctgttctcattttcaacctctggaggacgaaggggaggacgggaacttggcctgggctgcactcggccatctcctccctgaaacatgttttcctggctgctgtgtcccttgcctgtcctggttttcttcctcagtcttctttgccaaggccttttctaaatgctggcatttctgttggggcccggcctattctctcctgttttcttccctgatctttgctctctcactagaaaaaccatccatgtccgtggactaaatagtatccctgtgctgcctactccctgccctcttctccagttgctacttctctagactctagacttttttccagctgcctacttcgacagctgtctcctcttggctcttagcaccatctcaaactgaacataccccagactaagctcttgctttccaacttgcctaattcccccaacatctggttctcacctggccctttccactgtggtaaatgatccatccatccatccatccatccatccatccatccatccatccagccacccacccacccacccacccatcaatctacttgttcatccagacgctgaagccagaaacctgggagacatccttggtacctctctcccctgcactgtgttggcctcgactctgcagcagtaacaaatcaatcttaaaatctcagaaacttagcacagtaacatttcttgcgtgcatgtatcataggccagtgtgatcagcagaggtaggaggtggagctcaacttcacacagtcattcagggatccaggtttctaccatcttggaacactgctacccttaacatgtggccttcaagggtggtccagagaaggaagaaaggcaggctgtggaagcttatgagggacattttagaggtggattctgcacttccaccctctcaccattggcgtgccctcagtcatgtgatgtgggtgaacactaaccgtcttttgcagacttgccagccaggtccagccagtgtgttgccaagccctgtcagctctgctcccgactctgtctgacacaggactcctctccaaccctgctgccattgctccaaatcaagctttttcatctcacccctagactatagccatgtcctaacaggcttccccatgtctgcatgtctgctattggactatatgatcttccccacacaaccaaatccaagtgtgactccttgtcttaaagcctctctgtggtaggtcgaataatgcccccaccccggcctgagaggcccacgtcatcctaatccctgaaacctgtaatatgttactttacataacaaaaagaactttgcagagggaattaaggatcttgaactgagaattttatcctgggttatttgggtggacacagaataatcacatgggtccttataagtgaaagatggaagcaggagaatcagagaagagagacttgaggatgcaaagctgctggtttcaaagagggaggaaggggccatgggcccaggaatgtgggtggcctcttaactctggaaaaggcaaggaaatggattctcccctagaacctccagatgaaatgcaaccctgctgacaccttaattttagcccagtgagacccatttcagacttctgacctgcaggaatataagatgatgagttgtgccattttaagacagtaagtttgcttacaaacttacagcagcagtagggaatgagtacaccatccagtgtcatctctaaacattgagcataaaaatctaaaattattaacacaacccactggactaagagctctgtgaaggcagagactgggccctttctattcactcttgtattgctctgcattgtctgactcggtatgtcttgaataaatgagtaattaagagagagagggagaagaaagtgggaagaaaaaaagataaaaggaggagggggagaagaatgacaaaaggcatcttgaaatcttccagtctcaacaaaatttagctttgttgagactggagtgtggaacatatgggtctgtagaagctggacgtactgtgtgtgagtggaaggaaaatcagttgctgtttttagttagaaaaacccaaggctgtctcaggagcccaactcccatcctcccaagctccagggaaaggggcctggaaggattcagctccaatccgctgaggccagagcaatttccattcaaaagaggagaggaggtgggagcctgctgggtcctcccatctgtgctaggctgggaggtggtaactgcaagagaaatgggcaccagggcattctggggagccccagggaggcagctgtgagtctcttgagaccccagcaatgcaggctagagggctggatggaggccttcaagctctcgatagggtcagggacattgtctttgggtcctggggtcctgaggtctcattctaggtttcccacctgccctggtactatacgaattgtctttaggactctagagggggctcaggctggggacataagggttaccaggagggctttgagagctgtggaagatgcatcctgagagctcccaggccccggcctggggtggggcaccttagcagatgccctttaggcagctgtagctgccccagccatcctctgggcaccagtaggtcctgggtgaatctctgttccagatttgagctctggtcactcaaagctgggagctcacagagacactcagttgtccctgtgcacataggaaacgtgaatcatggtggagggggcggtgactgtcctgagtcacaagtgagcctgcggcggaaggaaatcagaactcaagttttggggcttccggtgctaatgctgagtagagacctgccgtttcccctcactctatcctcaaacatcaatttcacagctttgtctttttctccaccactggccctggtgcatagatggtccctggcacaaggtaggcactcagtaaatagttgttaggagaatgcatcccctgtcctgctgccaacatgagagcccccttctccccttgtgccacccgcccgacctctgcagccctcctcgccctcaacactcatgaccctgctcattcgctctgaagtggccctgtgacctcggcagtgtcagctggcagcagcagctggctgtgcctgagcctaatgttctccattaagggaacatctgttggctggggcatgggccagacgcagccatgctccacggccgttccacggtcaacatgggctgctgtagccaaagatgtgctattgggtctctttcaaggacatgatgtcacagccaagcacatgctggctagatgtcctctgctaatggttacacaggaattattgatgactggcctactgctattagacctgatacccagctcccctcatctggcctttaatgtctttgccttcttgggttattcttctcagagctttctatggtacatctggttcccaaactctgtctttccatgagcaggatgctatgggccaatgtgactgggtgcgaactccaaaatagccgggtgtgaattctgagagacaggattttctccgtctaaaagctgtggataccttctggtccaaatagcactcaagcgtcacagaccccaacagagactgtgagctcatggcgcctgctccaggcccctcctcttcccagcaccttcccaggggtcctctggacctgtcagcagccctgccccaggccatctcaccttgcaggtccctgctttacctccctgcctatggaggcctctcggggcaatggttcccagggacacctaactgggataatgaaattaatgattctgtcggcagtgaacaggcattgaatgagcctggctctattctgagagctttgcacgtatgaactcattaatcctcacagcagccctgtgaggcgggcactgtcggtcacctactgtccctgacatggcacagaagccctctccatagccttcctttatgatcccctaaaagctgcaggcctctttcctgcaactctactctgctgcctggcactccacactcctgcctccccaccatcctctgccactctctcctgctcacatcactacctgtgcttcctctgcccactccataaatatgggttctccagggttccttcctccatgctcttctcactttatgtcccttctcaaagtgagctgtctcgtcccatggcctcaatcactacccacaggctggaaggaaaagtgagtggcagggccgtaggtagggtcgtaaataccatgttaaggattgagggtgctaagagcccagaaagcatgggattgttggtggggggcttgtgacatggccagatattcattttgaaaagcttctggtcatagctgtgtggggtttgtgtacctgtggtctcagtgaggggtcctgagcctcttcactgagtagggtgaagggatagagagtggggcatggatttcacaaggtttcaaggtaaaaccagcaagggcttgatcaggagcactaaagggaaggagctgaagtggggtgactcccaggtttccagctggggctggaacaggcaatcaggtttgggcaggagatgctgcactgagtcttggactgctgtgtttgaatcatctttggttcttcaaggtgggggtgtccagcaggcaactagctgtgggctctaccctcacagagtgggcaggacagagttgtccacatgaaattctgtaacatccatgagcagggtgagctcatccaaggtgggcagggtgggcggccaaaggcaggacagctaccagcacctgcattcggtcagggccgctgggcgggacccagtaagggctgaaattgttccttggatttggcagtgaagaggtcgctggtgaccttggtgagaggtgtttcagcattgtgggaggacagagtcagagaagcagggatggagcaggaagaggtggtgtcaggcagtgcggggaactctacagaggctggcagggctagaaggagaggcaggcacccgggagaggggagccgctgggccccctagacctgaaaatctggtcataaagcttgacagtttcctcttccttgcagctcatgtccaatgaggcaccaaatcttggggattcctcaacacctctcagttcgtctgtcccttcctctccatcagtctggagatgctgtggggggcctctgcagcaatcccggcctccacctcttctggttccgggtcctttcacaattcttgcttggcgcgtgcaggcttctgcctggctggctttcccctcttctccagctgatgaatttgtgtcccctgctgggcctgccttgggagtaggtggggggagtggagcagcagccttagaccagcctgttcctgcccctccccttagggcggatggggggccctgctgagggggtggatctgaagtgggaccctcagtggtggctgaggaggggctagggtgggcatgtgggagaggctgctgcagagacccctgcatctcagcatctcattcctagggatccagccctggcctgctgtgtctcccctccccacacacctgtgatgttgtgcagctgtggggctgcgggtcttcgggggtgtggggcggtgtaaaaacaggtgagggctccctccttcccgacccaggagctcctgaagtgccttgcgtctccattcctgtttgagggatattaccggtgcagggctgagccctccctcagactgtaggccttgcctttcctctcctaaaccactcccggccccctgcaagggcctggcttgtaagccgtggagcacacctcagtgtgtgtatatataagtgtgggtgtgtgtgtacatgtgtgatgtgtgtgtgggtgtggtgcatgtgtgcacattcatgtgtgatgtgtgtggtatgtgcttacatgtgtatggtgtgtgtgatgtgagtggtgtgtgtgtgatgtgtatgtgtctggtgtgagtggtgtgtatgtgatgtgtgtggtgtgtgtgtgatgtgtgtgtggtgtatatgtgtgattgtgtgtggtgtgtgtggtgcatgtgtgtggtgtgtgtagtgtgtgtgtgtgtagtgtatgtggtatatgtggtgtgtgtgtgatctgtttgtggtgtgtgtaatgtgtgtgtggtgcatgtgtgatgtgtgtgtgttgtatgtgtgtgtgatgtgtgtgttgtgtgaatgtgtgtgtgtagtgtgtatgatatatgtgtgtggtgtgtgtgatgtgtgtgtggtgtatgtgtgagtggtgtgtggtgtgtgtggtgtgtgtgatgtgtgtgtaatgtgtgtgtggtgtatgtgtgatgtatgttgctgtgtggtgtctgtgatgtatgtgtagtgtgtgtgtgtgatgtgtgcggtgtctgttgtgtggtgtgtgtgtgatgtgtgtttgttggtgttgtgtgtgtgttgtgtgtgtagcatgtatgttgctgtgtgtggtgtctgtggtgtgtgtggtgtgtatgttggtgtgtgtgatgtgtgtggtggtgtgtgtgtatgggtgtgtgtggctggcccctctcaccatggctgtcttacccacaggctgtcctgggatgtgggacaacatcacgtgttggaagcccgcccatgtgggtgagatggtcctggtcagctgccctgagctcttccgaatcttcaacccagaccaaggtgggtttagcccagtctctttaggccacgctggcctagcctgctccccaaattcggccccaggcaagcaccaaggacagggaggccaccctgtgggcagacagtccctgctcctgagctcacatgtggtgtgggggatgaaaccacagacacttgcacacacggggacacaggtacacatgggaaccatcgttgtggatgaaagcaaggctgtgccctcacgcgtgggatccatgccagctgtcactcaccctccagcccaggtccctgtctgtcagctgggtatgtggcccggtggccccctcccagggtgcttctgtgagggtaatgtgaagcgatgctgtggacgccacttagcacaggacttggcgcgctttgaacgtgcagtagtaaatgttagctgggataattgtcaccatcctcccacagccacagatcctcagcgcccagtgggaggcatggagagagacgcacatgtagacacccccctcaggcagaatgagacgcgtggggaaggcagctggacacaagacacccacgtccacatgcagagccacttagacgcaggcacaaggcccgttggggctggcgcacactcacgtttgctcagcagagcattttctgggccctagctgccctcaggcagttacacgggctcaagatgggaggagctggaccttgggctacctggggagagggtgccacacacggggagcagtgccacagtgctgtcggtgacttgtggacgtgggcttggaggcgcgggtgtgcgatggcgcctccctgagagggaaggctgggtgggtgcggtgtcctgcagacctgggtttggggcatatctgtgtttgaggtctctgagggccactgaagtgctgtggagatatccaggggccaccaaaacgatagagcagcccgtgagtgggcagagtggctgagctttgtgcacaggtgggatgtagggtgagggcaggggagagaaggcgatgctctacccacaggcagaagccctggtagccccatctccattgcagggggtgtctgagggaaaggggtagctgtagatgacttctttggatatgggtcccttgggctcttccagaacggttcctgcctttcggctgggacctgtgaactcctccatgggccttctaccccatccctgtgagtgtcacaggaggcagggtggccagctgaaggcactgagttggggctgggcagggagagctggagggactggctccagccaggtgacttactgagccacctcctggccatcaagccatgggcgggggctcccgagggtatcagagggatctgagttgtgtgtggccatgtgacctggccttagcgttcttcttttccagcctaaggcttaggctgatgtcctagaaggggcgagtttccaggctccactccagcactgagtcctgcctgctgcagtcccctgtcttctctgagaggcaaaaggcaaatttgctaatttgctgtcaaacctcgaattccaataactgactctgtcctggagggggaggggcttgcaggaggtggcagagaaaacagtggcctgtgttgggggtcccaggtccccccgtctctggctcccaccccaaggtttgtctaagatgcactgcactctgcagcaacacctccacctccagaccaccggccggcccgggaggagggtggcattgaactctcccatctgagggcctggggattgggtgtgacctgagcagtccagagtgaattttgaaaggggatacaggcagcggaagtgctggagtgagagatacagtgggactggggggcagtcaggcatggtggcagccagtgagtgattcagcctgatttccaattcattcctgtagaagccaacttaatcacttcctccattcatgtatttctttcgttccgtcatttatttaaagtttgtttattgaacatctactctgggtcagattccatgccagactccgtcttctcaacaacgaaaggcaaaatgaatcaatggtaaaataagattttcttaagacacactttcctccacactccctccttcctctggcagtggcacaatgaaggtgttatttacacctgattcttaatggttcattaaggcagggccttttagcacctctgttcacaaaacttgattggtgagacttgccttgaatactttgcaaggagagaatgggattcctgtgtttcttctcagttcccaggtagcctgttgtgatgactgtggctgtgtaggatattggagagactggagatgtgggagcacggatctccctcctcctctcaaatgcctctgcttgtttctgttctggaggtctccagtgtccccagcttatagtcctgatgccttctgggtcccccagagcccctctttaatgtttggggttgggaaggaggaggaagtgatcagcaagacccaaggagagcagcccctgacttttctcaccccgctgctcacctctgacttttctctctctctctttctctctgtttcagtctgggagaccgaaaccattggtaagaggaaccttggtgaggatagaccgctgtctttctgtccatccagcaggagcccagcctcaggagatcccaggctccggctgctgggattggggtgggggtggagtaagaggctcactgggtatcaggttctttcctccttccttcctcccctctccccgaccttggccattctggaggtcggggggcacaggaagatgcacaacacaagcacgacctcaggtccctcacaggcttgtttgggaggacaggacttaccaatggaggggctaagaaacaagctcacgcatgagtgtagctgcatatatgtgcatatgcccagacctgaacatgtgcatcagtccatgcagatattgacatccctgacagctaagaagccggaatgcacagtgagcaagagaacagaagagcaaatgatgcagcatgcaggcagaatagtgaagaagtcaggggaggcttccaggaagaggtggcatgtcagctggaccttgggaaaggagttttgagaagcggggatggggtggaaatggggtctcattgctaacagggggtttggcataagaaaagggtggaaatgggaataaagggtagggagagaagaaaaattgtctgaagatgaagtcttctggattccctttgacggagagcagttttggaggctgaggtggagggtcgagcaccaaaaaggaaaccccaagccctgggcccacgttgctgtggtttgccctttttttgaaaaggcccaaccatcccttttcattttctcccattcctctccattctggaggccctcccatcctcctggcagtgcccatttccattacctgtggtggtggagaactgagtcctggaccatcctgaacgtcacagaaatgcaaagcaagtgagagtggtgttagaaggtgtagtgtgtgagaaaggtgcgcggctgctatgtgtgatattgcctcttggccaggactccatcccctacttcctgtagaccaggggtagcctgagccttccagggtggagagtaaacagtagctaactgtaagccaggcattttgatatatgcctatgtctgtatttttcaggagagtctgattttggtgacagtaactccttagatctctcaggtaaggggttaggctggggttgaccatggactggctggagggagggcgtctgctgacatgtgagctttgagaaccccatcccaggctgggctctgctcctctgtggctgtgtgatctttggcaggtgactttttttctctgataaaggtacagattatcttcatggaaaagcacacagatagaacatcgtgtgtagaatttcaggggggccacagatgtcttagagtccctttgtggacttcaaataaagagctcctggattggatgatccttgactgtttctgaactccagcatctagaacagtagctctcaaactttaaccgtgcatcacagctaccttgtgcacttgttaaacccaggttcctggcagtctctaatttattccgcctggggtggggcctgagaatgtgcttgtctcgccagtctcccaggtgatgctgatgggctgatccgggacgggcaccccttcgggaaacgctgcccaaaagtttcgtgttcctgtgcagttactggggcgaatcagcctagtgaagtaggcacaatgaccgcggggttttgacaatctcaagagcactccatcttccggagatttctatcagaacaatacagtggcaaattcacagaacagttctgaacaaaagggtttatacttctctgagcccacactgtgttataaaaaggaaaaaaagaaagaaggaaaataaaagaaaggaaaccgcttttccttctagaacactgttttcaaaaaaattgtttttcaaagcagcttccctttcctcttcccaccatcctgatgtgagcaaagcagagaggaaatgaggcccagggaggggaaggaacttggccacggtggtgatttccctgggacattcagactttctgaaagaagtgttcagagggacttaaaaggaggttgcctgagacagatttgctggaagaagggacagtttggcatcagctgtgggacagaagtgagctcctttgctctctctgggcttgccaaacttcccccttagcctgtgccgtagaactcagagctggagaaggactgttggagtctccctgttgtgggcagaactctcctttcgggcagagttacccatcccaggaagttcatttctgactttcttggctaaagagaactggccttagatcttctaatgcaggaagcgagggacacagattggaaaagtggaaggatctcttctcttggcctctgcctcccacagaggctgacctgctgccctccttgcctctttcctgagctccctggaggtggccttggccacagaggggaggtttctgtccagcagtatgggtactggagccccttttctgcaggtgtctcttgttttatacaatgtcttggtctttgaatgctgtgaagggaagaaccaaccacatgtgtcctgatagaccgggtacgctcccagtgtcaggcgggggccacactcaggtgctgggctggaggaaaagggagctgcttgctcacccccctgccctggacatgagtggctcaccattataaaccatcgggtgaagggagagtgaaaaagcaatcatgaaagactaacatggccctgggcagggcaaaaaccagcctggacttcactgtgcagccagcaaatgactcatttaatggccatgactgatcccaccccctcgagtgtcccactgaatggccttaaagtcaaccaaaagcaaattaaagtacattagtgacaggaaacagccctcccaaactctgaaagacaacactttaaaagaaacccaaatatatatcttcgtaagatccggccctacgttagtggaaatctggaccttgttaatgaagcaagccctgtgtccccttgatgtgagatgttgcagctgctgtgaggcttagagctctgagggaaagcatcacatcaagctgtgttcccaaggtgtgccaaggaccccacccacaccctgcagtcaccagaggggattcctgaaagtgcccagatctcctgacagagaatccctaagggcaggcctggaatctgcatttgtgatcagtctcctaggtggttctgcacactgacatttgagaagtgctgatccagggcccaggggaggactcaggcccatccctgatgagcatttggaaatgttcgagaggggagggatgcagggatgctggattcagctggcgcagtctccccatctttggttgagatgagcttgctctttgtctctccatccctctgatcagcaatcactgatttctgaaacctttccccatgcttcccagttggtcataggggtttccaggaattcccactgaatacgtaatttttgcataagaatttcagggccctcttaatcatttctgggcctcgctgagttttctttttgctgcagacatgggagtggtgagccggaactgcacggaggatggctggtcggaacccttccctcattactttgatgcctgtgggtttgatgaatatgaatctgagactggggaccaggtgagtgtctgcaccctgctccccagaggtggtgagggtagggctgaggaaatttaggtcagtaggcagcattcatgagcacctgctggggctgagaagcaactgggatgctgcctactcctccccacctgcacctggctactcttacaggatactggaattaatgccactgggttaatgccaggcccagcaaggggcttcctggacctttgtgtagtccaaggctgtgtctgttctgattggacagcgctcttgccttcaacagcatatattgagcatctgcagaatgctgacagtgtgcaaaggggaccaagaggcttggccaggggtgggaggtggtggagatgatatcagcagaagagaggaaggaggagctaggcctggaggtgggcaggccctggcctgggagactgggtgcaggcctgaggcagcctggctgtgggcaggtctcacatgaagtcctgcatgtcctgtgctctgcttcaggattattactacctgtcagtgaaggccctctacacggttggctacagcacatccctcgtcaccctcaccactgccatggtcatcctttgtcgcttccggtgagaccctcagcaacattcaagcaagcaccagagctggccagggcctcagaggccttggtgcatctctcccctccccccttgatgtcagccctagaagacccctttgaaggcatttctcccaccccaaggataacagatgggaaacttcactccagagagggcaactgacttgtccagggctatgcagccaggcagagcctgggcaggagatctgcattccttgcttttgtcttcctggtctagaaagacagaggccacaggagggagaagtctggccatgtggggtggtggagctgggttataggggcctggaagtcagtgaggatttagagaggtggcaggaaggagggtggcctgggtgggagacctgctgagataaagccacagagttggcccaccacagatgcccacatggagggtgtgaaatgctgtggggtccaaggcttctttctcccctggcccactcatgtaggaagctgcactgcacacgcaacttcatccacatgaacctgtttgtgtcgttcatgctgagggcgatctccgtcttcatcaaagactggattctgtatgcggagcaggacagcaaccactgcttcatctccactgtgagtgagccaagcagacccattaggctctgccgggaaggtcccgcaccatccccttggttccccaggacgcacattacctgcctgacaccctgcagatcaagtgtgtccctgcaggtgaaggcattgccccacccccccggtttatgtgaaaactcacgaattaagttactagtagctgatgagccaatgtacgacatcacttccagccaaaatgcttcctgtctcttggcctgggtgttgcatttggcaaggcagaagaggaaggtcaggtgggaacaccaagtcccacttgaatgaagaggaaactgatgctgagagagggcttacctagcccctggtcatttaactagcctgggatggagcccaggtgctgattggccaggggtctttccagacacctccccaggtctcacacttctggaggaggtagcatgtggagaagctggtctttgaggaggtaggttaggaagaagagtgtaaagtccagggccttgaccaggaggacatgcttggggagcctctatgagtagagatttctggaagctaggaatatgtatccccccacctgaaaggtgtccaaatcctcattataccaaggagcctcctgcagggtcctctggctgcttctctccctactcctctcctctgtgggagatagggaaggagcaggaaagtgaaggaggatgagctggtggtggggaggctctgtgtctgccacccgtctttgtcctgtgtgtgcagttttgcctccatgggcagctttgactcagaatcatgggatgctgcaattttcaactctttgatccaggaatattgactctcttagatccttgggatgtttgaacctgagcatgccagagccaacgggccctaggattctcccttgctcctgttcctgttgggctcacgcccctcaccctggcgcttctccctgcaggtggaatgtaaggccgtcatggttttcttccactactgtgttgtgtccaactacttctggctgttcatcgagggcctgtacctcttcactctgctggtggagaccttcttccctgaaaggagatacttctactggtacaccatcattggctggggtaggttcctggctgtggcttggacaggttcaggtcccgtggtcaggtgtgtccaggtgtgtctttggttccatcttcaggaagtgtcaggtgaggaggggccactgccctgcccgagtctaatggcctaggctctgtcttggactctttctcaatcttcttgcctgtggaaagcccactatctcagggaggagttaaatccaggagtcctctgagagacaagacagcccttggtctgagggagatatagaccctcaggaggcctgggtgtgagggacagttagaattcccaggaattccaagtctcatgggggagcaatagcctctcggagccccaggtctacggtggacattggacatgttggttttcctgttctcacggacctctttttcttgttctcccagggaccccaactgtgtgtgtgacagtgtgggctacgctgagactctactttgatgacacagggttagtacatgcgcgagagtcagggccacagcacagagtagattcttacagatgggttctcagtagctgccctgacttcacatgaactgcccgcaacaaaccattcaatgccaggcccagactaaagcccagcactgggcaccacctgagccatggccccatgcaggtgacccacccagctgcgtctcagccagcaacccagcaagagaatgtgctaggtgtctgagcccttgtctacttctgtactcagctgagtgtctgttttgcttttagggaggggatgaagcatgttgagggggaggtcacatcctaagagctgtaggtcttatggggaaaaatggtcctttcccaggagctcactggtgatactgacttttgggcttcatgccctgccttgataggtgagcagagggaaagatagaggctcagaaggaggggattttcagagccaggaccaggctggagtctgtagcccgctggagagctcttgttccagccagcccctcctcagagagctgcggtggtgaaagtgtcgggcacccagctaggcagggcagtgtcccgcaggcttctatgctgccgactcacagacgtgatcttgcttctctctgtccatctttcagctgctgggatatgaatgacagcacagctctgtggtgggtgatcaaaggccctgtggttggctctatcatggtgagtgtccttgggatgaagaggaagggaagagacagggtcttgggcagaaaggcacgcgaggaagagaaatgaaagagtccccacacaacctgacttcctcctctgtcatggctgcattataatctgtaacagggatgcacaaactctttagctattcccctaacactggagatttatattgtcccattttttccttattacaaaaaatagaaatagttttgtgcataattttgagcatgtggaaatatttctttagaataaatccttagaag

SEQ ID NO: 732 - protein, 491 aa, Homo sapiens
MRPEGPGGTCLPTLRWTDAPTRIGKAGLEGPPGLGTAIRTGFEGWASNVLGGGWGRGQCRMPLCGDTSGIVQKSVVFVSRGAEGLGLGMPGLQWSPEETPCGVCGETHRPSQVEVGPLRPLPAALEAEAPAAAAGGGGHILGGTLAAQRHIGADLPLLSVGGQWCWPRSVMAGVVHVSLAALLLLPMAPAMHSDCIFKKEQAMCLEKIQRANELMGFNDSSPGSYTGSRWEELDLGLPGERVPHTGSSATVLSVTCGRGLGGADMGVVSRNCTEDGWSEPFPHYFDACGFDEYESETGDQDYYYLSVKALYTVGYSTSLVTLTTAMVILCRFRKLHCTRNFIHMNLFVSFMLRAISVFIKDWILYAEQDSNHCFISTVECKAVMVFFHYCVVSNYFWLFIEGLYLFTLLVETFFPERRYFYWYTIIGWGRFLAVAWTGSGPVVSCWDMNDSTALWWVIKGPVVGSIMVSVLGMKRKGRDRVLGRKAREEEK

SEQ ID NO: 733 - DNA, 1298 bp, Homo sapiens
  source (1)..(1298)
  CDS (201)..(314)
  CDS (389)..(672)
  CDS (714)..(1098)
atcggtcctcgacgtgaaaggatggccaaaacagggactttgtccttcagaacctctcagaatttggtttagtgtcagaaaccaaatgtccttttctccaagacctttgcattccctcctaaccacctagattgaagaagtgaggttcaatgtcccaactgggaagggacaacataacctgggtgagtgagttcatcctaatgggtctctccagtgacaggcagacccaggctggactctttatcttatttggggctgcctacctgctgaccctgctgggcaatgggctcatcctgctcctgatctggctggacgtgagactccacctgcccatgtatttcttcctctgcaacctctcacttgtggacatctgctacacctccagcagggtccctcagatgctggtgcactgcaccagcaaagaaagaccatctcctttgcccgatgtgggacccagctctttttctccctggccctcggagggaccgagtttttgttgctggccgcaatggcctatgaccgctacgtggctgtttgcgaccccctgtgttacatagcagtgatgagcccaaggctctgcatggcactggcagctgtctcttggctagtgggcctggctaattctgctatggagacggcactgaccatgcacctgcccacctgtgggacaacgtgctgaaccatgtggcctgtgagacactggcactggtcaggtcggcctgcgtggacatcaccttcaatcaggtggtcatagtggcctccagtgtggtggtgctgctggtgccctgctgcctggtctcgctgtcctacaccctcattgtagttgccgtcctgcagatccactccacccaggggcaccgcaaggcctttgggacctgtgcctcccacctcactgtggtctccatatcctatgggatggccctctttacctacatgcagcctcgctccatggcctcagctgagcaggaaaaggtgatggtactctcttatgctgtggtgacccccatgttgaatcctttcatctacagtctgcggaacaaggatgtgaaggcagctctgagtcgagctctgatgaggagctctgaattaaaacattagagagtggtttgagtaacaagaaggcctcactctgaaaacagtgggcattggactgtgctctccagtataacgtgtgtacgcatgtgtgtgtatgtgtgtgcatctgtgtgtgtgtgcatgtgtatgtgtgtgtgtaagggaacaggtgggaggaccacaatttgtactactctcttttgaggtaatagaaaaatggattt

SEQ ID NO: 734 - protein, 260 aa, Homo sapiens
MGLSSDRQTQAGLFILFGAAYLLTLLGNGLILLLIWLDGPSDAGALHQQRKTISFARCGTQLFFSLALGGTEFLLLAAMAYDRYVAVCDPLCYIAVMSPRLCMALAAVSWLVGLANSAMETALTMHLPTCGTTSACVDITFNQVVIVASSVVVLLVPCCLVSLSYTLIVVAVLQIHSTQGHRKAFGTCASHLTVVSISYGMALFTYMQPRSMASAEQEKVMVLSYAVVTPMLNPFIYSLRNKDVKAALSRALMRSSELKH

SEQ ID NO: 735 - DNA, 4943 bp, Homo sapiens
  source (1)..(4943)
  CDS (201)..(243)
  CDS (278)..(739)
  CDS (4658)..(4743)
gatcctctccgtagcctgtcaccgacacctgcactcagtcacgcactactacatcgtcaacctggcggtggcgacctcctgctcacctccacggtgctgcccttctccgccatcttcgaggtcctaggctactgggccttcggagggtcttctgcaacatctgggcggcagtggatgtgctgtgctgcaccgcgtccatcatgggcctctgcatcatctccatcgaccgctacatcggcgtgagtacccgctgcgctacacaaccatcgtcacccagaggaggggtctcatggctctgctctgcgtctgggcactctccctggtcatatccattggacccctgttcggctggaggcagcggcccccgaggacgagaccatctgccagatcaacgaggagccgggctacgtgctcttctcagcgctgggctccttctacctgcctctggccatcatcctggtcatgtactgccgcgtctacgtggtggccaagagggagagccggggcctcaagtctggcctcaagaccgacaagtcggactcggagcaaggtgacccggcatccatcggaaaaaggccccggcaggaggcagcggggatggccagcgccaagaccaagacgcacttctcagtgaggctcctcaagttctcccgggagaagaaagcggccaaaacgctgggcatcgtggtcggctgcttcgtcctctgctggctgccttttttcttagtcatgcccattggtaagtcttgaacacccctcactttagcatctggggtcttcaccctcctcggcttctgttaccccagactcccagtccgggatggaagaggaaggattagcatttcaaacagcacagctctagggcaattagaaaaggctcccttgtagaaaagtgaattttcattctctttctactccagtctcatttatattaggtcctagagcactttttcgactgtaaagtggcttccaactgatgcagattaattggtctctttaataagaatgtcaacttttcttaatgcctataagcacgtgttcaattaaaatgcatctgctccctctagtctcagagtctccaccaagtgcttaggctgactgtggaatgccattttcactctgctacagaatgcaaattctcttggcctgaaaataagtaccatgcttattctggacaaatgtgtgattttattattgcattaggttattcataagggtttgttataatggtctgtttatgttctatatctgtgctaattttattttctggattcagtatggaaggaattatggtcagccactaagaaaaaaaaatgattttatgtccaaaccaatttaagccttaaataattaatcatagtatttccaataagtaaatacttatttttttattttaataataagtattaaaacaaacacttctcttatccaaaatcatccgggaagttgcagataacactgtttgaaaataatacagtacacataatgttacaaatccaatttttgcagatgctaaattagctgttgtcaaaattaattagctcattataagtatcagcaagctgatccacttggaatagacatctatctccttcaatgagatcccaaaatggttgtgtgctatttttagtttgtaagctcaaatacagacccaaacatcgattatccaccaactctaaaaaacaaaacattatgcctaacattaataaaagtccatttcaagtgctttacagcctaatttaaatggcatatacttaaagtactttaatttgcaactctgtggaataatagcaactattatttttttgtgccacttatgttccagacattttcctaagctttttatttcatcagtcccctcgacaactcagtgagttatacacaattatcctgcaatcacaagccatgggaagggattcttcaggttctaataccatagccaccagccatggatagctatttaaatgttaattgaaattaaataaaattctttcagttcctcaattcctcagtcccactgaccacatctcaagtgctccatagtcacacgtggccagtgactactgttttagacagcagagatataggtcatttctatcattgcagaaatgtctgtcctgtagggctgccagagaggccctccttaatccaatacctggccttccattgtgcttgcccatcattattacttactctgctcctggaagtacatcacagctttgaaattatagaaattacactctttacctgagcccctttgcacacgtattcatgcgtgtgctcgctcaacaagtatttatggaccatctgttctaggcactttggatgaacagggcagaaaagtccttgccaatgagacggttgtatttggaaagggtagacataagcaaatgattgtatcctaaaatgtcaagattaacatgcactatcaaaaaatcaacaggatgagaggctagaaagtgacaaagacaatgagggcctgctttagtgggtagtggggaaaattctgtctaaagaggtgatatttgagcagagtcctgactggactgaagagcaaagcttgcaagatctgggaagaagagcttcctgggcagagggagcagcgagtacagagatgggaaagagcctgacctgttcagtgaagatcacagaggccagtatggctcaactacagacagggagggggcagtcaagttcaagaagagattggagagatagacaacaccaaagtcatatggggtctttcaggccaaagtaaagtttgcatattattctaattgtggtgggaagtcattcaagggtgtttagcaggtgagtggccagtctcatttatatttttgaaggatcattctggttgttggggggaaaattggctgtttgggggcaagagcagaagcagagactagttaaaaggctattagaagtcgaggggagagaggtcatgacatcttggactcaggtgagacaggtagaggtggtaagacgtgatcacattcagcacttattttacaggtaaagttgatgagtgtggacaagggtgtgagaaataggtaggtttagggcctgaatagctgagtaaatagtaatgcacttcactaaaactggcaaaaccaaagagttatgtggctgcaaggggctgcagggagtgagaagtatgagcctttcttttgtatcactgtgttgagaaacattcattagacatggaagtagagatggcaagtagggagttatacactttacatagatttggagcttagagaggaggcgggctacagatataaacttgggatatatcaacatctttaaagctacaagaatggagaggttgacaagagaaaagataaagagagtaaagagagataagaacagagcctctgcacctttagtcccagctatttgggaggctgaggcaggagaatcgcttgaacccgggaggcagaggttgcagtgagccgagatcatgcctgcactccagcctgggtgcagagcgaggctccatctaaaaaaaaaacaaaaaacagagcctctgggggtcaggtcaggaaaaacaggagaaacagccagcaaacaagattgcaaaggagtagccagggagaagaaaaatcaggagaatgtgatgtcctggaagcctagtgaaaatgtttcaagaaggcaggagtaatcagctgtgtcacatgcagctgagaggtcaggttagaggaggactgggagccaacactagatttggcagtaagcaggtttttagtgataggaggaaggcacgtgaggctcacaggtccagaggagtgatggaaccaaaagcctgattgtgtactttctagaaagaacaaaggataaaaaaagtgggaacagggaaaatagacaactcttctgaaaggttttgctatacactggagctaggagatgcggtgtagctggaggggtatagagagagctttcaatggtgggaggtggggatatgacatgatatttatattctgatgggaacgatgggatagagagaggcactgatgggataggcaaaagaggcaacgggattcagtgcccaaggggagcattgggaagtgacaaggagagcaaagtgtgtgagccctgaggcaagtagagacagagggagagagatagtgatctctttaggatatgtttatgtcctcagtgaaatatgaagcaaggtcatcagctaagagagagtcaggaatggggaacgatggcagttttagcctcagagaaggtgtgaaagattcatctttgagagtgggacagtaaacattttatggaagtttggtagagtcactgggaagtcctgaaggcctatctgagatttacggtcataacattaaagtacagcgggaaggagggttgtgtgtttttctctaagagctaagcagctgagggatacaggaggcaatgctgaggacctactgtgagtcccagagagtgtgtgtgtgaagagacacagactcggtcaggttagggagcatccacagccaggttgtagaaggagcccaggtgacgatgggtggcctgagagtttggagcttgcagtggtggctgagctatgcatagagatgagaaacaatggcctgggtcctggagtcatctaggggaggtggatgctctgtctagtcatagcccgctcttggatttgctctcccagggagtcagcagtgtggaggagaagatgttgtggtggagagaagtggtggtagacaggagccctcggaatcactgggcttcttttaaatcctagtgaggtgccaggcacggtggctcatgcctctaatcccagcactttgggaggctgagcaggcggatcacttgaggtcaggagttcgagaccagcctggccaacatggtgaaaccctgtctttactaaaaacacaaaaattagctgggcatggtggtgcacgcctgtaataccagctacctggtaggctgaggct

SEQ ID NO: 736 - protein, 196 aa, Homo sapiens
MGLCIISIDRYIGVKEGSHGSALRLGTLPGHIHWTPVRLEAAAPEDETICQINEEPGYVLFSALGSFYLPLAIILVMYCRVYVVAKRESRGLKSGLKTDKSDSEQGDPASIGKRPRQEAAGMASAKTKTHFSVRLLKFSREKKAAKTLGIVVGCFVLCWLPFFLVMPIGSQQCGGEDVVVERSGGRQEPSESLGFF

SEQ ID NO: 737 - DNA, 1336 bp, Homo sapiens
  source (1)..(1336)
  CDS (201)..(1136)
cagtgagctgagatcacgccactgcactccagtctgggcgacagaccgagactccgtctcaaagaaaaaaaaaacaaccgtaacaaagggctatgagctatttttacaggcttaagcttatgaaagaagctgtcttggtcaaactgccctttacatctctcccactgcttctccaaaccctatccaggaagtccagagacatggagataaagaactacagcagcagcacctcaggcttcatcctcctgggcctctcttccaaccctcagctgcagaaacctctctttgccatcttcctcatcatgtacctgctcgctgcggtggggaatgtgctcatcatcccggccatctactctgaccccaggctccacacccctatgtacttttttctcagcaacttgtctttcatggatatctgcttcacaacagtcatagtgcctaagatgctggtgaattttctatcagagacaaaggttatctcctatgtgggctgcctggcccagatgtacttctttatggcatttgggaacactgacagctacctgctggcctctatggccatcgaccggctggtggccatctgcaaccccttacactatgatgtggttatgaaaccacggcattgcctgctcatgctattgggttcttgcagcatctcccacctacattccctgttccgcgtgctacttatgtctcgcttgtctttctgtgcctctcacatcattaagcactttttctgtgacacccagcctgtgctaaagctctcctgctctgacacatcctccagccagatggtggtgatgactgagaccttagctgtcattgtgacccccttcctgtgtatcatcttctcctacctgcgaatcatggtcactgtgctcagaatcccctctgcagccgggaagtggaaggccttctctacctgtggctcccacctcactgcagtagcccttttctatgggagtattatttatgtctattttaggcccctgtccatgtactcagtggttagggaccgggtagccacagttatgtacacagtagtgacacccatgctgaaccctttcatctacagcctgaggaacaaagatatgaagaggggtttgaagaaattacaggacagaatttaccggtaaaaggaacaaaatgttggtgtgtcataattaagacatgatcgaagagattatcaggttattcttccttagtaactattttccacgtggcactcaaagaggtcatgaaaagtggtgttggataccaataagagaattgacctaggagcaaaacaattagtttctatgcatgatcttaaccaaatacatattcagtctcaggc

SEQ ID NO: 738 - protein, 311 aa, Homo sapiens
MEIKNYSSSTSGFILLGLSSNPQLQKPLFAIFLIMYLLAAVGNVLIIPAIYSDPRLHTPMYFFLSNLSFMDICFTTVIVPKMLVNFLSETKVISYVGCLAQMYFFMAFGNTDSYLLASMAIDRLVAICNPLHYDVVMKPRHCLLMLLGSCSISHLHSLFRVLLMSRLSFCASHIIKHFFCDTQPVLKLSCSDTSSSQMVVMTETLAVIVTPFLCIIFSYLRIMVTVLRIPSAAGKWKAFSTCGSHLTAVALFYGSIIYVYFRPLSMYSVVRDRVATVMYTVVTPMLNPFIYSLRNKDMKRGLKKLQDRIYR

SEQ ID NO: 739 - DNA, 35178 bp, Homo sapiens
  source (1)..(35178)
  CDS (201)..(366)
  CDS (7063)..(7807)
  CDS (10048)..(10118)
  CDS (10675)..(10901)
  CDS (11611)..(11756)
  CDS (13488)..(13621)
  CDS (13913)..(14143)
  CDS (14753)..(14924)
  CDS (15351)..(15515)
  CDS (16737)..(16844)
  CDS (17708)..(17888)
  CDS (19115)..(19258)
  CDS (21276)..(21534)
  CDS (24125)..(24240)
  CDS (34778)..(34978)
agaaactcccttgtcctgacaggagttctcatgcatcaatctcatcatgtggtgactcgcccctgtcccctgctggagacacagagtccttggcgggggcgcatgtctcttcacactcgtgtgaaatcgtaggcttctggtccttggggagaagctgtgaagtttttgctaccagaactaggattctaggaggcttttagatgaccaggaagaggctgagactcctggtggggactcctgctgggaagtttctggaccacagccctcttggtatgaagagagcagaggacaggaccaggctagagcatctgcactctggagctggaaatggggcccagctctgggcctccactctcagtgtcaaatgtaggggcagccccaagcattggaagtcgccctgcaccctggcagctgcttcttgggctctgtctcccatgccgtgctctctgccccaacctcctaggaaggcccagcagcttcccaccaggccttcagcaaagactgctcctgtccctccagtgaaacactgccccaaaagtcacttgcccactcaggctgtgccgtgggggcagctgccacactctggggttccttggtctcccaaggagtccccaccctcacagagtgttggtcagctcttctggctctgaggaattgcagtttacctaaggaaatgggaaggccagagttgcagccaggtgccggggcttaggggtctggatggacaggtgaggcctcaaggaccaggtagttctttcagactcaggctggcttgggggacccaggcagagtgaacaaccaggcctgcagggggccagggacttggtgcagggcagagcctaggaaggagcagctcataaaacccccaggcagttcctggggagagccagaggactctatccccaccgttgctgccctaatcatggctttgaacacccctcatctcattgctcatagctcttaactttttctgtgccaggaacccctttggagtcctgtgcagcctatagagtcctttttagaggtgctcttattttattatatttttaaatctttttattgagacaaggtcttgctctgtcacccaggctaggttgcattggtgcattggcatgatcacgactcactgcagcctcaacctctcaggcttgagcaatcctcccatctcagcctcccaagtagctgagaccacaggcatgtgccactatacccagataattttctgtagagatggggtctcactatgttgcccaggctggtctcgaactcctggcctcaagtaatcttctcacctcagcttctcaaagtgctggaattgcaggcatgtgccactgcacccaaccccagaagtgctcttttttttttttttttttttgaactagagttttgctctgttgcccaggctgggggcaatggcgcaatctcggctcactgcaacctctgcctcccaggttccagcaattctcctgcctcagcctccctggtagctgggattacaagcatgcgccaccacacctgccttaatttttgtatttttagtagagacagggtttcaccatgttggctaggctggtcttgaactcctgacctcaggtgatctgcccaccttggcctcccaaggtgctgggattacaagagtgagcctccgcgctgggcctaggagtgcttttaatgtgtaagataaaatacataggattgtaaagtaagccagtgacattaaactgttgttaccaaaatattaaacaataaatttgtaatcaggtaaactatgtgcttcttcatttaatgaaccaaccacagaatctggcggcaggtctacgcaggattgtgattttgatgtagtgatgaacaaaaccaatattgcaagttatctgcagcaactctgctgtcatatagaaggagtgatgattcccaatggtcacaaagccccaggaagactactgtgggggttttgcccttgttcataatggagggaaaacctacatttcagctagaggttactgccctgaattctacccacagaccccaggcctcctggcccctcctatctcatagcttcagctcttatgcctgtctgccctcggcaccaggtgcctggatccttcatcaccactgcttccccacactcttcagaggcttaggtcctggcagaggcctgaatccagcttgggcccccaccctgcaggtcgtagaagaggggagagtttgctccctggcccagccacaaaataacaacaacatccagagcagagatggagctaggagccgggggagctggagcgaatgaggcggaggaatgggaaacacatgtggatccatgtaggtatgtggctgaggctggctatggctttgtgttacactgcatttttaaaaaatcccagtgtttaggctatatcccaggccaactaaatcggagtctctgggggtgggctatcattaataatccaggcggcataactttttaaattcccaggtaatcatctggggggtgtgctgtgcaaacatggaagccccatgggcaccaggatgttgcctgtcctgcctcagcagcccctgtaagattggagcctggattctgggtgaggcataagctgagtactctgcatgccttcttatgaagccactcggaagccctgagaggcaggtattagtatctccattctacgggtgaggaaactgaatctcggagctgtgtggttccttgtcacttcccagttccctgtagcaaatattggcaaggctgggatgcccaccgaggttgacctgatcatgttgggcctgatgggagatggaatttacactgtttttacagcttggggagtttgcttgcagtgctgacatgtctacagtcacaaattcgaatgcagagttttctttttttctttttttttttttttttgagacagagtctcactctgtcgcccaggctggagtgcagtgacttgatcttggctcactgcaacctctgcctcctgggttcaagcaattctctggcctcagcctcccaagtagctaggactagaggtgccaccaccatgcccggctaatttttgtatttttagtagagacagggttttgccatgttggcaaggctggtctcaaattcctgacctcaggcaatccactcacctcagcctcccaaagtgttgggattacaggcgtgagccaccgcatctggcccaaatgcagggttttcattcagactcttgtggtgccactcatgcactgctgagatcagcgaggggttgtggggcagtcacagaacagacccagagacacatctctatgcctgaatgggtcttcactaagaacatctctgatgtttcctgtagatttccatcctgcttcatttgtcttttacacttctcctctctgcgaggtcagaaattgccttgggctatcgtaaatcaaagtgggtgactctatccctcagacaaatgccccactttgtagggaatgactcagacacttgattatgatcagctataatattttgagaaagaaaagtgcggttccaacaagttaccaaaagggcaggaaagtatataatccatgggtctctgtgcctctctctgtgtaccccaaattagagggctctgtgtgcaaacaaggacatgtcaaaggtgctaaggaaagaatttctttttaaaaatccagtagcaagctctcgatttctgctgggtgtgcccaaagcatgtgaaatacaggaccacccactggctggggtttttttttacatccaaatgcctctctcgggagtagtaaattttcacataaaagtttgttcttttagccttcctcatgttttcctcagccattctgtttcctaattcctctctctcacctgatcccctcaaaagaagcctccagcaaaaggaggaacaggccattctggggcatggctgtgtcacccctctccattctacattaggctcgcctggggtggccatggtgtcttaggcaaaccggagtgtggctcagtgctgtaggagtttaatgaatgcacggcactcagatgggtatgacgttggagccccccagactggactcgctgagatgatacatgcaaacttggcaggccgggcactggggacagccctgagcctccgggatcagcaccccaggccaggagatgtgggtgccatcagcgagaaatcaggtggtagcacaggtactcccgtcaggacaggaaatggcctctccatgctgtgcagactctatccatcatcagccctccttggagccgtggctctgtccctgctggtttcctttggccagtataggctgcacaggggggaacgcagtgggagcactcctgagtgggagtgaggggagggaggagccatggagagcagggtgggccacggggactgacaagacctcagaacattagcagggctactgggtcatttggctggctcccagcgggcaggcccacacttaggaggcgggggtggtgtccccaggccaggggcaggtaaaagggcagagctgcacctggggttctatggtataaggcagcagaaaagtaagagttttccaagtttctgtgtttttaactcctcccctcaagccatagggaagagtcccatcccgaaagggtttgccagcttccagaggagggagggaggccccaagtgagctcctggccagatgcctacaggactatgcttgctaagacatttaatattcccctggcaacagctcctgggcgtttcctaggagtctctgaataaccagatagcctcttccagccccgggatgaggaaaccaatccccagaagtggacaggatgggcatggcatgggaggggcatagcagtgttgcttgctgggctgggctgggctgggccagagggcagggagccctgtctactctctggacagtcagtgctgtggccagaaatacagaaatgcaggggccaggagcctccagggcacctagcttttctatcagctcttcttgcaaaggctttcagaaaatatctacaggggacaggaataatggggcccataggcccataagtaaagtcagcatccgtcgggggttgtgggcagtggcaggacagctggttgattccagtcccccagagcatggttatgcgtctgccaagggcccactactgaatcgtttctaaatagcatacttcctgtccctgctgccctggcctggacctcgaccctctctgcagccccagggcagctctcgggcctcctgctcttgtggccctgctactcccctgaggatgaggggctagaaagcttttcccacctccagccatgccagcgaggtgtgaagagcaggcggcagtcagtgcggaggtgtgggccagggcgacacgtactactgtgcacactcagccctctgcgtctccctggagcaacgaggggcagagcagaggtgatgggccatagactcctaggccaggctgagcagaagggtggctcaggctgatccagagcctggccaggcagagagccgccaaatgctgcccagccaagagcccctgtgggttacatgggagggctgacctacaggccatgggccggggacacaccatctactggctacggtggcagatgggggtgggtggaaggaaggacatcacgtctgcagtgacagctgtcgtgtgctccatcaaccttgccctgctctgctctctgttgcgggaaacacatctccccagtttccttcccaggcttgtgggtaggcctgaccatggtggggctcctgcagaagatgggaggccagagcgggcagtgagggccccatgcccctgctctgctcaccgcacacctctccagcagccagccatgcctcctcatgagtgccctgctttggtggcacccagctggagaggcccagcccctggaatcacagcagccccttcctcctgtggtccttccagccttggccacagcagtgcgctccactggcgctaatctctggggtgcctcagtgtcccctcagatcggctcttccaccacctgttaccaaccaccgaagtcctcccaagcatctacaccatcacctctcccatttaacatgaggatagacacacctcgtgcgtccacacctgagtcacaggtctgggaagtctgagtttctaacaagctgcaggaggggtgcacatcagcagccagtcctccagccacactttgagaagcaaggaccagggagattttggatttcctgatacaatgtgtcaggtgctctactaggcagtgggtctcaaaggtgaacaaatccgacctgtttgcattccaaggagggagacagacatggtcagatgacaatcactgcaaatgacactatcactatccatagatgctccgagggatggacaggaggaggtgaacagctgggcccttggcagtctgggggaggtggtatttgagttgagacccagagcaggggacaggcgaaggtttcaggagcagtgtgtgagcagaggctgggtgaccagaggagctgtgtgccttcggtggtctgaaaggaggccagcctggtctccaggcacggagttaggcagattcagtggctcctcctctctcagcaagagaagactcacctgaactcagctccccaaggtatcaggcctcctcctcccgcaaggcctaatccagctaatccagcctaatccagcaaggtctccaggtgctggcagctggagctctcagacacctccccaatcagctggcagtcacacccagactgcctggcgcctgagctcggctgcttgtcccacaaacaaggctactctgaagcatgcatggaaaaggggtaggagcaagggcaggtccctggggacactgagtcccatgcagtgacagcagccttgcccatgcacgcatagaggaaatggcgtgcctcttcttgctgagcctcggtgtacgtgcttccccctaaagcccacttcttatccccacataccaggtgatgtagtacctccctccacccgcctcgccacgtttgggctctgtctctgtcttaagagctgtggaagccaccaaagggttaagtgtgggattatgtggaatttgtgtttccacctgcctttagggctgcagcaggaagcaatggctggaagggaggaaccagagcaaagtggggccacggaaggggagatgtggctggctaccttagccccactatcagtgcaggggtccctgggaccatcggcaaacccggcaccaagcactgaggtcagcctgcccccgggaatggcaccgggggaggaggagatgcccaggacagtctccaagggagtgggcaccagccagagttgggactgggaggactctgaggaccccttccacacttttccctgcgttgagattcttggatggcacaggcccatgagaccatcaacaatcccaggtctcaagaggctgggccccaccctgagccaagcttgcagaggaggaggagaagtgctgagggaaggtgagcacagccaggcacccaggaagacaggagccacctggtcggaggggagtgatggaaggtcagggttcccacccatcagaccacagcttccagccaggacagcttgggcagcagtagtcataggagacatctggaggctgaggcttcccacgcggccctcctggctccattggatggcaggctccgggcagacgagctgccaggtgggtgtggggtgcaaaggtttggagcaagagcgccatggggagcctccccagtgggacagaagcacaggagtgagggggttgggccctgaggagatctcagtgtcacccgcaacggctgcagtgcacggcccatggagaaaggacattgtcaggtgagacgtgggcttccaaaggccccaggctgggggttccgagtcctctgatctttccctgaggtgctcctttgaggcctgtggcaccctgggtatgtggatttccgcctcatgtgtccacctgacaagcacttctcccctggactcctgtgcctgctccatcacctgcaccctctcttaattagcaggttggagagtggggtccacattgaatgggacgttgtgttgactcagaattgctcccagctgtgaggaattgttaaacccctacattaaaacgcaagcagctggcattgagcctagggacagaaagaaaagccggcccctcagcctcaccctgcccccagggtggcctctgtgagccaaagccctgaagtggaagagcctcaggaggaaggcagtctgagccatgggctggcagctgcaggaagtacagctcccgctcccagtgaggctgctcccacttctcctgctcaaacctggggctccaggagaactgtttgtaaagactgggggaacttctggaagaggagtgatatctctgtccactccagggctccaacactcccagcactgtgccaggacatggcccccacttaggatgaccgctgcccggtcgggctcccctaaacgcagcctctgtggcaggcctagcccgagcagccctccctggaagccgtgtgttcagcttcccttctctccagctcctgctgcctcctctaagacagggcaaggggcaggcccggggtcccctccacttctgacatccagtcaacttggatcaggcctgcaggcctgggtgagttcctgggactctcccaataaggttttaaaaaatctttatactttaaaaatttctgccgggcccagtggctcacgcctgtaatcctggcactttgggaagccgaggtgggtggatcacctgaggtcaggagttcgagactagcctggccaacatggtgaaatcctgcctctgctaaatatacaaaaattagccaggtgtggtggcgagtgcctgtaatcccagctactcgggaggctgaggcaggagaattgcttggacctgggaggcggaagttgcagtgagctgagattgcaccattgcactccaggctgggtgacagagcaagactgtctcaaaaaaaataaaaataaaaaaataaaactttcttatcaaaaaacaagcaaaagccgcctcgtgatctgatctcaccctaatgctacatcctctttgtgtctccatctgtgaaagggtgaccagccttggttctatgcagggtgactgtgaaaatgccatggctcatgggggccaaacatggtggtagggcccactgtgaaaagggtgaggctgggctgcacaggctcagctgcccacaaacagctctgggggctcttgggatggctgaggctgctcttgatgagctcagggaagaaacacaacagagactggtcaaaggagaggacacagccttctgcccaatgtccaagagcccgagcccaggaatctcccttgaaacacacactctcacacacactctcacacacacacatgctctcactcactcacactcacacacactcacatgcacacacactcacacattgacaccactgtcagctcagaaatctcccttgaaacacacacactcacacacatacacattcacaccaccatcatcccagaaatctcccttgaaacacatacacactcacacacacacacactcacacacattcccaacaccatcccagaaatcttccttgaaacacacacactcacgaaccctcacacacactcacacacacacgcacacattcatgacaccatcccagaaatctcccttgaaacacatacacactcacatacacatttacgccatcatcccagaagtctcctttgaaacacacactttcacacactcacacacacacactcacacacactcacattcacaccaccatcatccagaaatctcccttgaaacacacacattcatgccaccatcattccagaagtctcccttgaaacacacacacacacacacacactcacacatacacattcacgccaccatcatcagaccttcgtagatagacacccagggaccttggtctgagtgagctggcggcatggagcgactgagcatgtgcagctcccacatcgctatataaagatggggatgaactctgtggctgtgagtcaccataactgcgacactcactcatttgcgcttcaccagacacagagcaaccgccagccccaagagcagctccaggctggatctgcgccggacacaggagaaagcagcgggtaggctaagcaggggtgctgaggatggaggaaagttgggaggctgagcacagctgaagtcctgagctccctgtgcccttgacttctctgtgggctcgagcaaggaccatcccaactcaggatgaaccctccttcggggccaagagtcctgcccagcccaacccaagagcccagctgcatggccaccccagcaccacccagctggtgggacagctcccagagcagcatctccagcctgggccggcttccatccatcagtcccacagtaagcctgggcgagcatgtgcatgcacagagccttccctgaccccttcctggtcccctcctggccacacacaagggctttgacagggagatagaaaaggtctgaactctgctgtggggccttgagccattactggacctctctgagcccgcccctgataaacaggctgatagaggagggtgcaggcaatgtccttcctcatggagagcattcaaggaacagaaatgccagccctgaggacaaggggctggaatggccagacctgtccttggctgcactcattcctttcagaggttgctcggatgccccatggagccctccagggaggagggcacaccctgggcctctggatctgccaagcccacagtgaagccttgggtgccttctgccacctccatcatcctagcccaggcccagggccatattccatcaacaccactgctacctggggaaggccgagggcaccctcaggacctggggatgctggcccaggtgctggacaggatgggaaggctccggtagctataggggccactgcggcaggacagagaccaagccaccctctcttccccagaaaggggttagggtgggaggagtctttaaatccctttgtcctgacctgatatggtcatgacctcccttcagtgaccctgggaggcctaagctttctttctaaagggaattcccttcattttcatgccaggcatcaaggttagctgtacccagctatgctattgggcaatgcagcttctcctctaaggctcagtaggggacgggactcttgagaggggctccacccgactcaccaccccagcgtctagaggcctcaaaaactgtcttgggcccttgggctggagtccatactgcaggcagggatgcacccaggagttggctctgtcttctccctaaggaaagatagggtgacccgggccatgtccctgcttgccagtcacatgtctgtctgtcctaccagcctccagcaggtgatctgagcccactcctagaaggcccctgtgccatgttctaggagcttgggctggactttagaaaggacctgcacttcccttctgcttttggccacttgtgagctgtgtgtgcaactggctttgccactctgagcctcagttttcccacctgccctgttgagaatcctaactcttccttctcaggactatttgaaggtgacaagcgataacatgattccctcgtttctctgtctctccgcaggcacctgggacttgggctgctgcctgggtccccctccccacggttgatgttccagaccatgcccactataccctgggcacagtgatcttgctggtgggactcacggggatgctgggcaacctgacggtcatctataccttctgcaggtgcctggttggtggtgctgggcccagggcactgagggtggcagccatgcagacagggaagaaaatgcaggcaggaatgttgactctagctctggccagggcactgttgaggctaggcaaggagggcagggccatgccttcgatgatctcaggcccagaccttcctgaaggtcacggaaagggccaaaaatggtccagggagacttgactgactggcactaattgagacccaggtgcatcctctgtggagggtgtgtgtgcccagagtatgtgggtctctgaccattctgccctgctctcagcgcacctctccgtcacctgccccagagagcatcctccccctgcgttgaagagcagctctaggccaggcgtggtggctcccgcctgtaatcccagcactttgggaggccaaggcgagcagatcacctgagatcagggttcgagaccagcctggccaatgtggtgaaacccccgtctctactaaaaatacaaaaattagccaggtgtggtggtgtgtgcctataatccaagctgcttgggaggctgaggcaggagaatcgcctaaacctgggaggcggagtttgcagtgaaccgagatcatgccactgcactctagcctgggcaacagaacaagactccatctcaaaaaaaaaaaaaaaaaaaaaagagcagccctggggaccagcatcctcaagtccctcaaacacccctgacacccacccccagtgtccctctccatctgcccccctgcctggctcagtggctgagacaggcaggtggagaagggaacccaggctgcagggccacacagccccctggctctcccacctgccagctgaaggactgggcacgtcatttctcctccttgagctcacttttctttccgcaaaacagagctgtgcttcgtggagtcactgtgatgatgcagtaagttcacggatgtgcgttgccccacagatgagccacttactgagtgctgtgcaccggagcaagtcacttcatgagtgggagcatcttgtctggaaaatggggacaatgacgcctccctcagggtagatgcaaagatggatgatgacaggagccgaggctggtgaaagtgcctggcccggccgtggtgcacagccatcagctcctctgcccttggccatccccaagcatgaggattacagagacagtgtgcagggcagggtccaggcaggacgtgacactggagggagagtgggagggggacccgcggaggagggaagcgtgagaagccatgggaaagcacagtcagggcacgcaggaggaggaacctagggagaaacctctagggagaccttggcctagagggactcaaggaaaccagtgaattggtcaaggaaatggtgtgagtcgtgcagaggaatttagagggcaagaagaggaaacggacatgacccaagaaccggcctgcgctgggccacgcctcaggttttggaaagaaactgccccctgcttctctctgagggagccgtcttggggtcctcactcagcagacactgctgggttcaacagctgcttggctggtccctgcccgacagtgggatagctctgtggcccggcagctcgtgcctgtttgcttgcccatgtgtgtgtgcatgtgtaagtgtgtggcacgtgtgtgcacatgcatacctgaggggtgcgggaagctctccatagctctggaggtgtcaggaagcgcctcctaacagcttctgatcctcccaggagcagaagcctccggacacctgccaacatgttcattatcaacctcgcggtcagcgacttcctcatgtccttcacccaggcccctgtcttcttcaccagtagcctctataagcagtggctctttggggagacaggtagatgctggggctcccttttgctggagggaggaggagggttttgacctggggatgccctcaatggagggtggcccaaaggaggtgatttgctgcttctgggcagagagtgggtagctgccctcagtcctgtgagtaagcaagaagggaagatgcagtgttggtcctaaggcctctgccagccttggccagatgtggcaggtggagggggtggagtgcgctcagtcctgctcttcctgtgaggtgaaggccagagcagagtctaccctgtccccagaccctcctccccaggactcagagcaggggctgtgcccacaggctgcgagttctatgccttctgtggagctctctttggcatttcctccatgatcaccctgacggccatcgccctggaccgctacctggtaatcacacgcccgctggccacctttggtgtggcgtccaagaggcgtgcggcatttgtcctgctgggcgtttggctctatgccctggcctggagtctgccacccttcttcggctggagtaagtgggctgctggaactggaaggggggcagatgggctgggaggggcacattcaaggggaagtaggtggacttgggtcagccagctggcgggagcagggtgcccaggagctacctgagcctcaggtgagatggacattcaggggacatgactggcagcaagggaaactgacactgccccatcaggggccaaaggatctcctgggcaactgatcccaaaatacaaaggctttctgggtggggcaaagtgacaggtacttctgatgctgtgtcagactaggcagggggctggggtgtgaggactctgaaggtggaacggtggagagcaaggtagtagccctcctggggtaagaccaggcctctggctgaagccctggcaagcaaaaccttgaagttatggtgagctttctgctcaaatctagcaggaatgggaggcagtgggctttgcaggccatcccagttccctccagcttcctcactgcatgggacagggccaggtcagggccagggctgtgtatggggacccgaatgccacatacaaagctcctgccagataaggagccgtggtcagtgccgccccaaaggctgagcacctgccctggctcccaggcgcctacgtgcccgaggggttgctgacatcctgctcctgggactacatgagcttcacgccggccgtgcgtgcctacaccatgcttctctgctgcttcgtgttcttcctccctctgcttatcatcatctactgctacatcttcatcttcagggccatccgggagacaggacggtaagagccgagcatggaggggggctacaggagggggaccggcccctcggccaggcggcccctgacccaccactcacacctgcaccagcctaccagagcatgaccagtgggtgaaggcaagctgagcaagtgcttatggggcagcagtgtctaggggagcctcaggagacaagggcttctggggcgggcttttcggcatggcagagggaggagagaaggcacacagaatcaagagggagtagggggcagctgagacctcatgtcacagaaaactttctggaagtcagggctgcctgcactggaaggaatgacactctcacgagtgccctgcaaggatagtccagagaggctccccaacagcagccgtgaccctggtgctgactgccacccgactagggtcagacctggacgatgcgtccttcctagggctctccagaccttcggggcctgcaagggcaatggcgagtccctgtggcagcggcagcggctgcagagcgagtgcaagatggccaagatcatgctgctggtcatcctcctcttcgtgctctcctgggctccctattccgctgtggccctggtggcctttgctgggtaagcagtggctaaagggttggggaagaggctgaaggtgtgggggcaggagcaagaagcctggccagcctctccttcccagcccaaccccggccagccatcctcgcaccctaggaccagcttcacagcttattctctccctgggtaaggtgcccagccccggggtgggtggggggccacctagttcctggaagcaccagggcacatgcagaggagctctgggccccacaaagctttgggcggacggcctgccagccccctttggaacacacagttcctcttgaggtctcctccctctctgcatgggctgtggttacatgaccagaggtgctgcccatctccaggaatgggtccctgagagctgcccttctagccctttgtggctagagtctggggattgtgacatctgcagcagcacagatgcatgctcaacttcagaagtgtttttgagaagtgagggctattaaaccctggaagtgtttagataggagaccttcttgtggaggaatggcctggtccccccagggccctactgtggggtttctctacaatagccagggcaagagagggcatcacggttggggtggggtgtgagaagagctaggcagagggtgcaagggccagagtcaatggggggaagtgggatatcgccagcagcacaggctccaaggaacagtggacctgggaacctccaccccaaattcggcacatcttccttccagagctgcaccctcaaccacccactgctccctcctactcactcagatcagaattctcctggcataggccaggcatggtggctcacgcctgtaatcccagcactttgggaggccaaggcaagtggattacctgaggtcaggagttcgagattagcctggccaaaatggtgaaaccccgtctctactaaaaatacaaaaattagccaggtgtggtgacgggcacctgtagtcccagctactccggaggctgaggcagaagaattgcttgaattcaggaagcagaggttgcagtgagctgagatcacaccactgccactccagcatgggcgacagagcaaaaaaaaaaaaattatcctggcactgccaattcctccctatggggctgacttagctgtgctggtttgggctggattaggatttgggctttggcagggcctggcccagaagagaaggtgtgtcaggagggccagctagcttggggaccacaccttctctgtcctaggtacgcacacgtcctgacaccctacatgagctcggtgccagccgtcatcgccaaggcctctgcaatccacaaccccatcatttacgccatcacccaccccaagtacaggtgtggctcttttccagaaccccacaccttggcctccaagggcctggcctgccgatgggggcagaggccaccacctttctgtctctcgtgtgtgtgtagaatgggggccaccagcagctgggagcggccaatgacactgagtggggtctggagttggtgtgcctccctcccccgccccagcttcccaggggtcacggtgtggagggaggtcagggttccctgggcagtgtccagtcctaactatgggaccttcagacctggcgtgtagggcagccaggacagccctgtgaatttaagcacccccccgccccgccctccccgacagtgtcatcctgaagaaatcacagcagggagagctcagctctgctcccagggcctggcaggagcctggggtggctctgggccagtatgcatgctgatagcaacccggcaaggctgcttctcccttagtgcttccttttgcctggtgatgtcagtcactcaccaccttcccaaggccagtggcaggcctgagcccgtccagcacagaggctgctccagagtgtccctggtctccattaccagagatgtggcttgagccagccactgagggctggaaccaacatccccaggctctccctgcatgcctaccacccagaatctctctgtccctcccaccagccttgtgagcctctcaatctccccacccagcatctgtctttctgtcctcatcacctgccatggttcccagggtctgagcctccccatttccccagaggctctcggtcaccgcacattaggcctgtaccagcctgtgcacccatcccctcccctgcatctgtctgcccatcccctggccctaatcagatgtgtggcccctgcagggtggccattgcccagcacctgccctgcctgggggtgctgctgggtgtatcacgccggcacagtcgcccctaccccagctaccgctccacccaccgctccacgctgatcagccacacctccaacctcagctggatctccatacggaggcgccaggagtccctgggctcggagagtgaggtggtaaggatgctgggccctcaccagcttgcgcctggccatcccttcctcaggcagccctggggctctggggaatacataggccctggcagggctgcctctgagactcagggacactgaagacgctggcaccctggcaggaagagcccctcccaacacccccatgaagttcgtaatcctccctgataggcaggggcactagggccagagcggggatggtttgggggttcccaagagcggggccaggattgaacacaggtcttccaactccaggccatccttttccatgctgacactctccctagagccgcagcctgaagagatcagcacatctggctctagatagggctccagagagacaaggcaggagttagcttggagctccttgctcctcagcattaagccccctcctcctgggagacttgaagagctcacgggatgggcatgggccctggagatgggagatgtggctttgagcctcagcttaccatgtgctcactgtgggagcctgggcaggtcacttactccctctgaggctccacgtcctcctctgaaagggaaaagaggcttctcagatcaacgctgtccaggtgtgcccagggatgggtgtcaaccttcctcggggccaggtgtgcccagggatgggtgtcagccctcctcagggcctgcagctctgcttcccctagatgtccccaggaaagctccgtgcgccaccggctcctgttcccaccacacttgggctcctccttaattctacctacagagccctctatgggcctcagcaagactgccgccaactgaccggccagcgatctcctcccactgcccacatccctggggttctcggttgagggactgagagaggagctgtcagaggtccctcctgtaaaccactgtagtgaataacaaggagaaatctaatctgttattggaggcctagaccctcgtgaagaccacccatctattcaaaaatataaatagccactttcttagcaaggtgtgccggtgtgcagatggggagcaaacctgcacacacatacacacaccctaggacaggcatgcacaatttacggggtttatttggtgaccggcaacggtgcaaatggtgtcaggggcctcccgcaatgaatacctgttgggaggatgaaggagggcctggtggggtaagggcaggagcaaagctacggactgtccctctcacctcacagtcactctctcacctccctcagggctggacacacatggaggcagcagctgtgtggggagctgcccagcaagcaaatgggcggtccctctacggtcagggtctggaggacttggaagccaaggcaccccccagaccccagggacacgaagcagagactccagggaaggtgactgggcccggtacctgccaatccacaaaggggtgggggttaggggccagtagcccagggagaggccaggaaagagagacttgttctcatgggcaggggcgatatcctccaggaatcacctgctcccagcacctcccagcttttccttgtctgcctggggttctctgtgactctgagatgctctgagcagggcctgcatatggtctgcacatgtgtgtgtgtgtgtgtgatcatgcaactctgactctgcatggtgctgttggctgtgctgtggcatgataagagtacatgtgtgtgttgatgagggtaggaggtctgcagccgtcagagcatagctcgagcatgtgtgtggccatgtgcccagcacatgctccatcactgtagcacctggcacatgctctgtcactgtaacacccagtgacacgtgactaagcatgccctaatgtgtctgctttaagctgtgcatgtgactgagtgtgggtggtatgtacctctctgtgtgactgcgaggttggacatacctggggaggaaggggctgtaagctgtggatgtgctcaccataaatgccctaagatcaggatgtcacccggaatacttgtggctattaaaagaaggccagctgtcggcccaagtgcctatggaacggaatgttgatggcgattagagaaggccatattctggaacactggaaatgtcgtgtgcacaggctcccaagcagcccttcgccccagctgacagctccccatctgcccctcctgtcacacccacacaacaccctcagctcagctcctgggctctctccagcttccctagctagtccaaggccaaaggcacattcctgcctgcctttcttcctgagtgctgtgcccctgtgcatccaagaacgaaagccctgggctgtacctgcagtcggggagcctcagcctccctcagcattccccccgggggccccgcaccctgtcctggagcccaggcactgtgcatgccataaacgccaggacaaaggcctggcagtgacccccaggctggccaggcactgatgaaagacacagtgcctgtcttggagggataggctcaggggggttgctgggcagccatcaacaatcaccaaacacatgtgataagcgctgccattgaggtgtgagcacgcagggtactgaaagcagaggcaagtccctgaggttccccaggaagatagaggtgaagcagggatctgcaggcagcaggggtggggagtggggggaacactgagctgtccaggatgaggatacagcctgtgtgactgtgcaaacacaggggcacaggggagggagctcaatatgtcctggaacaggatgtctctctgtgaccctgggagcagccagagggaccctggggattggcagtgggggacataggagaagggaagaggaggcggaggtggtaggagcagtgggaaggccccatcagggactggcttaggtgtctccagacctgacctggggacaggaagccctgggagggggttggttagctttgcagggtgaagaccaaagaaggaagtgctgcagggcaggaaagggatgacccatttaaggacagcaggagcgggggtgatgccagagtctccacatgtggaagagaggagcggattggatggtgggggtgaggatgggttcagttgtgaccccgggagtcaagagcccggggagcatcccaggagatgctctgtaggcagcgttaggcgttaccagctcttactctgggatgtggactctgggaaggcccatccctgacccaggacacaacctggcccttccatgcaacctcccccactgctcggtgacccagtgtgtggagggtcatcgggagactgcccccagtgaactgctcctcagctaaacagatgtgtgctgtttgtttgcagaccaaggggctgatccccagccaggaccccaggatgtaggacgcccactggctctccctttcttctgagacacatccagccccccaacgtctccctcatatacacagacccaggattatgctgtgagcctgcaggctttggaagtggccctgtcacccgtgctgcacgggattcacagccccagccccatggcccctctccacacctcaaaactcctgccccataacgtcctccgcatccactttccagctcagcagccgcacccgaggctcagcctgaggggtgtgtgcccaggccctcccacttcccgagttgtctgcctctcctcaaatgctgtgtgctgcaattgtccaggcgatgacaatggtgatggctccagagaacacaccagctatttatgagcctctgcccccaggctgggcctgtcactggcataggaaggccagccccgcatctcccactgccaacagctgaagccgagcacagacctccctttgcacgctggaacagttactcacctgtggcttcttcccccagtgtaccgttccactgtggcccacattcttgtgcacgcgggcatttgcaggcacgctctcgcgtagttacctatctgaatgcacaccaagcacatgcgtgcacactctgcgtctgtgattcatttcatgtagtggtctaagctcctcccagggctgtgtggatctgacagggtataggaaaataaaaagcggagaaggtgtcttcagacaaatatggtctctacgtgttggtgctgctatgggagagagaaccagggcctggcctctgatgcctccagcaacttcacttcctctccttcctctgtccccactcttgggactctcactctgaggcccacctcaaactgcaaggagtacagcagagaagggacaaaggccaggctggcctccatccccactcactccccagtgagccattgaactccgcccagaccatgggtaccagctgctctctgactggcttcacatctcccgagggaggcggatggagggaggccggccttcgcctttaagagcactctcctgccacccctccctttccccagaggcgagcttcatcaggcaggagccagaggccagagagacagcgtgcagctccaggtacagcctcccccagctccctggccctgagggtgggtgccttccttctcccacactggttatgccctgctgctgagtcctccccagcctggcaggatggacaaacacccctaggaaagggcataaggctggagttagggatgaatgacatggggctttgcagagagggatagggaatggtatggggaagggatgctggccatggactgctggcctcctgggctgggctgcatgatatagggtgaaggaagtgattaagcagggaaaaggacacaggtcttttcctgacttcttccacttgatagttttgtgactttgggcaagtgacaaaacaaccccgtaatatgggtgatcctaccttgtaccttgcatgtgccaggccccaggagtgaggctagaagctgagaaatgactcacacccaggcctctactgactcctcagggtccaagccagacccctccaagagggccagcaagcagccaacccagttgcctcccctgagcctcagtttctccaaccaaggagccagggtgggctttgatctatctccagaccacataggggcctgaggtctttcttggggaaggggttggcccaaagaccgcactggcagaagtcccaaggtgctgaggcccccatccagaacacactgtctctggggtacaggctgaacatgccacacgtgcttccccctccctgcccctcctggccctgtgtctagcagctgagcaaatggcgtctcctcccttctccctgccccctgccattcctgcgcaaagggcacggggcctggcgtgtggcactggcagctggagctttccatgctgccgtcaagttttccagagcacaaagacaggagagccaggaataactggctgggcccccagagggtctggaggggatgggcctgcctcagacctgctttcagaccctatgccaaggggtgcaggcagagggccagctgcccaggaccagggctttgggaggcttctgtggctactgggagcccattatctggcatgcattctgtaggaatcagcccaggctccagtgtgacctgggtccactccttgtgtgaccttggagaagtcatttaacctccctgagctttgtctcctgcgggcccaggtggcagcttctcaggatcccagggagtgaagggcccatactgaggttggctatgcccagagctgctgttatgatgatcgtttttatggctggacaaccctgggccagtcacagaccagctggaggctcagctcaagccaaggcacctccagggccccatactggataaagcacaaccccagaatcctggccagggaccacacggcagcaaagcccctacccaagggagctcagcccctggtcttctgagcaagaggatgggtaccactgggcaggaagagcgagtgtctacgctctccagaggacacaggagcaaggagaccagagcattctcaccaacctggccagttccccttcctcccccctggggggtgctgggtgccggacacccctccccaggggctatattagccgtgtgagtcacggtggaccggctgggaggcggcaggctggcaggcacagtgtagggttacagtccatttatgggcgcagccgaaggcagatatcagtgtcgatggcattcgctcccagctattcttaggagcctctcaagagctccacgcagcccagctgggcagcaggggacagaacaggcaaggccgggggtcaggggcaggggcagaggtgtggaccgggcaggcggagtgcctgagtgccctctcactcaaccctctctaccctttgtctgcagaggcggccgctgacagcaccagcatgtcttacagtgtgaccctgactgggcccgggccctggggcttccgtctgcaggggggcaaggacttcaacatgcccctcactatctcccgggtgagtgcaccctgccacagcctggcacccgatggggcaggcacgcttggaggagggcatgtgtgtccgtctgtctgtctgtcctttctgagcctctcagaaagcagagcatgccccatcccctgggactggcctggtcctctggtctcagccacagctgtttgctcactggagcgcgccggcctgttatgcatgtgagacatcatgagcaggtggtaggtgtttttagcagagaagaaaatgctgagttttcaggcaggcaggcaggcaggcaggcaggtagctggacagagagtacagcaccttcctgatccctttactgttagagtgggctcagggtgcccccaagccttgagcatttccctagatatgggcagctgctttgggaagggagtattcccagcatggagagggcaggtgatgggcagttggatagatggacagacagacggttgaccttggctgcccagctgtcagagtgtggggctgggctggactgagtactgggcacccgctccatcccaaacttgagacaccaagaccctggctcatggggctgggcgcttctccccattcaccatggctgctttgtctgtctcaggtcttgttccccacaagtgctggggcctggtgagatggccccctatcctgcagtgtctgtgatggggagcagcatggcctgatgcagatgacacagaacatcaggggttgtctgagtaactctaccgcctggctggagacagcaacaccagagaggcagaaagttagccatgctcctgaggaagcactccaggagcagggactgatgggggaacagcccccagaccgtagtaggcactccgtcagtttctgtcaaacaaagagactccccagcaaggcactggtagacccagggctgaaggccccaaggctcagggcgaactgtgaggcatacagggcaaggacaaccctgcctggtggctgagcccctgaccgtgctgttccgggcacaaggccagagggggaggcccccagtctgtcactggagggtggtaggtaggcaggggtatctgggctactgcccaccaggggaacaaggggacagtttcttctctggggccttaaggacttgccttgggcctgggggctggaggaaggggttggaggggaagcactgaagtgggcaaggcctgaaggggcttggcagaggggccagggaacctgggcagcgggtcaggagccaatgcccccagtggaggagtaatcttttttttgttccacgggtacttgaggggaccccagaagtagaagccccacccagggatgccgtgagagccttataatagccatagaggccacatgcttacaggaggggtgctggcctggctctggtgcagggaacaggccctgacctccatccttcagttgcagatgtggcttgttctaacctggagattccacccctccagatctactgccctggagaccacagggtcctgggcacccacagccttgcacactttgcatgaggtggtgacctgtgagcatgtgagccccagtggatttcccactgccctttcccacagctccccacccccatgcttgcaggactccttcctgtataaggtggagcctctgtgtgctctctcatgggccctgtggcctcccctgcctgggactgagcccacatctcccccagctccaccatctcgaggcctcctgctggtgctccctgccctatccctatgggtgcaaattggccactgggctcagtggcactcaggatagccaatgacctcacccagggtctatgtgccacctggccccggccagccaggggcttaaatggcagcccagaagccttaagctagatagcaggaggaatgtccttactctggggagggggtatgcagggatgtgctggatccaatgactgtggggacttctaaaaatagaacccgaagctcgggcagggcaccgggggatgggcatgatatggcctctcggcttcctttaggggcataccccaaatcacctaagccgcggagcaggctggactgggtactggagccttccccagggctcggagcctcttgagaaattttggtggtaggctgctgatagcctgggcttgtgtcctgattcagtgccgctggcagggcaggccttgtggacacagccctgccatcccaccagggctgtaggatttactgccggggctcgcagggcccttctgcaccagggacatccccctacgggggaggcatggccagagctctctggaggaaccccactcccaccccagccaggacctgagcctgtgccatagggcaccagaggcaagagtgtgtgaccctgtggggtgggcaggcaggcgaggctgggatcgttacctcgcttcagagcctggcaaactgaggctcgagtctgctcacaggacagggatggccatgggtggatctcctgtatcctgtcacccctaactcccatgctggcttgctcacccctctaactgggactaatagagaggcactggggagggtctgtcccctctcagctgcaggtgtgtgctgcagctcctcctggaaggacacaggccacctgcaggctgggtggtggctcccgggggctcatggcagcaactttggggcagcagcagcccctcaaggcatcccttcatagggtctctgcttgcagacccacagagaagggagttcaagagggagactgggaaaggagggtggcggggaaatgcctttatttatcctggacaggtgtggctgggcctgcaacatgagctgccctttcaccccaccccagccagttctccaggaagtggagaagggggagcagcccagagagggagcagctccaaaggcctctgccctggcagctggccagaggctggggctgtggtctggggtctcacctcttcatgcctctcatgcctccgccttggggaagaggagtatgctttgttaggctctgctgctctcagctgtgtcacctcagaagtctgtttacctgctcggcctcagtttttctcacccttaaaatggggatagcaggctgggcgcggtgcctcatgcctgtaatcccagcactttgggaggccgagggggcagaccacttgaggtcaggagtttgagaccagcctggccaacatggtgaaaccctgtctccactaaaaatacaaaaattagccaggtgtggtggtacatgcttgtgatcccagctactcaagaggctgaggcaggagaacagcttgaacccaggaggcagaggttgcagtgagctgagatcgcaccactgcactccattctgggggcagagtgagactccatcttaaaaataaataaataaataaacaaataaaatgatgccttccacacctgtgagagctctttctaacaggcacttgtgaaaactttccacctgttgtctactgggactggttgtgagactggtggagtcgggggctgagcctgggcccaggaggggcctgcctgtctactggaaaccctctcttcctagggtctcagccaccccgcctgcaggctcacctggagcaccagctcagaggcctcttctctgtgggtttcggttccagtatttatcagactctcccagctgtggtgggaacatgctgaggacagagggtctctggggagaggaagggggacaggctgagactattctggggtagctgtgccggcaattcctggaatttcggggccgctggagcacgcagtgctgtttcttgggcagctcttagcagtgctgacaggccgtgctgtttatagccgcactgaaggtcaggcaagcctccgagggcttcagtggggctggcaggggcctccctgcaacatctatcaacaggggaagataaacggccagaggctcagaggctcacagctggggaatgcattcttagaggtcccccaggccaggtcctccgggctgctcagaactgcatctaactctgtgagggatccaaaaggagaggacatgaggctggctgggtcctggggaatgaattggacccttggaggcccctgggccaggacaccgtgcaagggcagctgcataagcagccccagggctccgggcctacagatattgtggggtagccagtgtcaggactgcagggctgtttgagaaaggctgggccaggctctgctgggggctagctccccaattccctgagtctccttccctttctgcatggtcccctctcatccagaggctgcccctgactgcaaagaccctcctctacactgagccctcccacccccaaacacagctttggcacccctttgggaccaggctccacctctgcccaggaaccatccttggacacaagaatgggccttgctgggggcccttgagagccagtgcccatgagggcattttattggccacacccaagacccaaatggaactgtggacctggacaggaggaagagaggcaggagagactcaagagacacttgaggaaagccaggggaggtgtggtcagctacagagggggcagtgacccgtggctttggacacagaaggtcattgatatgcgtggaataatggggccaaaggcagacggctgtgtgtgagcaggtgggaggcagcggcagtgggggcaggatgtgtgggtcgcttcttggaggagtctggaggtgcagaaaggagacatgacaggagccagttggagccacccaggcaggcagggagaggctttttgagcattgaggggactccggcttatttatcggccagggtggagttggggagtgggaccacggggagacagaaggttccagtgagagggtgagcatgagcaaagccccaggggaggccagatgggaaggcagcagagcaggacaagacagtaatttaatcatacaatgaaaatgcactttgtcccacctgccccaacccaggcaggcagcctgggagtgtggggagggggagctgctgaaacttgtacccttcctacttatctgccacctgccccagcctccacccaccacatctacactggcacatctagaagaggaggaaggcaggggcctgcctggtttgaacaccgggagtgaatgatggccagaaacgtctgcagagcccagctgctctctctgctgccagggaactggggaaataggagccgatggcatgggtgcgtctgaagcctcactggcgccttctttcccctgggcctttgacagaactttcctcccctccccccaacacccaggcccctctagggacagcaggctggctcagaactggtcagtcagggctggctcctcaagctccaccctctgccagctgtggatcttgtttcctgtggagcccggggatgtagccagccagcctcgcaccttctgggggtagcagatggggtcagcactgtgcctcctggatttggagttttcctgaaactctctcagctctgcaccctccttacataatcccctgtttaacgacataatcctcacaacaatcccgagaaaggcattgtcattctcttgacactggagggcttggaggctggcaccgaagtcaggggcccggcccatactggcacctgtgctcctcctttgctgcctccccgcccccagcccccagcactcacaagtggctctggcaccagctctccctgggctgcccttggaagtgccctaagaccttggcccagcaaggcggaagggctcctgggggcagggagctgatcttggcctccaaacacctgcagcctttcttgggggctttggagacaggagctcggtgccccaccctgaggccattctaggctgcacccagggttgggtttccagggtttagaggggcccattggcgggagaagactgaaatgtgaagtgggaatgaaacactcattcaagggaggcatttaaatgctcaaaggcggctagaaagattaaaaagaaaaaaccacagctccaaggagttgggtgctttgggccctttctgaaacacagaaaggaaagaggaggatggagtcagacaagacagacgtggaagcatcgtgcctggactgcactctccatgagccctggactctgggcaagggtctgagggtgcccccctccaacccacccaggcaggctgctcctgaggtggggtgaaggcatccgatggctcctgatcatccatagggtccctgcctccatcctgcctgaagcacctccctagaggaggatatcagcacccccagcccccaccctgagggatgttggaccctactcagggcagccaaaggccaggccagctgagccctgacaagcagacacagctgcaggggagaggcactgggcaggggatccagctcagccacttccctctggtcagaggcttggctactgaccagaccccaggaggctgagctctcccttgggagcaagcatccccccggcccatacctgaggatgagggagagccaggcaggtctaggtgaggggaagtgaggagacctggtggggagggctggtgcccgctgacccatgcctgtgggagaaagatgtctctgaggcagctccagagggaggacagtcagatagccctgcagagggcccctctgatctggccccagcctctcttggatatcattctgttgcccttgctcatgctgtcatcatgatcttctggacacaactcccatctttcctgtcagcatctcctctgtgaccgaggccacagcctttctgcgtggggtctgcaatgacccagccctgcagggggacgaccccttctctgtagatgggcatttgggggtgccctgccgtgagagagccttgctgtgggggtgtcctgctgtgggggagccccatgggcagttcactaggacagaacagacattgcaaaattcgccctggaaagaagtatgctggtacctgcaactttctttgaaatgcccggcaaatgagatggattgatggatgtggagggatggagtgtgataaagcaaagcgagtgaaatgttatggtacagccatggtggcgggtgttcaggtatacactttagaatgttttctacttttcctgcctagaaatctgcaaaaatgtctataataaaatgttggggatcacatagaggagtagggaaagttgattttctgcaggacaggcctggctgggcagctcaacttgcccccaggagtcccctctcagtctagaaaactcttttgctttccttcactgatgttggtttttacactttgttcacctctacactcaaggcagcaatacactcctgtcattaatagaggctatggcaatgagtttgggggtaagggctatgtgtattttaagaaatctcaagtagctctaagatgcccctgcggggcctggagggcaagctggactttgcaaagcagatgctgtggcttcctggcagtccagacgtctgtttctatattgtcctttcctgtctctgcagattccagggcaggggaaggggcgctgtgggcacaaggtggccagtattttaagagggcaccacaggctgggtgtggtggctcatgtctgtaatcccagcactttgggaggctgaggcaggccaatcacttgaggtcaggagttgaagaccagcctggccaacatggtaaaaccccctttctactaaaaatacaaaaattagccgggcatggtggcatgcgcttgtggtctcagctactgtggggagactgaggcagaagaatcgcttgaacccaggaggcggaggttgcagtgagccgagatgatgccattgcactccagcctgggcatcagagcaagaccctgtctcaaaaaaaaaaaaaaagagaaagaaaaaaaaaaaagagggcaccacagcccctagggctgaaatggcaggttcacagcaattggagagggctgtcctggtcttgctgtcatcacccacgtggtgtagggcagtgtttccgtgacccgtaatgtggtcgtgcagaaacaactcagttcctgggctgcatctgcagagcccatctgggaatgggctggacactggtgactggtgactgcagggcatcctggtttggaaggggcttccctgtgaggggactggcaggagcttccacctatgtctgtaagcccagagcctggccagaggcccacccaggcttggcacctggggcaagggactgtccccagagcctctctgggctccttctaggatggttctcgggccttggcctgaatctagcttctgccaacactaggagctggcttggtccttgggttatagccaggaaggtgactgggatgtgcccagagaagcccagaggactggctggtgggcatgtttgggaggcaaagccaaggaacacttccagccacagcttgtagggggtggggtccggagcctcctctttcctgtgatgtccctgaaggccaggcctgcatggcactcctcatgatgtcatgggggttggggacctccaacatggtatggtgggagtcaggtcataaagccattctatgtgatattagcaggggccagcccattccatgtgatgtcacagagggtacagccagagtctctggcattccatgaggtatctttaggggtggggctgctaatgtcactaggggccagccatcaagcctttttaggtgacattattagaacctctgaaattttgcatctcatgtgatattactgtgggcagggccaccaaagcattcagtgtgctattactggaggccgggggtgcagaatttggcatcgtgcatgatgtccccaagagtgcagtctgagccacgatgacatcccaagtaatgtcccaggaggtgtggccttcctgagattccatggggaattcccgggatggagttgcagtggcattctgtgtggttacactgaagatggggcctccagactgtaacattctgtggtattatcggggctcagggtttgggaactggcccccgcacctgcaccctgccttctggaggtatgacatcaactacagaaccctaagccctgccccatttcccagctgagtttgctcatccaggcagggttgtcggctacctcactctctccacatctgccaggtagcacaaagcacctggcactaagatgcttttgagtgggtgcatttatcctgcccttcagcctggcagtgtctctgggatgctgctgtgtcttagctgctgcatctcccttttctcctggagtctgaaaagtgctccatagctttgcagggtgcaggggttataagaggctaatcaaggttacaaatagcctgcagttttttgtttgtttgtttgtttttagacagagtctcgctctcacccaggctggagtgcagtggcataatcttagctcactacaacctccacctcctgggttcaatcaagagttcaagcgattctcctgcttcagcctcccgagtagctgagactacaggcacatgccaccatgtccagctaattttttttgtaattttggtgcagacggggtttcaccatgttggccaggctgacctcaggtgatctgcctgcctcagcctcccaaagtgctgggattacaggcatgagccaccacacctggccaccctttttttttttttttttaagaccgagtctccctctgtcacccaggctggagtgcagtggtgcaatctcagctcacggcaacctctgcctcctgggttcaagcaattctcctgcctcagcctcccaagtagctgggactacaggcgcccaccaccaggcatggctaatttttgtatttttagtagagacagggtttcaccatattggccaggctgatctcgaactcctgaccttgtgatccacccaccttggcctcccaaagtgctgggattacaggcgtgagccaccacgcccagcagatgcctgcaaatttttaagagacagagtctccctctgtcacccacgctggagttcagtggtgagcgatcatagtttattgtaacctcaaactcctaggctggagtgaccctctcacctgcctcctgagtagctagaactacagccatgcaccaccacaccctgccaaatatttttatttttgtagaaacagggtctgggctcctttgcctgggctggcctcaaactcctggcctcaagcaattctcctacctcagcctcccaaagtgctgggattataggcatgagccaccatgtccaacagcctccaaaccttaatggctcagaacaacaaaagtttctcattcatgcaacgtccaatacagtgctccttaatcatctctcctcctctccatgccctgcattcagtcagtcaacaagcagagagtgtgcaggatcacaaggatggttgctagaggcagacctggaaggagcatacattgcttccaccctcattcagttggccagagctagtcccaaggctgcagtcagacacaaagctctaagcaatgtggtagtcatgtgccggaaagaggaactaggcttggttagcagctggtactggccgtagcgaatgaaaaacacaatgacggcttctgttgaatactcccgggtgactcttccccaaggactggcctttcctcaggaccaccttccttatgctcaccccccacctccactatccaatcagatcacaccaggcagcaaggcagcccagtcccagctcagccagggtgacctcgtggtggccattgacggcgtcaacacagacaccatgacccacctggaagcccagaacaagatcaagtctgccagctacaacttgagcctcaccctgcagaagtaggggtttgtcagtggctggcagggctccttctgggcctctcaggcaggctgtccggtgacagcagccttctgctccaatgccaactccagcagtgggcagcaggcttggtgtgcaacttccgggcgagatgattgcccagggctgggatgaggccctctcaggctaccccctgactctttcccaatgtcctctggggcctc

SEQ ID NO: 740 - protein, 1021 aa, Homo sapiens
MTRKRLRLLVGTPAGKFLDHSPLGMKRAEDRTRLEHLHSGAGNGAQLWASTLSVKWLQQEAMAGREEPEQSGATEGEMWLATLAPLSVQGSLGPSANPAPSTEVSLPPGMAPGEEEMPRTVSKGVGTSQSWDWEDSEDPFHTFPCVEILGWHRPMRPSTIPGLKRLGPTLSQACRGGGEVLREGEHSQAPRKTGATWSEGSDGRSGFPPIRPQLPARTAWAAVVIGDIWRLRLPTRPSWLHWMAGSGQTSCQVGVGCKGLEQERHGEPPQWDRSTGVRGLGPEEISVSPATAAVHGPWRKDIVRHRATASPKSSSRLDLRRTQEKAAEVARMPHGALQGGGHTLGLWICQAHSEALGAFCHLHHPSPGPGPYSINTTATWGRPRAPSGPGDAGPGAGQDGKAPAPGTWAAAWVPLPTVDVPDHAHYTLGTVILLVGLTGMLGNLTVIYTFCRSRSLRTPANMFIINLAVSDFLMSFTQAPVFFTSSLYKQWLFGETGLRAGAVPTGCEFYAFCGALFGISSMITLTAIALDRYLVITRPLATFGVASKRRAAFVLLGVWLYALAWSLPPFFGWSAYVPEGLLTSCSWDYMSFTPAVRAYTMLLCCFVFFLPLLIIIYCYIFIFRAIRETGRALQTFGACKGNGESLWQRQRLQSECKMAKIMLLVILLFVLSWAPYSAVALVAFAGYAHVLTPYMSSVPAVIAKASAIHNPIIYAITHPKYRVAIAQHLPCLGVLLGVSRRHSRPYPSYRSTHRSTLISHTSNLSWISIRRRQESLGSESEVGWTHMEAAAVWGAAQQANGRSLYGQGLEDLEAKAPPRPQGHEAETPGKTQDYAVSLQALEVALSPVLHGIHSPSPMAPLHTSKLLPHNVLRIHFPAQQPHPRLSLRGVCPGPPTSRVVCLSSNAVCCNCPGDDNEAAADSTSMSYSVTLTGPGPWGFRLQGGKDFNMPLTISRDHLPYAHPPPPLSNQITPGSKAAQSQLSQGDLVVAIDGVNTDTMTHLEAQNKIKSASYNLSLTLQK

SEQ ID NO: 741 - DNA, 18129 bp, Homo sapiens
  source (1)..(18129)
  CDS (201)..(600)
  CDS (1348)..(1579)
  CDS (7449)..(7695)
  CDS (9249)..(9445)
  CDS (11445)..(11644)
  CDS (15328)..(15367)
  CDS (17779)..(17929)
  modified_base (7706)..(7707): a, t, c, g, unknown or other
  modified_base (7719): a, t, c, g, unknown or other
gactgggctttgtgctcagcccagctcatctttgcctgagacctaggagtggccccaggctctcctgatgtgccaccacgcttggcatctgctcctctccctgcccccatattcccatgctctgaaggggagttctctttcatagcaaatccgagaggagccgaggagccaggtcctttgttccagacccagaagcagccatggggacctgtgacattgtgactgaagccaatatctcatctggccctgagagcaacaccacgggcatcacagccttctccatgcccagctggcaactggcactgtgggccacagcctacctggccctggtgctggtggccgtgacgggtaatgccatcgtcatctggatcatcctggcccatcggaggatgcgcacagtcaccaactacttcatcgtcaatctggcgctggctgacctctgcatggctgccttcaatgccgccttcaactttgtctatgccagccacaacatctggtactttggccgtgccttctgctacttccagaacctcttccccatcacagccatgtttgtcagcatctactccatgaccgccattgctgccgacaggcaagagggtccttggggaagctggggggagcctccccactgagccggggctcagataagggtggtgacatgcctgtgattacacagcaagtttgggtagaaccatgggaatggcttcccaaatctggtcatggtccaaaactatgaatctggaaggcagggggactgtggagctgaagaaggtagactgagggttagacacagagaaggactttgcactagatgcactagacaggttgttcaagtctgtaggggaagtgggcaatgttttagcgaccttctgaagtgttctttcctggagttgatctttgttttgttgtctttatttcactccaaagatatgtcttatacagttttttttttattattccggatagattacacgaggggaaaatgttaagtttgcttgcagttacaatctaatagggccaattattttcccaacgctgctcagggctgagcttcaggctaatgttggatgcttgatcttgccctgagatgggcttccagtgtggctttcttgtggccgtccacgggcatgtccatgcccagagggaaatggtgggccgaggtgcctgggccggggttccaaggcatcagtgtgctgtgtggctgtgggagagtcacccagcgggctctctgcaggtcggctgatactatgatatcagcagatggcagcagtgcggggaatggctagaaggcgtgggcctgggttgggagagagggagacaggggaaagggagctgggctaacaggagggcccctgccgctcaagctgccctctgctcacaggtacatggccatcgtccaccccttccagcctcggctttcagctcccagcaccaaggcggttattgctggcatctggctggtggctctcgccctggcctcccctcagtgcttctactccaccgtcaccatggaccagggtgccaccaagtgcgtggtggcctggcccgaagacagcgggggcaagacgctcctcctgtaaggcctctgggggattgtggagggcaacagtgtgtgtgtgtgagtctgtgtgtgtgtgtgtacacacgcgtgcatgcatccatgtccatgcatgtgtggtgtgcatgcatgggtgtacacatgagtgagtgtacacgggattgtgtgaatatacctatatgcttagtaagcaacacacacgatgtagccgatctgtttttcacactttacatatattgacccatttaattctcctaactatgtgggatatatattatattattattcttaccattttttagatgaagaaactgaggcactgaaaaactaagtaacatgcccaaaaccacacagctagtaattcaaatccagctagtcatttgaatccagctatggattcaaatctaagcaatcctgcccagggcccaatctcctcaccactctgctactcaaatatgcacccttgcatccttagataaggatatgcatgcatgcacacgtgtatgtgactgtacatgtcacgtgaacatgcggcacccatttctgcctgtgtgtacacgtgcaagtgtgtgggcatatttgtagatgtgtttgcacacaggcacgtgttagggacatgtgtaggcgtgtgtctgggggagactctctatatgctcaggccacaaagcggcaggagactgaggcagaacgagtccatgatggagcctgggacattttcaggctgctgaggtgggcatcacaggctggaggcagggagggcagggttagaggaattcaggcatggcccagctgctgtgtgaccctgggtgagtcctttctccattccggcctcagtttctgaggatctcacgatgtgtctttgtggtccccaggcactgagccattgcttggtagaggctaaagaaccgactggggttctgggctcagtcaggcccaagtcgtggcctggtcccacgtggccggaggatgcctcacactcacgtaacctctgaacctctggctttctctctctaaaatgaggattcataatagtacctcgctctgtgagcataaatgagatagtgtacctgaagcccttagcaccatgcctggcacagaactggtacccagtatgtggcagcttaaataggggacacatgaaaacacacctgggggtggcagatccttcccacaaagtcccagctgccccaagcatgagggtgtgcatggtctgaggtgagggctgccaggtagccatggcaacacacctctcctccaacatcctccctgcctggtctccatctgtcctgagcacctgccaggagaaggctgctcttgtgggcttcagggatagggaaggtgccattcttctgagaagccgttcctggggactggcgagtctcgagggcaggccctgcccagggtctctgccccctccctgcaccccaccctctcacggagggcgatatccatatatggggaatgcccggctttctggctcagcaaagggtggagagcagaacatattgagaccggccacttggggtcggtatttctccatcttcatacaggaccactgtgcgtgccagctctctgagaacagcgagttccatcccagattcaggcgactgggaaaaacaggcgggcaggggtgggctaggaaagccatactttggtgttgcttaaaattccgaaaggatttggggaaagcctggttttaagtgtgagaatgtgttattgtttttcttgggggagagcctaatttaggatgagggctccatccacacaggctcatgtaactgtgtgtaattaggaatctgatgaaattaaagatgccctcttcaggaacatgcgcacacacccccaaaatcaaaatacaaaaagactacctttgggaggccaaggtgggcagatcacctgaggtcaggggttcaagaccagcctggccaacgtgatgaaaccctgtctctattaaaaatataaaaattagctgggcttgatggtgggtgcctgtaatcccagctacttgggaggctgaggcaggagaatcgcttgaacctgggaggtggaggttgcagtgagccaagatcacaccattgccaccagcctgggcgacaagagtgaaactccgtctcaaaacaaaacaaacaaaggcggtccctggaactcttcccctctgccttctgcatggagacctagcccagggtgaattcctgtcctgcacaacatcctaggagcaagcaacagaggagtgtggctcctgctaaggaaggacttagagatggcctcctccttttacagatggggaaactgaggctgagggaaagccctgacttgcctaagatcatgctttaaacaagaggctggacaagagccctgtactgactcccacagtgctgaccctcagaaaaggggaaatttggtcatgattaaatctgtagacgggtatgacacagacttcctgtgcctctctgggcctcagtttcctatctggacactgagataggtggccctgtagatcctcactctgtaaggtgatgggccctggccctcgttgcccctcctcccctcttatctgctccacactggggttctcaacccaaagcctacttgaggatcagggagtctaggagcgcctgaacctcttgtaattggcatgcttgccaaaagaacccaagcagaattctaaacacaagactttaggagagagatttactggagccattataatcacccagtgggttcaccttgcctgctgcctagacagaaattatttatcaagacaggggaattgcaatggagaaaaagtaattaatgcagagcctactgtgcaggagaccagagttttataattactcaaatcaggccaggcgcggtggctcacgcctgtaatcccagcactttgggaggccaaggcagtggtcaggagttcaagactagcctggccaacatggtaaaaccctgtctctactaaaaatacaaaaattagtagggcgtggtggcaggcacctgtaatctcagctacttgggaggctgaggcaggaggatcacttgaatctgggaggtggaggttgtggtgagccaagaccccaccattgcactccagcctgggcaacaagaacaaagctccatctcaaaaaaaacaaaatcaaatcagtctcccttagcattcaggaatcagagtctttaaagataatttggcagctagggccttggcaaatggggaatgctgattggtcgggttggagatggaatcacagggggtcgaaatgaggttttctcgctgtcttctgttcctgggtgtgatagcagaactggttgagtcagattacccggtctgggtggtgtcagctgatccactgagtgcaggctctgcaaaacatctcaagcactgatcttaggttttacaatagtgatgttgcccccaaggaatttgggggaggttcaaactcttggagccagaggctgcatgacccctaaataatttctatccttgtagctaagttgttagtcctggaaaggcagattggatcccaggcaagaagggggtcttttcaggaaagggctgttatcaattttgcttcagagtaaaatcatgaactgaattccttcccaaagatagctcggcctacacccaggcatgaacaaggacagcttaaggattagaagcaagatagagttggttaggtctgatttctttcactgtcgtaatttcctcgttatttttgcaaaggtggtttcaccatgggtccccttcccttggggtagcagcacctctagaaaggggcgcagcaagcctagcatgtggcaggtagaagcaggaggtttgggaacacctcagtcctcccagtaagaaagaaaaagtcaaatgacgggaccaggggtctcaggcccattggtggaatgctctaaggactctgttccatgaaagggacccccaaatgccaaaggagcccagacccaaagaaggaggcagaacaaatccagtttgtcaatattgggtgatttattgagggaatttacagaccgaagtgggatcttgggtggccacaagacaggtggagctctgcattctcacaccccagatgcaaggcttagataccatagggaaagggtattcgtgctccagcaagacaaccaaaggcagccctccagaacaggcaagaacgctacgtgagtcacagcctacgatttgtggagtaacatcaaggttgacatgttcttacactaggggcagtaaataaagtagaaatcagaaggcattcacaagactggggcgaatcggaagtcaacacaggggagtggcatccaagatggagtcacttttgtctccacaggttcccactgcagacctgccgaggagtcagtccccagcctgcagctcatcagagagaggctgcagcgtcactcataaaccagagatctgagaactggggacactgtcgtttttttgttttttttttttgacagggtctcactctatcgcccaggctagggtgcagtggcccaatcatagctcattacagcctcgatctcctgggctcaagtgaacctcttgcctcagcctcctgagtagctggaattacaggtgtgccccattacgcctggctaatttttttaattttttttaatagagatagggtctcactatcttgcccaggttggtctcaaattcctgggctcaagcagtcctcccatcctggtctcccaaagtttagggattacaggcatgagccaccacgcctggcctacactgtttccaaaaggaaatgaaaagcctcaacacaacccagtgtcctccctggggacggggtaggaagccacgcaatggtactctgcatcacttcctcaaaggtggtatgaaagagcatttgctgacacaaacgaggttcccagccaaatgctgataaaccataagcagatgacacagcagcatgtgatatatggcgcttttccactgtcccatgcctccatagcgatgttggtgcagatggagccttattaacaccagtcattctatccatccagacagatacagattatatatatatatatatatatatatatatatatatatatgtatatatatatatgtatatatgtatatatatatatatacatatacatatacatatacgtatacgtatacatatatggctatactgtaggatacactccaagacacccggtggatgcttgaaacttcagatagcactgaattctctctatatagatatatactgtttttttcctcaacatacctatgataaagtttaatttataaattaggcacagtaagagattaacagtaactagtaataaaacagaacaagtataacaatatactgtaattaaacttctgtgaatgaggtctctccctctcaaaatatcttgttgtactctcctcccctattttggatccgcagttgggaggggttactgaaacccgggaaagtgaaactcccatcaggggtgactactattcatacatatgattctggaaaaaatatgccagatattaatagttaatgttaatagtggtgggagtgggataattttactgcctcctttgtgcttaatggcattttaaattgcaaacaaattatttcttaatttgtttcattcacttttcctttttttgacacgtgtctatcacgtggaaggatgtgatatggaaggacgcagggctactgctggcgtcccttttgcagggaagccgtctcctggcacacaggctacccaatgccacctttatttttgtttaaatcaaaccaagtccctgggaggcgcccagggtgggcccgcaggggcggctccacagtgcccgcggggtcccaggaccaggcgctggcagacttcggagtcgcccccgggccctccgctgcccaggcctcggctctccctgcaggtaccacctcgtggtgatcgccctcatctacttcctgccgctcgcggtgatgtttgtagcctacagcgtcatcggcctcacgctctggaggcgcgcagtgcccggacatcaggcgcacggtgccaacctgcgccacctgcaggccaagaagaaggtgggcgcgggggcgggggcctggagggggcggggcctggagggggcggggggctggcgggggcgaggcctcatgggggcggggccggacggggtgggacgggnnggtgggacgggnggcgggaaacgggggcgggacggggcctgaccccgccctggggagccgcccttacggtctcaaggccggtccgcaagagggcgcccgggagaagcttgcggaagctgccttcgcgcgaagtctggggccagagcctgaccgcgttcctcccagccgggcggatttgcctttggtctttggccaaatacaaaattaaagaaacttgccgggcgcggcggctcacgcctgtaatcccagctctcagggaggcagaggcgggaggatagcttgagcccaggagttcgagacctgcctgggcaacatagcgagaccccgttctccacaaaaaggaagaaaaaaaaaagacaaaaaaaaattaacttcccagaatgttaggggagtcagggactcctaaagccccgtagaattcagatacccccaagaatcttagaatgataaaatattaaaatcttagactttttgaataatcagaatgttgaaattgagaagccccacagaactatagaaggtgcctgacagtcacaggagagccctcaaaggctggaactgcggaccccggaggtcgtggagaccagatagttgtccagcttcatcaaatctgtctccagtttcttccggaagtggcagtgtccccctactccctgccatccagggtcccccgaaggtcctgatgtagccctctgtgcccaagacccccttcaccctccttcagtccaagcttgtccttgcccccttcctaccaggcaacaggggaggtaatgggttaaccacatcatgtagccaggtcaaagccatgcttctcacccaaaagtaggcatctttcacagggtggttcggggagatagctgcacatgggcgccatctggtgcccctcatggagcactggcctccatctgctccacactaggggtctcaacccagatcctacgtgaggatcagggtgcccaggagcccccagaccttttgtaattggcatgctgggctgccaaacggagcaggagtgtgcctgcaggggccaggctctgaggagggggaggtccaggagctgacccgtgggcagaggcaggggtccctggttggaaccttacagcccacagagagaagggctgtgccgatacggatcccagagagggggcgtcctgggaacgcatagctgacacaggggctcccccagggatggggttaggagagagagctcagccactctccagggagggggagctgcagtgaatgaaggggtcccagacaccttttgtaggaagtggccattgagctgggcttcaaggagtgaggacttcaaaggaaggatggcagtatgggcagagggacctgcctgagcacaggcctctgaggttgggggctcaggaaggtctgggcaaaacatgctcagaggcctgagtaatagagctaacggggtctgtgtgtggagcagttcccaggtgggtgcaaggggtcctctgtgtctgccctcggagggctggggctggggcttgggcactaagaagtaacttgagcctctcctggaccagtttgtgaagaccatggtgctggtggtgctgacgtttgccatctgctggctgccctaccacctctacttcatcctgggcagcttccaggaggacatctactgccacaagttcatccagcaagtctacctggcactcttctggttggccatgagctctaccatgtacaatcccatcatctactgctgtctcaaccacaggtgagcccccactccagccccaccctctgccctcagggccccactgcccagccccaggtgggctcccctgcacagctcaagcatccatcctcattcctgccggaacctgtggccctgtgcccccagcctacatgagaaagccgtcctcacactcagcccccagcacaataatccctctggcctgggcctagcttgagcccccttcctccccaaatcctcaccgtctcccaggctgtagctctcactgtctgtctgttcctgctggctcttctgggttctgtgtctggggcaagagaagagagaagggagggccagagagatgaaggggaggggagagtcacagagagggggtgggacagacagacgaaggaaagaaaagctaagtagcgggagggagggactgacttctgttctagtattttcacaagcttcctactgagggctttcctggagccaagtgaatggcacccatccggcagtggaagcagtggatgggggctggggccagcacaggggtggggcaggctgctccctggaaagctcacagtgcatgccctgtcctccagggactttcagggcagctgggaagtgaccctgtcagagacagccaggaaggagggggccagaatctcactctcctggcatcatccagtttccctacgcctcgtgattctgaggaaatgagtcccagagaggggcctgcacttgctctggggcacctggagaggtggggggtggtgagtcagggaggaacccagccccaggagttctgcagagcaggcctttcagtggcaggaaaccctgaaggtggggcaaataaggggcggcaagaggtggacacagtctcacctcagtgagacaatgatgtgggcgaagttggccttggacctctttgttcatgttttttgtcacctccctggccaggtagccaggctactcataatgccattgggatctttgtggctcagacatttcacccgcctggggcaggccaaaaggaaataaggagctatgattttttgcaggaggccagaactctctatctcctgagagggaagtagataataggagagaagcaggtgtcacccccactctacagatggggaaactgagcttcagaaagtaagatgctcccaaattcatacaacaaacagtaaagccaggactccatgggtctccaaggcctgtcatcttatccccacaccacgcatttctcttttaaagacttgtgggattgaaaacctggagacagggactctgacatctgggaggggccaccagcccactgtgtctgtgggttgatcactctcctgctacccaagggagatacagtccctgggagtctaaacaacaccccaggctctacaagatcctgacatcacttctggatcattcccttctctgagcagccagcgttccctttctgccgtctgatttcttccactcaccgtgtgtgcttcctctgaactcccgttcagtgctgccatggggagagctgtttgttttcaagcaaatgcatcagaacttggtggctccgagtgtgggtttttcaatgtagtccccttgggaaaagcatccttgttctcccaagttgccaaagcctccattgtgttttagcaggttcttctttgactcatcccttagaagccagttaacaagtcagacaagaacatctgctggtttttttgtttgtttgttggttggttggtttttttagtaattatgctggggtcattttttgttcgtaataacagatgacctaaatcagcttagtcacccacttcattcactagacccagctccagaacactctggcagtttccaaaaatcaaactcacccacgaaggcatctctcaagagcccctgagccatgggaggctcttggagagagacagtgactttcctctggaagggagtcagtttcctgggggtgggggcagtcacatcacagctcctgagcccctaactccctggctcaaggtgcccctcgctcccccaggtttcgctctggattccggcttgccttccgctgctgcccatgggtcacacccaccaaggaagataagctcgagctgactcccacgacctccctctccacgagagtcaacaggtgtcacactaaggagactttgttcatggctggggacacagccccctccgaggctacttttaaggttggagaacccagccccctccaaggtaccagtgggggggggggggggcccccggatggatcaggggatatggtttgggtagggtttgtttcccccccccaaaactcatgtgaaatttgatcccaatgtggcagtgttgaaggtaggggttagtggaaggtgtttgggtaatggggaagggatcccttatgaatagattaatgccttccagttgaagtgaatcatcactcttgtgggaatggactagttcccaaaataacaagttgttagaaagagtgtggtgtcttcagtttccctgtcttgcttcctctctcaccatgtgatctctttgcacacaacacttcccttccactttccaccatgacaagaagcagcctgaggccttcaccagatgcagctgcccaatcttggatattccagccaccagaatcatgagccaaataaacctcttttctttataaattacctagtctcaggtattccatgaaagcaacacaaatggactgagataggtgcctattgaaccctgaagccttgtgcctggctgcagaatgaggtgtagcaccctttgagaagtagccaatcgagaagaccacatctgaaagttcagctcatgccccatccttcagtataccaatacaaagacaacatggggccagaactccagaaaggatgctgactttaagaggactcagccacccatctcagagagcacttcagaggatccagtaagggtcagaaaagacagtgtaagctgatatttatctaatttaagagatgcaagctcaaatgccttcctggggcatacaagaatatgtataaaagaaaaactgcaaatgtgatgataaaaggcaactgacttccaccctcagtttgagctaatagggaatggtgggggccatggcaacctggagaggacaggcattcaaaggggacaagaactactcagctctggacaaacgttgccacatgataatgggagcccactgttgctagatcttctaaatctttcaagagaagctataaatccacatttgtatgtgagtcttccagatttgttgaatttgacccaaattttcataaactttgcataagttaaacaaaacgtatctgtgggcaatgcaaccatgaccctgattcgccatcaggctgtggatacaaaggaggaaacttcttatttcacaaagcccagtgactgagtcagctgagggcttctctgtctcagtatttaagaagtcagatacagcccacgtagatggtgattaagagccaaaaaaatcagctgtgtttcctcaggcaagtcactttgacctctgcccagtatcaaaactacttcacagggatgctgtgaggaacaatgggagtaatgcctataaactagcaggccagaccagattaagtgcccaatacatggtagccaggactttcttttttttttttttttttttttatgagacagggtctcacctcactctgagacccaggcaggagtgcagtggcaccatcatgattcagtgcagcctcaacctcctgggctcaggggatcctcctgcctcagtctcccctgtagctgggaccacagatacataccaccacacccagctagtttttaagttttttgtagatatggggtcttgctatgttgcccaggctggtcttgaactcctgggctcaaccattcctcctgcctgtctcctgaagtggtgggattacagatgtgagccaccacacctggctgttagccatgacttttaactatttcacacaaaagccacctacaaagcagcagcacagctcccactcccacttctgcagcaagaagctagagggcagaaagcagcaactgtcccaactcccagaaagctcccggtctggcccagcccatcccaggggcacacctcctgcttgccaactcagcctccacgccctggttcccctgcagaagagccatgtaacattgtcaatgcacactggaaggtgtaatgttatctgtgttctccaaaaaatcactgctccgtagacaccagcaccatgcccctaataaagggactctgatctcaccaaaccaggtggtctggcaatcggtctcgcaggaagccacttagagccgcagctgtggcttgggacatcacaaggtgcttgggtgcagagtgacatggaacccaccaaggctgggggagaatccaaaatggtagcctggggatagaccaggaatctcttgaggtgggggtgggaagggagagtaaaaggtcagacaagggttaatttcctagggatgaggtcaatctaagatccagaaggggtgggccgggagcgatggctcacgcctataatcccagcactatgggaggctgaggggggcagattgcttgagctcaggagttggagaccagccctggcaacacagtgagaccctgtctacagaaaataaaaataaaaaataaagaaaaaagatccgggagcgggagcgtgcagccagcctgggctgcttcaagatttcatctgtgtttgggtagagagggaggggaggggtggggcagagcacatttcatcctttgtcttggggttggcagagaggaagatgaagggcaggatccgggtggggatggcagagaggggaccagtgttgcagtcctctcactgaacccaagcagcctggaagccaagtggccttgttctataatcccagcactttaggaggccaaggcaggcagatcacttgaggtcaggagttggagaccagcctggccaacatggtgaaaccccttctctactaaaaatacaaaaattagctgggtgtggggatgcacgcctgtagtctcaactactcaggaggctgaggcaggagaatcacttgaactcgggaggcagaggttgcactgagctgagattgtgccactgcactccagcctgggtgacagggcaagactccatctcaaaaaaaaaaactcctccgcccagaaggccacaaaactccccagtgtttggtctttgccacatcccaagaaactgcacccccctctgcctgtccccccgtccccagccattaagcatcactcgggtctttgaattggtacaaagtttactaggtcatacgacacggctcacaaagcggtgggaaattccagtgatggcattgtttgttggttggttccttttatccaaatggagacaagacacatttccgcaggactgtccacctccccccacgagacaaacagaatgcaagactgtcacacgcggctaggactggttccacggacacacgattttgtggcattgacacaccacgatgcgatgccaggccacagtgggtgccaggaggggaggaagcagctaatgctatgcccacactcgccttcaggcagtgcccccgggagggaggcccggcagtgtctgctggtgataatacatttcacacagggagggggaaccccaaggatgggctttggaggcccagaaggcctgtcaggtggtgtgattttccatctccagccaataaataactctgttggatgaatgcatacattagaaatggatgccactacacttcacacgtgggggaccaggtcaaaatcaaaccatgcaaagtggcagggcaagtgaggagggatccgggtgagagatattatcaacagcacacgctctattctgtaccctacaatatataccattagttggattttgctttcctccccgcgccggcaggccctggcgccagcgtctcccagcgcaactcgctgggagggtagggggtcgccgcttgaagagagaagtgctggagaggcagtaggctggggatcccggactcttagctgcttgcctctgtgcgtaaccgcacgcccacggccgtgatgagggcggcccccttgccgctgccatcctcagacaggaggaaggacacgttacattttggtgacagttccttcaccgtctggtgcatgattctggagaagctaaaaaggacgagaaaacagaaggtagttggaggaagatgagagacgctgggcctacccgaaaacaccaaagcacagacagccccctgactggtgatgattcgacttaggattcttcgactttgtgatgggtttatcaggacataagcatcggaagtcaaagagactctgaacccaacaacaaggagggtgaacatggttgggaggcaggctgcttagaagcagctgtggccagttgagaatggctgggaggaaagtgggcccacggtcaatcccattgtcacagttttcagcagggaggcccaactgcgaatccaaacacaactgctctgtatggcttatgaaggctaggacatgaataacacacacacccacatcggagcttgaggctccagggggacctcaaaaccaaggaggatgttaggggctgacatggatcattaaggcaggtgcaagccagccaagcactggatcggttcaggaggctatgcaggaatgaatatcacccatctccagctgcaaccctgagacccccagcgccccaccatcaacagcctggcccccaaagacaggaatgccttccagtgaagatagtatctgaacaaaggctgaatctacatgcttgtaagttgggctcaaaatgaagggcagggccaggctgaagatgcttgtggtgaggggctctcaaaagtagtcactgtccttggttggggacctattaggtgggcggagtgcggtggctcatgccagcactttgggaggccaaggtgggaggatcacttgagccaaggagtttgaggacctactaggtgccccatattttacagctctaatttctagtcctgccagtggctgccacctcatgaggaagatgagattttgcagggattaagcaattgcacacagattctaagtgacggtgccagggttaaatccaagagtatgtggctccaaagcctagctctaaaccactcctgtgtgctgcctcagctgatggcaaggacagctattaagggggagagacagaggtgaggatggagcaagacagcatggttccaccccaagccacggccatgaggtaagcaggtaatgtctacactgagtcgggtgaggttgcttataagtagggtgacactatggcctcatttatctgggatggtcctagtttgcctacagtcccagagtaataattattagcactcttgactggcaagagtaccctagtgtagacaataaataaataatatggtcaccctattcataaggtgagacatgcggtggatcacaatcacacagcaagtgcaatcacatgtccttctctggcatggggggtcagatgcctgaccagagggaggccactccctacccctccctgccatgaagcccagggcccaaaccgctcccgcccttccaagtcttagcaaactgattcagcagatgaacaagagagtggctatcctcctttcctattttattttttgaaatagggtctcactctgttgcccaggctggagtacagtggcgtgatctgggctcactgcaacctccacctcccaggctcaagcaatcctcttccctcagcctcccgagtagctgggactacaggcattcaccaccatccctggctaattttcaaaatttttttgtacagacaaggtctcactatgttgcctaggctggtctcaaactcctggactgaagcagtcctcccacctaggcctcccaaagtgctggattacaggtgtgaaccactgcacccagctcctcccctttcttaatatcctctccccacttacccaacagagcctctggcctggctacagctcaccaggcttatgagtgagcccacgcccaccctcacctcctctcccactgcctagcccccacctaagggggaccaggaggagtggggtgagggtcacatcatgccactggtgtgagctggccaagtgaagccacttctctgtctccctaaggatcccagtcaaaccctacaaactgttcattaccttgtcctagacaatccccagctcctgaacgcacagccttcagcctggctgggctcccgcagggcatttccccagcgtaaaccacaccctgataccccctaacccaaagggatcccagcaagctctgcgcatcccaactggaaggcccactcactgtggatgaagcttgtagagtgtcccgtccactcccacagtcacattcagacggtccagtcctctgttctcgcggatcttatccacaaccgcagccatgcctgcgccacacagctgtgcggccctcctggacaccaccccgcacactgtcttgacgaggatactgtcatcgcaggtgctattcagacctagctgctggaggatagcccggacctggagcagtgctaatcggtcactgtgggggacaagagccagagggctggatgaagcaggacccacaagagcagcctggagaccacgtccaaaggacgccccccgcccccaatcactgtactcatccacagacagagtcaagggcaagtgttacatgttaaactgtggagaatttggca

SEQ ID NO: 742 - protein, 488 aa, Homo sapiens
MGTCDIVTEANISSGPESNTTGITAFSMPSWQLALWATAYLALVLVAVTGNAIVIWIILAHRRMRTVTNYFIVNLALADLCMAAFNAAFNFVYASHNIWYFGRAFCYFQNLFPITAMFVSIYSMTAIAADRQEGGPLPLKLPSAHRYMAIVHPFQPRLSAPSTKAVIAGIWLVALALASPQCFYSTVTMDQGATKCVVAWPEDSGGKTLLLYHLVVIALIYFLPLAVMFVAYSVIGLTLWRRAVPGHQAHGANLRHLQAKKKVGAGAGAWRGRGLEGAGGWRGRGLMGAGPDGFVKTMVLVVLTFAICWLPYHLYFILGSFQEDIYCHKFIQQVYLALFWLAMSSTMYNPIIYCCLNHRFRSGFRLAFRCCPWVTPTKEDKLELTPTTSLSTRVNRCHTKETLFMAGDTAPSEATFKVGEPSPLQGPGASVSQRNSLGGHIQTVQSSVLADLIHNRSHACATQLCGPPGHHPAHCLDEDTVIAGAIQT

SEQ ID NO: 743 - DNA, 1099 bp, Homo sapiens
  source (1)..(1099)
  CDS (201)..(556)
  CDS (587)..(899)
tcttgggattaaaggatcttccagagcttcagcccatcctctttgtactgttcctgctaatctacctgatcactgtcggggggaaccttgggatgttggtgttgatcaggatagattcacgcctccacacccccatgtatttctttcttgctagtttgtcctgcttggatttgtattactccactaatgtgactcccaagatgttggtgaacttcttctcagacaagaaagccatttcctatgctgcttgtttagtccagtgctattttttcattgctgtggtgattactgaatattatatgctagctgtaatggcctatgataggtatgtggccatctgtaaccctttgctttacagcagcaagatgtccaaagggctctgtattcgcctgattgctggtccatatgtctatgggtttcttagtggactgatggaaaccatgtggacataccacttgaccttctgtggctccaatatcattaatcacttctactgtgctgacccacccctcatccgactttcctgctctgacactttcattaaggaaacatccatgtttgtggtagcatgatttaacctctccagctccctcatcataatcctcatctcctacatcttcattctcattgccatcctgaggatgcgttctgctgaaagtaggcgcaaagcgttctccacctgcgggtcccacctggtggcagtgactgtgttttatggaaccctgttctgcatgtacgttagacctcccacggacaggtcagtggaacagtccaaagtcattgctgttttctacacttttgtaagccctatgttgaaccccatcatctatagtttgaggaacaaggatgtgaaacaagctttttggaaactgatcagaagaaacgtgcttttgaagtaaaatcagtgtatctttattagtcaaataaaaaaatctttctatttatgagaactgtatttaactttagtagctttacagtaaagtcaattttagatccccaatgaaaaactataatctaacaacaaaacatagacatagatagagaaaatttatggttttacatgttacatatgagtgaaatatgtgtgtgtgaagggtag

SEQ ID NO: 744 - protein, 222 aa, Homo sapiens [sequence omitted]

SEQ ID NO: 745 - DNA, 1372 bp, Homo sapiens
  source (1)..(1372)
  CDS (201)..(1172)
  modified_base (1341)..(1372): a, t, c, g, unknown or other
gttaacatcaggtgaggtcaggggcgtttgaggatagagttgcagccagttagctgctccacagccactgccttacagaccccctccctgccccaagtccctaattgggaccccccccctcccccacgctgggccccagatgcaggtctgtgggtgggggccagccggcatcacaggtgtccctctctgcacctgcgcagatgtgccctggcctgagcgaggccccggaactctacagccggggcttcctgaccatcgagcagatcgcgatgctgccgcctccggccgtcatgaactacatcttcctgctcctctgcctgtgtggcctggtgggcaacgggctggtcctctggtttttcggcttctccatcaagaggaaccccttctccatctacttcctgcacctggccagcgccgatgtgggctacctcttcagcaaggcggtgttctccatcctgaacacggggggcttcctgggcacgtttgccgactacatccgcagcgtgtgccgggtcctggggctctgcatgttccttaccggcgtgagcctcctgccggccgtcagcgcgagcgtgcgcctcggtcatcttccccgcctggtactggcgccggcggcccaagcgcctgtcggccgtggtgtgcgccctgctgtgggtcctgtccctcctggtcacctgcctgcacaactacttctgcgtgttcctgggccgcggggccccggcgcgtgctgcaggcacatggacatcttcctgggcatcctcctgttcctgctctgctgcccgctcatggtgctgccctgcctggccctcatcctgcacgtggagtgcgggcccgacgggccacgctctgccaagctcaagcacgtcatcctggccatggtctccgtcttcctggtgtcctccatctacttagggatcgactggttcctcttctgggtcttccagatcccggcccccttccccgagtacgtcactgacctgtgcatctgcatcaacagcagcgccaagcccatcgtctacttcctggccgggaggacaagtcgcagcggctgttggagccttcagggtggtcttcagtggggcctgcgggacggcgctgactgggggatgtcggggcagcacgctcaacacagtcaccatggagatgcagtgtccccggggaacgcctcctgagactgcagcgcctggaggaggcagtggcaggaatcgtgctccaagactcttctgctgtggacaggaatgggcactagttctgagtccatacaggagaggaaagatctgtatgctctcctcgggccttcttctccctgggactgtggaactcaggtagtgtctggggaannnnnnnnnnnnnnnnnnnnnnnnnnnnnnnn

SEQ ID NO: 746 - protein, 323 aa, Homo sapiens
MCPGLSEAPELYSRGFLTIEQIAMLPPPAVMNYIFLLLCLCGLVGNGLVLWFFGFSIKRNPFSIYFLHLASADVGYLFSKAVFSILNTGGFLGTFADYIRSVCRVLGLCMFLTGVSLLPAVSASVRLGHLPRLVLAPAAQAPVGRGVRPAVGPVPPGHLPAQLLLRVPGPRGPGACCRHMDIFLGILLFLLCCPLMVLPCLALILHVECGPDGPRSAKLKHVILAMVSVFLVSSIYLGIDWFLFWVFQIPAPFPEYVTDLCICINSSAKPIVYFLAGRTSRSGCWSLQGGLQWGLRDGADWGMSGQHAQHSHHGDAVSPGNAS

SEQ ID NO: 747 - DNA, 1321 bp, Homo sapiens
  source (1)..(1321)
  CDS (201)..(1121)
caacttggagaaggcccagggaactttagggagacaaagcagaggtatcaagtttagagacaatgaaaactatgactcagtctgttagctgctgtcaacctcccttatgcaatttggttttgtttggaagagcagtgagggtccatgttaaggtaattcatactttctattttcacagaaatgcctaaagaagaatgaccatggaaaattattctatggcagctcagtttgtcttagatggtttaacacagcaagcagagctccagctgcccctcttcctcctgttcctgggaatctatgtggtcacagtagtgggcaacctgggcatgattctcctgattgcagtcagccctctacttcacacccccatgtactatttcctcagcagcttgtccttcgtcgatttctgctattcctctgtcattactcccaaaatgctggtgaacttcctaggaaagaagaatacaatcctttactctgagtgcatggtccagctctttttctttgtggtctttgtggtggctgagggttacctcctgactgccatggcatatgatcgctatgttgccatctgtagcccactgctttataatgcgatcatgtcctcatgggtctgctcactgctagtgctggctgccttcttcttgggctttctctctgccttgactcatacaagtgccatgatgaaactgtccttttgcaaatcccacattatcaaccattacttctgtgatgttcttcccctcctcaatctctcctgctccaacacacacctcaatgagcttctactttttatcattgcggggtttaacaccttggtgcccaccctagctgttgctgtctcctatgccttcatcctctacagcatccttcacatccgctcctcagagggccggtccaaagcttttggaacatgcagctctcatctcatggctgtggtgatcttctttgggtccattaccttcatgtatttcaagcccccttcaagtaactccctggaccaggagaaggtgtcctctgtgttctacaccacggtgatccccatgctgaaccctttaatatacagtctgaggaataaggatgtgaagaaagcattaaggaaggtcttagtaggaaaatgagtcctgatttgggggatttatagatgggaaaaatgaatagttccaatgaacatatattccttttttctattttcatgttcttctgttgtaacatacataatatctagattttaaaaatactttcccatctatgattgattcaactttctcaacaaaataaaagaattgtgtaaagcaggtattaacattcttatcttttg

SEQ ID NO: 748 - protein, 306 aa, Homo sapiens [sequence omitted]

SEQ ID NO: 749 - DNA, 1336 bp, Homo sapiens
  source (1)..(1336)
  CDS (201)..(1136)
cagcagcacctgccctggccatggaggcggggcttgctccagagggagccgcagcaaagccccctctgctgaagttcaaaatctctctgtgtgcctcctattctcaagaaggaaggagggatgactgggagggcagcagtggtctctctctctctctaaataactttttcccttgtccccacagaatgccttaaatgacaatggctgctgagaattcctccttcgtgacacagtttatcctcgcaggcttaactgaccaaccgggagtccagatccccctcttcttcctgtttctaggcttctacgtggtcactgtggtggggaacctgggcttgataaccctgataaggctcaactctcacttgcacacccctatgtacttcttcctctataacttgtccttcatagatttctgctattccagtgttatcactcccaaaatgctgatgagctttgtcttaaagaagaacagcatctcctacgcagggtgtatgactcagctcttcttctttcttttctttgttgtctctgagtccttcatcctgtcagcaatggcgtatgaccgctatgtggccatctgtaacccactgttgtacatggtcaccatgtctccccaggtgtgttttctccttttgttgggtgtctatgggatggggtttgctggggccatggcccacacagcgtgcatgatgggtgtgaccttctgtgccaataaccttgtcaaccactacatgtgtgacatccttccccttcttgagtgtgcttgcaccagcacctatgtgaatgagcttgtagtgtttgttgttgtgggcattgatattggtgtgcccacagtcaccatcttcatttcctatgctctcattctctccagcatcttccacattgattccacggagggcaggtccaaagccttcagcacctgcagctcccacataattgcagtttctctgttctttgggtcaggagcattcatgtacctcaaacccttttctcttttagctatgaaccagggcaaggtgtcttccctattctataccactgtggtgcccatgctcaacccattaatttatagcctgaggaataaggacgtcaaagttgctctaaagaaaatcttgaacaaaaatgcattctcctgagaaaagggcaatgctcaggaaagaaacactgtttctcccataagtgatttggactccactggttacatggaagaaatataatttttcctcaaacaggttcatcatccccattttaagggttctttaatttacaaacattcttaagagctttgaatactcacacagtaagtcttgaggatcatttcactcagttccccgct

SEQ ID NO: 750 - protein, 311 aa, Homo sapiens
MAAENSSFVTQFILAGLTDQPGVQIPLFFLFLGFYVVTVVGNLGLITLIRLNSHLHTPMYFFLYNLSFIDFCYSSVITPKMLMSFVLKKNSISYAGCMTQLFFFLFFVVSESFILSAMAYDRYVAICNPLLYMVTMSPQVCFLLLLGVYGMGFAGAMAHTACMMGVTFCANNLVNHYMCDILPLLECACTSTYVNELVVFVVVGIDIGVPTVTIFISYALILSSIFHIDSTEGRSKAFSTCSSHIIAVSLFFGSGAFMYLKPFSLLAMNQGKVSSLFYTTVVPMLNPLIYSLRNKDVKVALKKILNKNAFS

SEQ ID NO: 751 - DNA, 1342 bp, Homo sapiens
  source (1)..(1342)
  CDS (201)..(1142)
tcattagtagacagcacatctagtactacaagtcttttgatttggcatcaaatccaacataccttttattatgcttttcactttttgctcttctgttagaagttgtttcactaaaaatatattatagctccatcatgtattcatctgactaaattccactgtgcatcttctttcttattgcagctcaaatgatgagacttatgaaagaggttcgaggcagaaatcaaacagaagtaacagaatttctcctcttaggactttccgacaatccagatctacaaggagtcctctttgcattgtttctgttgatctatatggcaaacatggtgggcaatttggggatgattgtattgattaagattgatctctgtctccacacccccatgtatttctttctcagtagcctctcttttgtagatgcctcttactcttcttccgtcactcccaagatgctggtgaacctcatggctgagaataaggccatttcttttcatggatgtgctgcccagttctacttctttggctccttcctggggactgagtgcttcctgttggccatgatggcatatgaccgctatgcagccatttggaaccccctgctctacccagttctcgtgtctgggagaatttgctttttgctaatagctacctccttcttagcaggttgtggaaatgcagccatacatacagggatgacttttaggttgtccttttgtggttctaataggatcaaccatttctactgtgacaccccgccactgctcaaactctcttgctctgatacccacttcaatggcattgtgatcatggcattctcaagttttattgtcatcagctgtgttatgattgtcctcatttcctacctgtgtatcttcattgccgtcttgaagatgccttcgttagagggcaggcacaaagccttctccacctgtgcctcttacctcatggctgtcaccatattctttggaacaatcctcttcatgtacttgcgccctacatctagctactcaatggagcaagacaaggttgtctctgtcttttatacagtaataatccctgtgctaaatcccctcatctatagtttaaaaaataaggatgtaaaaaaggccctaaagaagatcttatggaaacacatcttgtagagccatgttacccatcatttgttacgtagaagaaaatacattttcatgttaactgtattctctgattgtttaagctgtttctctgtgttaaagtagataatttaaaatgaagtatactttttaatatcctagtatctcatatatatatacacacacacacacgggtccctttgatgcaccaatacactagatgaaggttg

SEQ ID NO: 752 - protein, 313 aa, Homo sapiens [sequence omitted]

SEQ ID NO: 753 - DNA, 14329 bp, Homo sapiens
  source (1)..(14329)
  CDS (201)..(485)
  CDS (6722)..(6831)
  CDS (7859)..(7995)
  CDS (9247)..(9511)
  CDS (11473)..(11521)
  CDS (11952)..(12300)
  CDS (13936)..(14129)
  modified_base (12394): a, t, c, g, unknown or other
agcaaaagagtggcagaaggcccaacatttttagaaaattcttagccgtaaaccttaaaatcccgagttggaaaattctcattattaaatgccaggagttggtcttcttcctggagacctctgcaagaggccctctcactgacaccttgtgtccatttttcctggccagagcctggccacccagtggctccaccgccctgatggatccactgaatctgtcctggtatgatgatgatctggagaggcagaactggagccggcccttcaacgggtcagacgggaaggcggacagaccccactacaactactatgccacactgctcaccctgctcatcgctgtcatcgtcttcggcaacgtgctggtgtgcatggctgtgtcccgcgagaaggcgctgcagaccaccaccaactacctgatcgtcagcctcgcagtggccgacctcctcgtcgccacactggtcatgccctgggttgtctacctggaggtaggtgggccccctgcttgctccagcactttctccagcagggccctgcactggacactggggactctagctccccactggcttttaccaatgagtttcctggtgcttccccaggtggtttttccttcactctgggcttactttttctccttacgaaatgggtagattgtttccttaataatcccaactaccatttgtaaagtgcttactaagtgctgggcctcacgtagggactttaaatatagcattttcctatataaccctcacagcagcttagaggctggcattattgccaccattttgcagttgataaaccaggtggtcagagatgttaagtaactgctgcagcatcacacggctggcaagtccaagctggaattctggcctcagagttagttccttaggtcatattggaaataggagtaaccggcaaggatccccaaggaggggcatgtttatgctcccaggcccctgaaaccttcactcccatctccccacttcagaaatgggtctgctgctttatgctccccatatcccctctccttcccacagcttatcctggggccctgtccaggacctgcaggtagaggctgccatggactgtgctgtagcccttttgttaggaagaattgtgtagtcactcatttcttggcccagctctgcacctcaaaatggggagtaggcagcacagtctagacactgtgcctggtgcattgctgacacagacccagtgaatactcttggtaaccctgggagtccatgctactcttctcactttacaaaataggaaacaggccgagcacggtggctcacgcctgtaatcctagcactttgggaggccgaggcaggcagatcacgaggccaggagttcaagaccagcctggccaacatggtgaaaccccatctctattaaaaatgcaacaattagccaggtgtggtggcatatgcctgtaatcccagatacttgggaggctgaggcaggagaattgcttgaatctgggaggcagaggttgcagtgagctgagatcataccattgcactccagcctgggcgacagagcaagactctgtctcaaaaaaaaaataaaattaaattaaaacaaaaacaaaataggaaatagaagctttggagaagttgcctttcttcacccaggtcacagggagaaatgctgatggagaaatcccaaagcagatattattctccaggaagacaccttcagagccagcgagcagatgtgggagcatttagggatcatcggtgggcacaagctggatcctgcccctttctctgcccagctttctaggatggcatgtccaggactcaagcaatctgggagtctaggtgcatgggaaggcatgggatcaggcatttaggaaagtgccggtgctctgcccactgaaccgttaccttccttccctgagcaggagaggaattgaccagtgcctctgaggccatccctgcctgagagggaaggggttgttgaaagaaaatgagaaagctttgtaggtttaaacaggggagaaatctagatgaggacgctcaggtgaggaggcgagactggtggaaagtggcacacctccctgtccctgggcccccaaggggctcgtgcgcttactgttctcaccaccaccccgggcccaagggagctctgatccatcaccccttggcttcctttactacagccaatgcaggctgcaacttccaaaatgacctgactggatattaaggaagaaccaaaaggaaacacaaatacaaaaccacataaaaatattcagttgacacaggccaggagtccaattccccctggatccatgtttatgagggsccctagactctgtccatgccttcttaattcttacgcttgatcccctccttcttccctcttccaaaggagggtcctaggtctcagaccatagggyaaaatggtagagcaaacaaactctctgtgcctcagtttcctcatctggaaaatgcagataataatagtatcatacatcatagcattgttgaggatcgaattagttgatgtatgaaaagtgattagaatgatacatggctcacagtgagcactgtgtaaatgtcagccatggcgatgatgataaagatgaagatgacaatagacatccagcactgctccacatagggaggactctgtctttcctattcaccgcccccttgggataaagaggaaggagagagtactccctatgttcgccccaggcaagtaggtaccctcttcccagaggaacgtgtgttctacccagggctctgggcatggcttctgttagcttccagaccccctgtccctacccaggcacttgggtagggacaaatccatacatgggctatagggggttcccaggaatctgtaagtctttcgaacagatcctttaaacatgcttgttcaccttattttaaaggtgaagctgagtgtgtcaggggaggagggtgcagaagccattctcagagggcagggstcagacttccccacagcatctcatcaaactagagctgggcactgagccttgtttaatggacattatctcagcgatttgttgtccctagagaacgtcccaggtgacgtctcaccctgccctgatgtcctatcagcgcaccctcacaaccacgcactgtcccctctctaatacatgctcttgtcatccagattttttcctcctgttccatttccagcaatgccatgccaacatctgtctggcttaggactaagtgtgcgttatttatcttgctaagtgtatgaaaagcacgctggttttggagtgagaggaccaggttcaattcccagctccattcctttccatctagatgctattggaagagttcctgatgtccacatgtgccattccatgtcagcctcacaaccctttaaggagcggcttcctgtgtgcatttattttctagatgaggagattgagaagatgaacaaatatctcagagttattcattcactcagtcagcactgactgagcactccgaggtcttaccccaatccttgtgcaatgggctaaggcactgacctgctggggatgcagaggttgacagggcccctacagtgcagtctgctgccggtgacagtggagcagtccccataggaggtgtggggcataaggcccagcatgagggtgtcagggaagactttcagggagaaatgatgctttcggaaaaattatgcaggagagggagggagacacttgcattctcaagaaagccacccagcagggagagggagtagctgvctggaggtatggaggagaggtggttatgtcatttgcctctgaggcttactgtctgcattctaagatataagcatcaagtgtttggaacagtgcctgacacatggtaagtccttagtattattacagttattaggacttagctgagccagctcagggcctgtactgcaggtctcagctttatgtgagcaagagcattaaggaatgatgcctggatgcctgggggtgtgaagaaaagagccttgggttcgactagggaacctggggccactccttcctctgctactaaatcaccaagtgatcttgttctgttttcttctctgaccctccctagttttgtccacccttgaaataatcatctttccttttcacatttcatgcttaccaagtacttgtcacctaattatctcctctcttgataagctagatggtrccttccagggcagcttagtagagagcatgggatgtgatgtttcagattccagctctgctgcacacctgccaggtgaacttggccacgttacatggcctctctgggcttcagttccctcacctatgagtgggataagcaagcccttcttgtaaaagttttaagaacaatacatgagataaagtgcaatgcccacagtagatgtcttatggacagtggccaccaatgcattttcttgagtctttaagttagcagccctaactactctccaaggcagcttcccctgggaccacagaggaaatctctttgttattctgggctccagataggccagtgcaaggagagatttaagatgtccatgaaggcaggactgtgtctgaattgctcacaactgtgtccaggagcctaggatagaggctggaacacagtaatttgctcaataagtgtttgtaggaaagaagggatggcagaaaggagggaaggagaggaggaagacagggaggaaggccctgatatctcaacctagatccccagtggctcccaagtactggtcccaggaggggcttcaaagtgggatgtaaatcaggtagtgctggttttctgcccagtggtaccctaaaggcacactctgtttatgccaggaaagccctttacgtaccctcctgcctccacccgcaaaatgggcatccagctgttagctcctgccaacctggtcagcgcagcagcacagggagctgggagagaggccctggtacggggcccccatgtgagctcccaggaagacagtgccgcatgagaggcttgctgtgttctggggcaagctgctgtttctgccacacaggatgacagcagctgcattgcccatcattgagcttaaatgccagcatttggttggatgcctaggagcagaagagagggcagtgatcagaatgagcaaggttataattagccctgctgccaagctacacggtgacacgaagtctgccctactccgggttgcgggagggggctttcacgctcctctctgctcctattggtagaagccaaaggtgcatctccctgtcctgactccatcctcagggaactggggctgctccaagcttccagagcgctagggacagctgccgtgagtgtgtgcctgcgtaatctgccatgagtgtgtgcctgtgtgtgaatgggtgttacgtggggaggggggagggcggtgcgttcatgtgtgtgtgtgtgtgtgtgtgtgtgtgtgtgcctgtgtgcatgtgtgtatgagaaacgtgctcctgccaggagctagactcttcatttcccatcctaccaaggacacagctcatcacagcaacccctccgcctaccccagcccactcgggcgttcctcgagcactagcccagatctgccttctttcgttctctgggtataagaaggagcagaaatttcttctctgtttcatggcgagtcttcatcttcaccattattcttaacagatcattttggggccccgactctgccatgtactgggccaaccactgaagggcttgcctggctcagccagagcctgggccagagcaggactaggaactgagcccacaggccttggggaaatcactgcactttttggaggcttggtttcctcattggttctcagtttcctcacgggcattctaaaattttacctggaatctaatttacagaggtatggctgagtgataacacagggaagccagtgccattgggaagagtttaacgtgatacacaatgtccctagaaaccagatgctcagcccgccatgtggggtgcagggggaagcagcaggcttgggtcaagagtcagaatcaggggtgagggaaagcccaggctacagccctgttggggctcccacaggaagtgcaaggcagggcagattaagcaacctagggttggctagtctcaacatcctggcaggctttgggctacaggggtgatctctagttgtctctctggtacctgagataatttgggacaggggaaatattgtcttggtgtgtgtgtgaattagagaaacggggtggctggcttgcatttgagaggcatccttccaagtcagtcattttctgtcttcaggaattaactagctctgggacggtaagtctctctctgggtctgtgaggctcccaagtgccagaatatcaggatcagagaagatagaaaaatatagtcaatataggtgtctctgtgatgaatgggtgccaaatacacaaatacagaatctaagaaaacacatggggttaacaaaggttgcagagattaaggtttaaagttgaggccctccgtataagttggctgtctttcttctagcacagtaattggcaataagtggtcttatgtatctgggagaagataagtgagggscaagggcctcagacacccatgggcatcactccccacaccccagctggatgcccacaagacttgcagctgcctcctgagtctgtggcctcatcggctccaggagtaccaggctacaggacctaagctaatctcccactcctgctgtccatccattatgttgctttgtccccaggtggtaggtgagtggaaattcagcaggattcactgtgacatcttcgtcactctggacgtcatgatgtgcacggcgagcatcctgaacttgtgtgccatcagcatcgacaggtgagcccagccagggtggaagaggttgctctggccactcaccattctggctgccccagcttttctcaaagccaggctgtgtctcgtgtctgtgatgctgtgcagctggctgtgtgcatgggggtccatgtgtttgtgtgtatgggtgtgcatgtgtgtatgtttggctaggagagcacacactccctaaagagaagccatctatggacagtgatgctgccaagcatactcagacagtgactggtacaaaaggggaaagattgtgattctgacggaagccctagctctagcacatcttactcatgtgaccttgggcagatgatggacgttttcagagctctcagtttcattttctagaaacctacattgatgacacctgtggcctggagctgcagtatctggttatgcattttatgtccttggcacatggccaagggtcccaggccatgcacaccttgctaagctgcatccttggagccttccactaatttgcacagatatgaccctacctccctcacaccattcttggaagatgaaataagttaatgyatgagaagggctgggtaaaaaaaaaaatgtgatgaaggattgtagacaattgccattgttatttcctgctaactaaggcttaaatcttgctctgaggggcctggctaacaatttatcaacaaacatttccaccttatgggctcaacacaagtgcagtgggtacagtttcaaaagtgcaaagatgcaggccatggttcttcgaaaagcctgaaatccaggtgggsccggttagaataatagatatgagctaagagtaaacaatagctcaccagtgattaagtgtttgggctttgccaactgtcctcgccatctgagtttggggacaggagggagggttgagttagcatctcaggcaagcttcatagaggtgtgtcaactgtttagccccaaggagtgagggtgtctctggtgtgtgcatattgtggagtgaggggtccctgggcctgcaccccagattcagggtcccccgcccttgcaggtacacagctgtggccatgcccatgctgtacaatacgcgctacagctccaagcgccgggtcaccgtcatgatctccatcgtctgggtcctgtccttcaccatctcctgcccactcctcttcggactcaataacgcaggtacattctgcttttgtttgcctgaggctcagctggccctgggcccctgctccctcgaagggccctgagggagcagagtccctggcacagatatgggtggaggcccaatggaggcctatcactaccctggactgagtccaggctacgtgtcctgggccaagccccactcaagagttgttctaggttggcagagaggaaacagtggcccaggacacaacggagttggatgaggagtggggataatggttcaggggtatgtctgggaattttcaactttggttattaagttgaagaggcaagacgtgcttcacaaactgcatgtgtgtatatgtgcacatgaacatgggatggcggaggctactgggcttccatccactcctgacaatagtatttttgtaatgaagctgcagccctcagggcctgctaaacccaggtcaggccttagccacctggagcaggaaagctagaagtgaataggaggtaagctgaccacatgcccatttctgtgggaggcagagtcaggagtgtctcagacagaggcaacacaaagcccccgccagcgtggaacttcctctcatcagggaggcaagagcgatggcaggtgtgcacctctggagatcgtaacaacaaaagatacagtgaagccttgaaaatgtgtggttcggtatctattataagcatcacaggaattctaagtgggaataacgctaaacatacttggattaatgcacaaggccctgagatagaggacaggcgtctggtagacctagaagggcacgcaaacatatgaaacacataggaacacaagtgagttcaacagacagagccaagttatcttgctgcaaacattaaaaggtggccaacctctcccaatacacaggtcagactaaaaagatggtttactcttttaaaagttttcttgtgtcattctttctggatacatcggcttcacttgttatgcccagacatggcaaaactaatgaccaagtaatgagggaatagtaatggaaagacttgggagcagtccatcatcacagcttaactttttgctcacaaccgtgtttttaatactctggtatctgctgtgcgtttgtgtatatctaagatgaccaggcagccttaaacatctagttgcgttcatattctctgtaaaatcgctccttgttcctggaaggacatgaatgggctcttgtggaattatggccggtgggcccgctgactccctgcctgcccgggctctccctcccccagaccagaacgagtgcatcattgccaacccggccttcgtggtctactcctccatcgtctccttctacgtgcccttcattgtcaccctgctggtctacatcaagatctacattgtcctccgcagacgccgcaagcgagtcaacaccaaacgcagcagccgagctttcagggcccacctgagggctccactaaaggtctcaagacaccccccaaccaactccaagggtccccacctaaccattaccaagagggctcatcttatgctcaggtgggggcttgggaaacctcagcaagggttaggtctaggctaaaggaattcccaggagccgggcaagggcagattttgaaggcatggacctcagtggagcaatctgagtctccaggagagggaggcagggtccatgacactaaataacaaggggaagtctttgcttggagatctttgtgactgaaggcggcaactcttgcttggtacccccgtgggctcctctcttcctcttttctggtttctctgtctcactttagctccctctgactcctccatcctctttcctttaccttccgtactctctgtcctcccctccaaacacacatcacttttcctgacttcctctccactatgtctctcctgtgcttctctttcatttcccccctgatgtcttgtgaattctccccttcactcagtccttcacaaggaagacagtgtgtgggcacagaaggaacaagagctcttgggctagacgcatcaggttcagatcctgtcactgacactttttttgctgagtgaccttaggcaagtttcttaccttctatgagcctgtttcctcatctgttaaatgggaatcaaaataccagcctcacagggtggtcttgaggattccacgtgagaagggacgtgagtgtgcctagcacagtgccaggcccttagcaggtgctccataaaaaaccaggtccttgtgttcctcgtcatacccaccactttttgtctcattccagccttcccccttgccccaactgcctcctctggcccccacccttctgatctctgagcccttctgcccagtctgagttccatggactgctgcactttgggtttctgtcccccctccatccccaccactttgtgtgacccatgtgctggctcactccacagggcaactgtactcaccccgaggacatgaaactctgcaccgttatcatgaagtctaatgggagtttcccagtgaacaggcggagagtggtaagtgctcaggccaggacccagagccaggtctttctgcccctagggaagcccactggccatggttctgagacctcagaagctggccaatgggagaagcaccccagaaacccccaccttgcctcagctgaaggcagactcaccgtgcacacctccaagcaggcatgaagtgagacacctcggttctgcaaggcatggatgtgtacgagaaaatggttggccataccaacgtaataaaaatgataataatggctattcacatttctcaaacatctaccatatccctattatctcatcaaatcctcaccacgaccccgggaggtaagtctctttgatcgaaccgatcttcagttgacagaagaggaaacaggctcagaaagattaggcaactcacccgtctcaagagttggtgacactaagcccagacctgtgtgactctgaaatccacacctgtgttctttccactgacatgagctgccttatggatgggcaggttctggggtaggacgagcagagcagctgcggggactggtggcggassagtttgtgtacatagagccctcaggtgcggaagckkagcagaccccagcctctgccaggtggtagctgtaccaacatgcaagcagcaggcattccatcctccagagggatggagaacagggccagagaacccacagagggccgcatacaaaatccaggtctggtgtcctgccttcacctgcactgcaagggcaggactctaagaagctgtttatgaggcaggtgccaaaacagagcctcagagtcagggccaaggcagcagcccagtcatgccacctaggcacatagtgaggctgcactttagaagttcagactaacacctccaaggcctcaaacaagagaacctatggaagaacccaggaggccatgagtggatccatgccagggctctctaggtcaccccagcagggaagatgtggggccccaggggtcagccttttggcacctagattagtctatccaggagaatatggagcccacgtgtgtacgcaggtgcaggtacccatgaagtgggagcactgggccccttgtttgacagggagaacaggggtgggcaccctctttgcagtcggaacatgagtttctggaggcagggccaaacatcatcagctcttgaccccagcagccactgtggcacctggcactttgctaacagtaagtgttgctcaggccatgagagacaagtccctggtattcagccctggcagaacagaagtggggtattgaggctgcatgaggattgccatgggaaaaaggacaggggcaatcctgcaggggctgccatgggtcctgggtcccatgcctcagtgacatccttgcctccctggcagggtgaccctgtggtgtttgcaggagtcttcagagggtgaaagggaggggccagtgagatgggtggctgatgcctgggaacttgtccggctttacccagagccctctgcctctggtgcaggaggctgcccggcgagcccaggagctggagatggagatgctctccagcaccagcccacccgagaggacccggtacagccccatcccacccagccaccaccagctgactctccccgacccgtcccaccarggtctccacagcactccrgacagccccgccaaaccagagaagaatgggcatgccaaagaccaccccaagattgccaagatctttgagatccagaccatgcccaatggcaaaycccggacctccctcaagaccatgagccgtaggaagctctcccagcagaaggagaagaaagccactcagatgctcgccattgttctcggtgagtcggccctggctgctggccacagcccggtctgtgaaaggtcccattccctgccatgtccttcctaaccatggctgcaggatcatggggntagcatttcctcaggcacaggccaagcccattgacatacagacagccctattaggtagattctgtaattgtgctcactttacagatgggcaaacagagttttagagtggttataaaacctgaccaagaggacccatggtttgaactcaggcagtctgactccagagtctggaaatttgactagtctattatgctggcaccagaacctcatgggcctatgtgcccaggaaagtcactttctctctctaggctcctcatctgtagagtaggttacttctcagggctgtcatggcaatcagttggtgaaagcattttctaaactacaaagcactatccatatgtaagtgtcactattatggtttttattactatggctctttttgaggaattgggaaattcagttcacttgcactcaaacaagactccatgggaccagagctgtgaaaaataaatgagatgttggggagtggcccccaatctaaatgaaaagcatccctgtccataaagcaggatttgtcaatagaagtctagaaaaccacatagtaaaggtcaaaacccaaaaggtggactgatatgggtggctgggaaaaggagggtcccctgtgactctgtcttccaggaagcacctgaatcccctttgactgccggatgatcctggggcgtgagtggggcagctgttacctcccttcttttatgaatgagagcacttgatcccatgggactactcacgatcatgggactgggatatggtaggctaggattggagccaggccctctgctgcagtccataggggctcagctctgtggccctactcttcccagacaccattcagtctccagggatgcctcctgtgcctgtagggcattccatgtacacattgcttccaggctaaatatcacacctgtgcaggaggtcctggaaaaagtgcacctgagttaggtgagcagagcaggtaggtggctgccctgggtgagagggcatggttcaaggcagggactagcaagggtgtacccaccaagactggggaaattgggggaaggctagagcgagatcatctggggacctggatagaccggagttcagctctcagccttgctgctcaagagtgaatgaccttgggtatattgcagagctgttgtgagtgtttttcttatgtaccttatgaggatgctataagaactaagtggcatgggtctatagccctcaaagatgacctggaagtagagtagatatttccatttctactggctaacctgggtcagaatggtaaccttttggatttattgttaaaccatgtacccttttctaggaggtgggaaagggacaaatgagggaagtgaggctgaaggagctgaagggatacttcactgcaaatgggtgtcagaggcaggtctaggatccaagaccgggactcctcctacagtgcttctgtggctacagcccaccgtcttggcatacgagccagggcgcactgggtgtgggtgttcccagccgtgcctccccggctctggggaccagcctgaccatgccctctcccccaggcgtgttcatcatctgctggctgcccttcttcatcacacacatcctgaacatacactgtgactgcaacatcccgcctgtcctgtacagcgccttcacgtggctgggctatgtcaacagcgccgtgaaccccatcatctacaccaccttcaacattgagttccgcaaggccttcctgaagatcctccactgctgactctgctgcctgcccgcacagcagcctgcttcccacctccctgcccaggccygccagcctcacccttgcgaaccgtgagcaggaaggcctgggtggatcggcctcctcttcaccccggcaggccctgcagtgttcgcttggctccatgctcctcactgcccgcacaccctcactctgccagggcagtgctagtgagctgg

SEQ ID NO: 754 - protein, 462 aa, Homo sapiens
  MOD_RES (370): Variable amino acid
MDPLNLSWYDDDLERQNWSRPFNGSDGKADRPHYNYYATLLTLLIAVIVFGNVLVCMAVSREKALQTTTNYLIVSLAVADLLVATLVMPWVVYLEVVGEWKFSRIHCDIFVTLDVMMCTASILNLCAISIDRYTAVAMPMLYNTRYSSKRRVTVMISIVWVLSFTISCPLLFGLNNADQNECIIANPAFVVYSSIVSFYVPFIVTLLVYIKIYIVLRRRRKRVNTKRSSRAFRAHLRAPLKVSRHPPTNSKGPHLTITKRAHLMLRLVYPGEYGAHVCTQVQSPLPLVQEAARRAQELEMEMLSSTSPPERTRYSPIPPSHHQLTLPDPSHQGLHSTPDSPAKPEKNGHAKDHPKIAKIFEIQTMPNGKXRTSLKTMSRRKLSQQKEKKATQMLAIVLGVFIICWLPFFITHILNIHCDCNIPPVLYSAFTWLGYVNSAVNPIIYTTFNIEFRKAFLKILHC

SEQ ID NO: 755 - DNA, 1228 bp, Homo sapiens
  source (1)..(1228)
  CDS (201)..(1028)
ccaaattagatgacattatcaatattatttaactgcactattatttcttccagagatgaacctgataaaggatctgtgattcaatggatcagagaaattacaccagagtgaaagaatttaccttcctgggaattactcagtcccgagaactgagccaggtcttatttaccttcctgtttttggtgtacatgacaactctaatgggaaacttcctcatcatggttacagttacctgtgaatctcaccttcatacgcccatgtacttcctgctccgcaacctgtctattcttgacatctgcttttcctccatcacagctcctaaggtcctgatagatcttctatcagagacaaaaaccatctccttcagtggctgtgtcactcaaatgttcttcttccaccttctggggggagcagacgttttttctctctctgtgatggcgtttgaccgctatatagccatctccaagcccctgcactatatgaccatcatgagtagggggcgatgcacaggcctcatcgtgggcttcctgggtggggggcttgtccactccatagcgcagatttctctattgctcccactccctgtctgtggacccaatgttcttgacactttctactgcgatgtcccccaggtcctcaaacttgcctgcactgacaccttcactctggagctcctgatgatttcaaataatgggttagtcagttggtttgtattcttctttctcctcatatcttacacggtcatcttgatgatgctgaggtctcacactggggaaggcaggaggaaagccatctccacctgcacctcccacatcaccgtggtgaccctgcatttcgtgccctgcatctatgtctatgcccggcccttcactgccctccccacagacactgccatctctgtcaccttcactgtcatctcccctttgctcaatcctataatttacacgctgaggaatcaggaaatgaagttggccatgaggaaactgaagagacggctaggacaatcagaaaggattttaattcaataagagctaaccatcgatttacacatggacacaaagatgggaacaaaagacactgaggcctacttgaggggaggagggtgggaagagtgtgaggtcagaaactaacctattaggtactatgctcactaccaagattgtcttcttggccaatcttctttgggcactctaccctaatgttctatctcatggaaccctgcccttct

SEQ ID NO: 756 - protein, 275 aa, Homo sapiens
MGNFLIMVTVTCESHLHTPMYFLLRNLSILDICFSSITAPKVLIDLLSETKTISFSGCVTQMFFFHLLGGADVFSLSVMAFDRYIAISKPLHYMTIMSRGRCTGLIVGFLGGGLVHSIAQISLLLPLPVCGPNVLDTFYCDVPQVLKLACTDTFTLELLMISNNGLVSWFVFFFLLISYTVILMMLRSHTGEGRRKAISTCTSHITVVTLHFVPCIYVYARPFTALPTDTAISVTFTVISPLLNPIIYTLRNQEMKLAMRKLKRRLGQSERILIQ

SEQ ID NO: 757 - DNA, 27893 bp, Homo sapiens
  source (1)..(27893)
  CDS (201)..(252)
  CDS (11364)..(11463)
  CDS (14312)..(14361)
  CDS (18284)..(18497)
  CDS (18620)..(19553)
  CDS (27613)..(27693)
  modified_base (3166)..(3265): a, t, c, g, unknown or other
  modified_base (3472): a, t, c, g, unknown or other
  modified_base (8025)..(8124): a, t, c, g, unknown or other
  modified_base (9388): a, t, c, g, unknown or other
  modified_base (9391): a, t, c, g, unknown or other
  modified_base (9985): a, t, c, g, unknown or other
  modified_base (13824)..(13923): a, t, c, g, unknown or other
  modified_base (24285): a, t, c, g, unknown or other
  modified_base (24410): a, t, c, g, unknown or other
  modified_base (24443): a, t, c, g, unknown or other
  modified_base (24787)..(24886): a, t, c, g, unknown or other
  modified_base (27429): a, t, c, g, unknown or other
  modified_base (27432): a, t, c, g, unknown or other
aagccatgcagcccatggtaccgtgtcatggcagccctggtgggactaagacaatgtcctcggctgaattgtgattgagagctcaatggtacagtccagggggagctttgtggtgttttggtttctcaaagaaccacttggatcgctaggactccggtctgcatttgaagccatctcctgcccaaggacacctggtcaccatggccagcatgcagccagacaccagggacctccctgtggccaccagaattggtggatccatcactcatggggtttctcaggctttgctttcgcaattagttggttctcctcaattgcattctgtttccctctgttggtaatagaggactgaccacaggcagtggtgatgacaggggaagtcttggcttagctcttagtgagagagacatgcagggcattggcagaagttcgaattggtgagcccagcctgtccctctcagacgcctccaggcgtgtgtctaagagaaagtctcctgcatgtaagaaagtattctacaggcaaacatgaccttttgttttgttttgttttgttttgttttgttttgtttttcattttgagacagagtctcactctgtcacccaggctggagtgcagtggtgcaatcttggctcactgcaacctctgcctcctgggttcaagcaattcttgtgctcagcttcctacgtggctgggattacaggcgtgcaccaccactcctggctaatttttgtatttttagtagagacagagtttcgccatgttggccaggctggtcttgaaatcctgacctcaagcgatccacctgcctcagtctcccaaagtgctgggattacaggcgtgagccaccatgcccagccccaattttgcttaaggaggaattttatagtaggtgaattaatatctcaatggaaaaaaaataccagaagttccaagagctgaaatagtcataggcctctctcactttctttgggttctcagaacccacccaaagagtggtcaagctaaaatttcaacccagagacatctgattccaaaggccatttttcttcacctctgccagccagagagtgaatggtcatgtagcctgggagtgaaagccatgctggggggtttgaactttttgttgtcgttgatgattgaagggttttgaggcagaaaagaaacataattcagtttttgttttagaaagatggagctgggcatggtagctcatgcctgtaatcccagaactttgggagcccaggacagggaggatcacttgaagccaggagcatgagaccagcctgggcaataccgggagatcccatctcttagaaaaaataaaaaaagcaaagaaagataattcttaggagctttatgtgaatattctttattagacataataacagataatattgaggagagtttttttctgggttggctacaataatttttgcagttttgtttaaaaattttttgatacaggctgggcacagtggctcacacctgtaatcccagcactttgggaagccgaggcaggtggatcacttgaggtcaggagtttgagaccagtgcctgtaatcccagctactcgggaggctgaagcaggagaatcacttgaacctaggaggcggaggttgcagtgagccgggatcatgccactgcactccagcctgggtgacaaagcaagactccgtctaaaaaaaatgttttttggctgggcgcggtggctcacgcctgtaatcccagcactttgggaggccgaggcgagcagatcacgagatcaagagatcaagaccatcctggctaacgtgatgaaaccccaggtatctctactaaaaacacaaaaattatggccgggtgcagtgtctcacgcctgtaatcccaggattttgggaggccgaggtgggcagattacctgaggtcaggagttcgagaccagcctgaccaacatggataaacccgatttctactaaaaatacaaaattagctgggtgtggtggcgcatacctgtaatcccagctactcgggaggctgaggcaggagaatcgcttgtccctgggatgcagtgagccaaccaagatggcacctctgcactccaggctggtgacagagcaagactctgtctcagaagaaaaaaaaaaaaatcagatggtaaaatacatgggcaatttgcatagagaggaagcagcatgagtaaaagcacagaggactggaagcacccttgggtgcccctgaggaactgtgagggatcccggggtggctggaatgcaggccacacaggcagggggaggtgaggaggtgggctcacctgcaagccagggataaccacggaatgcactggggtctttccaggcatcatctccccttcattcctcccccttacctctccactccccttcttcctcttttccccacccagacacctaagaaggctaacgaggcacttagagttgccgatgcttaactactgaccactgttttcaacacggctcactgagggctcactggatcggtgcctgtgttaggactgacagcgagccagttatatctgggcattagctgatggccagcgtttagctgtaacacacatggtgaagcagacagagaagtccttccagattagagacaaaggggaccccacacatgaatgggaagtcaagaagcctttgttggatggatggatggcaattgtatgcagtcacttcattatattttattcattccctaaggtcttatttatttattattttctgagacagggtgtcactctcttgctcaggctagagtgcagtggcacgatcatggctcacttctgcctcaaactcccaggctccagcggtcctcccacttcagcctcctgaatatctgggagtacaggtgtttgtcaccatgcctggctaattttttttaagtgtattttttgtctccccgtgttgcctaggctggtctcaaactcctgggctcaagagatcctcccacctcagcctcccaaagtgctgggattgcaggcgtgagccactgtgcgtagccactatggtcttttttaaattgacaaataataattgtatatatttacagtgtatagtgcaatgttataatatgtatataagcatagtagaatgactaaagccagctgtgtatctatcgcctcacatacttatcatgtaaaatgtagtggaaagnnnnnnnnnnnnnnnnnnnnnnnnnnnnnnnnnnnnnnnnnnnnnnnnnnnnnnnnnnnnnnnnnnnnnnnnnnnnnnnnnnnnnnnnnnnnnnnnnnnngtggagaacttcgggaggctgaggcacaagaaacacttgaactcaggagggggaggaagccgtgacccaagattatgccactgcactgcagcctgggcaacagaatgggactcggtctcaaaaaaaaaggtcattggccaagtgaggtggctcatgcctgtaatcccaatcctttgggaggccaaagcaaggaggatccctcgagtncaggagttgaaggccatcctgggcaacagcatggcccatctccaacaataacaaaaataaataaacaccccaaagccattaacaaaaatcaatctcacaaactgaaaacctaaaattctcacaagtataaccttattccatgttggcctcttttctctttttagagatagggtctcgctatcacccaggctggagtgcagtggtataatcatagctcactgcagcctctaactcctgggctcaggtgatcccacctcagcctcccaggtagccaagactacgggcacgagtcactgcacttggttccatttttttttttttttttttgagatgaagtttcactcttgtcgcccagcctggagtgcaatggcacgatctcggctcactgcaacctctgcctcccgggttcaagcgattctcctgcctcaacctccagagtagctgagattacaggcgcgcgccaccatgcccggctgatttttgtatttttagtagagatggagttttaccatgttggccaggctggtctcaacttccgaactcaaagaactggccacctctacctcccaaagtgctgggatggcagccatgtatcaccacacccagctcatttttcttttttttctttcttttttttttttttggtagagttggggtttcgccatgttgtccaggctggtctctaactcctgggctcaagagatccacctgcctcagcctcccaagatgctgggattacaggcatgagccaccgcacccagccctttcctttctttttaagtcagaatagtgttccattgtgtgtatagaccacattctgtttatctgtttatcagctgatggactcctgggctgcttctgccttttggctattgtgaccatactgctatgaacatgagtgtacaaatacctgttcaagtccctgctttcaattctttcaggcatatatccagaagtagaattgctggatctcaatatttttagtaactgccgcattgttttccatattttgcattcccaccaacaatgcacaagggtttcagtttctccacaattttgccaatgcttattttctgtgtttttttgtttgtttgtttgttttgttttttagagagaatctcgctctgtcgcccaggctggagtgcagtggtgtgatctcggctcactgcaacctctgcctcccaggttcatgccattctcctgcctcagcctcccgagtagctgggactacagttgcccaccactatgcctggatcatttttttgtgtttttagtagagacagggtttcaccgtgttagctgggatggtctcgatctcctgacctcgtgatccgcctgcctcggcctcccaaagtgctgggattacaagcatgggccaccgcacccagccttttttctttttttttaaccaataaccatcctaatgtgtgtgaagtggtatcttgtggttttgatttagatttccctagtgaaatagtaatattgagtatcttagtggcaaatgtgtttattggccatttgtatatctttggagataggcctattcaagtcgtttgcctttttcttcttttcttttttttctttctcttttttttttttttttttttgggatggagtctcactctgttgcccatgctggagtccagtggcacattcttagctcactgcagcctccgcctctggggttcaagcaattttcctgcctcagcctcctgagtagctgggactacaggtgtgtgccaccacatccagctaatttctttatttttatttttgttttattttatttatttatttttttgagacagagtctcactctgtcacccaggctagagtgcagtgactcaatttcggctcactgccagctctacctcccgggttcataccattctcctgcctcagcctcccgagtagctgggactataggcacctgccaccatgcctggctcattttttatatttttagtaaagacggagtttcaccatgttagccaggatggtctcaatctcctgaccttgtgatccactggtctcagcctcccaaagtgctgggattacaggcgtgagccactgtgcccggtctattttttaattaggttgttttttgttgatattgtacttgatttgtaagagctctttgtatatttcggatattaatcccttatcacatatatgtggtttgcaaatactttctcccatcccatggattgccttgtatattagtccactttcacactgctgataaagacatatccaagactgagcaatttacaaaagaaagaggtttaatgggctcacagttccacgtggctggggaggcctcacaatcatggtggaagctgaaaggcacatctcacatggcagcagacaagaaaaaggagcttgtgcagggaaactcccctttacaaaaccatcagatcttgtgagacttattcactatcacaagaatagcacagaaaagtcctgccccctggttcaattacctcccactgggtccctcccacatcatgtgggagttatgggggctacaattcaagatgagatttgggtggggacacagccaaaccatatcaccttgtctatttttttgtttgtttgttttgtttttatttttaatgtggagtctcagtcacccaggctggagtgctgtggtgcaatctcagcttactgcaacttctacctcccaagttcaagggattctcctgcctcagcctcccaagaagctgagactacagatgtgtgccaccagacccagctaatttttgtatttttagtagagatgaggtttcaccatgttagccaggctagcctcaaactcctgacctcaagtgatctgcctccctcggcctcccaaagtgctgggatgacaggcgtgagccactgcacctgacctcaccttgtctgttgatagtgagtgtcctttgaggcacaaaggttttacttttggtggagtccaatttatctattttttcttttgttccttgtgtttttggcatcatatccaaaaatcattgccttagtcaatgtcattaagcttttcccctatgttttctaagagttttatagttttagcttttacatctagatcttggatatattttgaattaatttttagatttatttatttatttttgagacggagtctcattctgtcaccgaggctggagtgctgtggctgcaatctcagctcactgcaacttctgcctcccgggttcaagcaattctcctgtctcagcttcctgagtagctgggattacaggcgcgtgccaccatgcccgcctaatttttgtatttttagtagagatggggtttcaccatgttagccaggctggtctcaaacttctgaccacaggtgacccacccccctcagcctcccaaagtgctgggattacaggcgtgagccaccgcgcccggcctgtttttctttcttcatagtttatgaaataatgatacacagcttctaagagatggtatctgagacttgattaaagaccggttccagttcttcatgaggctccacagtttccagagcattcttgcttgcccacgattgcttctataacttccatcaccttggtcacctgagtgtgcacttggcttcttgcatccctgagggccccaagtaacccacaaaatcagacaaatgttggacaattatacagtaattaaacccaaagctttgcaggccgtgagtgaacaccattcccccaaaccctggattagagagagacaagggggcaatttacctcaagggccaagatcccttccttaccgtttttatttatttatttatatttatttattcatttatttatttttgagacggcgtctcgctctgtcgcccaggctggagtgcagtggcgtgatcttggctcactgcaacctctgcctcctgggttcaagcgattctcctgcctcagcctcccaagtagctgggactacaggcatgtgccactatacccagctaagtttttgatttttagtacagatggggtttcaccatgttggccaggctggtctcgaactcctgacctcaggcgatccgcccaccttggcttcccaaagtgctggcattacaggcgtgagccactgggcccggccttaatttttgtatttttagtagagacagggtttcaacgtgttggccaggctggtctcgaactcttttttttttattttcattttttttgagatagagtcttgctctgtcactcaggctagagtggaggggcgtaatctcgactcactgcaacctccacctcccgggttcaagcaattcttgtgcctcaggcccgcaagtagctaggattacaggcacacgccactgtgcccagctaattttttgtatttttagtagcaacggggtttcactatgttggccaagttggtctcaaactcctaaactcagattggtctcgaacccctggcctcaagtgatccgcccacctcggtctcccagagtgctgggattacagatgtgagccactgtggctggacccctcactgttttaaagacttgaattattgaggtatttgcttaaaaggtaacaatnnnnnnnnnnnnnnnnnnnnnnnnnnnnnnnnnnnnnnnnnnnnnnnnnnnnnnnnnnnnnnnnnnnnnnnnnnnnnnnnnnnnnnnnnnnnnnnnnnnntggtgttgaaccatttgtgagccctaacgtccacgggagatgagagtacaaggggccgccaccaccgccggggtaagtttttggaattttaataagaaacggggttttcccccatgtaacgcagggaaggttctggatctcccgaccctcggggaacggggcgccctgggccttcccaaaagggttggaatccaaggtgggagccccccgggcccgggttgcaagtttgttttttaaagggtgctatttcttttcatcggggggctctatccctaagttttcgtccgactgcatactaccgttattttgtataaggttgaccatcccagaaaaaagagatatttatcttttccagcagtgccagggaacaactcagggtgaatgtctcattagcattttagagtcatgtgctcatccctgggccagtcacagtggccacagggatggaatgatctgattggccagacctggtcacatgcctatttttagaggcaaggggtggaaccaaatccccaatcctccaaacctcggagatggatggagagggcggaatctgttgcccaaggaaaatcaggatgctaatgcccaagtagagtgcctggatgctgggaagacaaaaacaacacataaataggccatcatctgcactcttgatcccagaagccctgctcaaagggagaaggattaggggactgagatgaagagggaggagcggcaccacagcagttaataaaaagcaacctgttctgcttctccaaaaagtagacgtttaataaggtcatttgctcttgcagcacaggactgacaagggacacaaccagttctgtcacaagaggcccataaacattcaatgtagaggaggactaattttaaaagatgatacaattttatcgggatgagataagcactttgttaagtcaggcagcaaaacctgtctttgcttagtcaaaccaaggaccccctcatatgagggacccagagtatcagaagtatcagcataaacgcatctcactggttgaagctgggatgacccgccacaggtcgattctcagtggactaaaagcactggcagaggatcagcttgactctaattctgtgctcccagacactctgagagtcttactacaatgcattttagtcttttattgtaaaaatattacatgcttcttgcaaatattcaaccatacagaagcatatacagtaaaaaatgaaggtttctctctccccagagtactgtgacagtttggtcatataaattatatantantagtaatagggcgggcgcgtggctgaagccctgtaatcccagcactttgggaggccaaggcggccggatcacgaggtcaggagatcgagaccatcctggctaacacggtgaaaccccgtctctaataaaaatacaaaaaattagcccggcgtggtggcaggcgcctgtagtcccagctactcgggaggctgaggcaggagaatggcgagaacccgggaggcggagcttgcagtgagccgagatagcgccattgcactccagcctgggcaacaagagtgaaactccatctcaaaacaaacaaaaaaacaaacaaaaaatacacacacacacacacacacacacacacactataatttaattttggttaacttaaaatgcaccagcttgggcaacaaagtgagaccccatctctataacaactaggaaaatttagctgtttgtggtggcacacacctgtagtcccagctacttggaaggctgagctgggaggatcacttgagcctgagaggccgaggctgcagtgagccgtaattgcgccactacactccaacctgggtgacacagaaagaccttgtctcaaaaaactttttttantaaaataaaataaataaataaataaaatgtaaaagccacagatggtttgtggctaccatatcagaagtttggtagatctcacttccccacagctctgaagccttctgtgattctctttctttagtctgggtcaagcccgcttctctgggccatttcggccatcctcacacttaccatgcagcattgtaatgatttacatgtgtttctccagtacgtagcccaatgcctggcacctttttggctactcgataagtatgtgtcagataaataaatgaaccacccaagaaatgattacagactctttttttgttttgtttcattttttttgttttgttttgagacagactctcactctgtcacccaggctggagtgcagtggtgcggtctctgctcactgcaacctccacttcccgggttcaagcagttctcctggctcagcctcccgagtagctgggactacaggcacccgccaccatgcctggctaattgttgtatttttagtagagatggggtttcaccatgttggccaggcttgtctccaattcctgacctcacgatccacctgcctcggcctcccaaagtgctgggattacaggcgtgagtcacagtgcccagctgtgattccagacttctggtagcttccttcttctcctggctgtgaggtgacactactgcacagaaagggtgaattgaaagaacttggcgacacacctgccgggctgatctggcatgagcttggggaccttaggctctgttgtgccccctactctgatgctttataaagaaagcagtttggtttatacgtgaccagggcaggaagtgaatattcctgcctgggttcacccaacaggtggttgggggaaaaactgtctatgtggtataaattcgagggctctgtttccccaaaactccttccccagccaggaccctgattttctcattgtattagcttcctgtttctcagggtgctggaggccagaagtctgtaatcacagtgtcagcaggactgtgcattctctagggggactagtgaagactttgtcctttcccttccagcctctgattggctgtcagcattcctcggcttgcgaccacatccctccagtatctgcctctgtgttcacatggacttctctcccatgtgtctctcctaaggacatttgtcattggatttagggcacagtaatcatgaatcatctcatcgatctagggatctttaacttaattagatctgcaaagaccctttctccaaatacggtcatattcatagtttctgggggacaggatatgaacacagattttcaagggaggccactatttaacccactacagtgatttttttttttttttttagacagagtctcactctgtctccaaggtgctggagtgcagtggtacgatcacggctcactgcagcctctaactcctgggctcaagcaatcctcccgcctcagcctcccgaatagctgggactacaggtgcgtgacaccacacctggctagtttttgtagatatgggagctggctatgttgccagggctagtcttgaactcctgggcttgaactcctgggctcaagtgatcctcccacctcagcatcacaaaatgctgagattacaggcgtgagccactgtgcctggcctacaattacttttatttatttatttacttatttttgagacagtctcgttctgctgcccaggctggagtgcagtggtgcaatctcggctcactgcagcctccacctcccgggttcaagcaattctcctgcctcagcctcctgagtactaggagtacaggcatgtgccagcacacctggctaattttttttttttttttttttagtagagacagggtttcactgtgttagccaggcaggtctcaaacccctgacctcaagtgatccacctgccttggcctcccacactgctgggattacagatgtgatccactgcgcccggcctacaatgacttttcaacgtcagtttttgagttctagagttcctctctacccagcaatttcaacatgccttctctggaagtgaggaggaattactgaccaaatttaatgttgaagtgattcattgtatttgtttgtttgtttgattctgcctgaaggggctacagcccaggagaaggctgggaccgaaaggttgaggggagagatgaggattgcctcacacagtgacccaggtgtcacgcggaccagacacgggctctgatggggaagttcttgctatttcaaaatgactttaaaattgcagtctgggcatagtggctcatgcctgtaacccctgccctctgggaggccaaggtgggtgaatgactttaggtcaggagttggagaccagcctgaccaacatggtgaaaccctttctctcctaaaaacacaaaaatcagctagatatggtggtgcatgcctgtaggcccagctacgtgggaggctgaggtgagaggattgcttgaatcggggaggcagaggttgcagtgagccaagatcacgccattgcactccagccttggtgacggagggagaccttgtctcaaaaaaaaaaaaaaaaaagagagaagaaaattgcaaataatagtttcttctatatataaaatgcaagaaaaattaaaaagggggagctatagattcaaagagattgaagagatagatcaaccaattgtccatactgtgactcagttaactccaaatgttaaaaagttggagacatcggccaggtgtggtggctcacgcctgtaatcccagcactttgggaggccaagatgggtggatctcgaggtcaagagatccagaccatcctggccaacatggtagaatcccatctctactaaaaatacaaaaattagctggatgtggtggtacgcatctgtagtcccagctactcaagagactgaggcaggagaatcacttgaatctgggaggcagaggctacagtgagctgaaattgtgccactgcactccagcctgggtgacagagcgagactccgtctcaaagaaaaaaaaaaaagttggagacattcgtggaaatgtgaacactgactggctaattgtatacattaaggaattactgttacttatgttaggtgtgatactgatattttggttatgtttaaagaaagagtccttatcttttacaaataaatactgaatatatgtagatgaaattatataacatttcaaacttacttcaaagtagtctggcagggaaggggagtagaaatagaaaaagagaggttacaagtttttgattgttgtagttggatggagggaacatgggcattcgttgtcctgttctctccgcttgtatatatttctcataataaaaagttaaggccgggcacggtggctcacgcctgtaatctcagcacttcaggagaccaaggcgggtggatcagctgcaatcaggagttcaaaaccagcctgaccaacatggtgaaacaccatctctattaaaattacaaaaaattagccaggcgtgatggcgcacgcctgtaatcccagttacttgggaggctaaggaaggagaattgcttgaatccaggaggtggaggttgcagtgagccaagatcgtgccactgcaatccagcctgggagatggagcaagactccgtctcaaaaaaaaaaaaaaaaaaagttaagtaggccaggcacagtggctcatgcctgtaatcccagcactttgggaggccgaggcaggtggatcacctgaggtcagaagttcaagaccagcctggccaacatggtgaaaccccatctctacacaaatacaaaaattagccaggcatgatggcaggttcctttaatcccagctacttgggagggcttaggatnnnnnnnnnnnnnnnnnnnnnnnnnnnnnnnnnnnnnnnnnnnnnnnnnnnnnnnnnnnnnnnnnnnnnnnnnnnnnnnnnnnnnnnnnnnnnnnnnnnncttccgagtagtgggactacagtgctgcccccacactgggtatttttatattttaatagagaaggagttttacatggtgggcagactggtcttgaactcctgattccaggtgatctgccctcctcggcctcccatagtgctgggattacaggtgtgagcccctgcctggccaggtttttttttttttttttttttctgagacagattctcactctgtggcccaggctggagtgcagtggtgcaatcttggctcactgcaacctccacctcctgggttcaagcgattcttgtgactcggcctctggaatagctgggactacaggcatgcaccaccatgactggctaattttttttttttttgagacaaagtctcactcttgtcccctaggctggagtgcaatggcgctatctcggcccactgcaacctccgcctcccaggttcaagcgattctcctgcctcagccccccaagtagctgggattacaggcacctgccaccacacccggctagttttggtatttttagtagagacagggttttcaccatgttggccaggctggtctcgaactcctgacctcaggtgatccacccacctccgcctcccaaagtgctgggattataggagtgagccaccactcccggccacgaccggctaatttttgtagttttagtagagttggggtttcaccatgttgggcaggctggtctcgaactcctgatcgcaagtgatctgcctcccaaagtactgggattacaggcatgagcctagatagatctaaatttggtgcacaaaggaatagggcaccacagcatgatcttgagcaggaagtccaagaagagagagacagcatcttcttgaagccctggggtagaataagatcagattgtacgtgaaaaaccagtaggcttttggggtgggtgcggtggctcacgcctgtaatcccagcactttgagaggctgaggcaggcagatcgcttgaacccaggagttcaggaccagcctgaccagtatggtgagaccttgtctctacaaaatatacaaaaattagccaggcatggtggcacgtgcctgtggtcccagcaacttgtgaggctgaggtgggaggatcacttgagcctgggaagcacaggctgaaaggagctacatttgtgccactgcactccagccttagcgacagagccagactctgtctcaaaacatacaaaccaaaaaaaccagtagactttcagaggaatagatgccatttttttcttccttaatcctctgccttacagctaattctacagccacaaaaagaaaaaaaaaaaagagagagaagaaggtgatttgacaagacaaaggatttagaaaagaaaggcaggtgttagtcatgtggaaaaaaaaggaagtatttgtgtttacaagaatcccgacagtatctgagaatgtagaatgaagaatattttccatttgttaaaaaatccaggctaagcatgtgaagtactcagggttacccctctgacctcatcttggggtgtttcaacctaccatggttacccctgttagttaacaccttatcacagaatcacaaaggcccacagagtgaaagtggttacaatgagctctcatgaaaagtaggagttaggcttggcatggtggcttacacctgtaatgtcagcacatttgagaggtcaaggtgggtggatcacttgagccccggagtttgagacctggacaacatggcaaaaccccgtctctacaaaaaatacaaaaattagctgggcatggtagcatgcacctgtagtcccagccactcaggaagctaaggtaagaggatggcttgagcctgggaggttgaggctacagtgagccaagacagagccactgcactccagcctggacaacagagccagactctgtctcaaaaaaaaaagaaagagagagagggagggaggcagagagggagagagagagagacagagagaaagagagagagagaaagaaagaaaagaaagaaagaaagaaagacggaaggaaagaaagaaggagaaaagtaggagttagtcatccaggccaagagtatgaagtttgtcttcaaagaactcctgaatttgtgggggaactagatatagacgtttgacgaacacgtttttatttattagaggttatgagactagcgagtagggtggaaggaggaaagtggcaggaaaatcatactggaaaggtaggttgggaaccaactgtgaaggaccttgtacgtcaatccaaggaatgtgaccttcaacctagagcaagaggtgacaaactcaaaatcccacagagactaggcttgccaatgaggaaagccaaccaggtgtaaggcaatagggagtggtggggactgtggcaaacagtaaagctcattctctgtctacaggggctcattctctgtctctactccatctactctaagctccagctgattgtttccatgtgggagtgtcggtccagtgtggccagatcttccagtgttctaagagacaacagaaatccaggtttttataggactgcaccaggttttaaaaacatatcggccaagccaggctggtttttaaaccagatatggtccacaggccatcattctagccccttggcagattgaagggagctagtgaagatttttaagtgaaaaaaggtatatgataatatctgtgcttcagaaaaatcagattattgtgtagaagatgacttacaggaaatagatgagaggaagggaaaccagttaggaaactgtttcaacagttcaggtgggaagtgactgcggtctgtgctagggcgaggcaggggagaatgtgggtggacagatttggagtccagcatccagtgggaagaatttagcttcagtgtgcatctagaagacagacacattctttcaatgcaccccctcttttccgccccattttttttttttgagacagagtttctttctgtcacccaggctggagttcattggcacgatctcggctcactgcaacctccacctcccgggttcaagtgattctcctgcctcagcctcctgagtaactgggattacagacacatgccacaacacctgactgatttttgtatatttttagtagagatggggtttcaccatgttggcaaggctggtcttgtactcctgacctcaagtcatccacctgcctcggcctcccaaagtgctgggattatagatgtgagccaccgcgactggcttccaccccattttcttctttctttcttttttctttttctttttcttgttgtttttttttttttttttgtttgtttgtttgttttagacggagtctggttctgtcacccagactggagtgcagtggcgcaatcttggctccctgcaagctctgcctcccgggttcacgccattctcctgcctcagcctcccgagtagctgggactacaggcgcccgccaccacgcctggctcatttttttgtatttttagtagagacggggttttaccgtgttagccaggatggtctccatctcctgacctggtgatccgcccgcctgggcctaccaaagtgcttggattacaagcgtgagccaccgcgcccggcctccaccccattttctaaactggaagctgaaaggcacagggcagattaataatccttaaagccaaaggacaggaaattttagcaaagactccaattttttgtgcagtctaatgttactcatgattgctttagagatggactccttaatcaactcctccaatcctcttccgcccccagggggcagttttaattgatgggctcagcacataattgaaattaaaaacgtacatctcatggtgtttggctcattcaagcagccaatggaaactcagggccaaatctttgtaaaagttctaggctctgcttcccagcagagggggaaaccggctcccaaagaggccgttttgtggagacagacatatgagaagtgggcttcggatctatttcatggtcttggtggttgtgcaactggccactttggttcacggaaggatgtaaagggcagggaggtgggaatagagcgggggaaaggtgactcccgtcaaagaatttttctaacatccatcaagtatcgtgattagaacttttctctccgcagactcctccaatttttgagcgcggtatttttcggcacaggaaatggcccggaggagctgcagagcaaagcctcccctctctggcaccgcatgggagtgccccgtgggatgagggagaggacaaggcagtcaggcaaaggttacgggaggaaagcaaaggcaggggcccagaaccactccaggaaatgtttggatttctccaccaggagggaggacaaacaagctttcttcttgccttctgggcagctttgtgtgctctccagcacggagtccgaggaggaacagcgaagctgaaaatgaaaattactctggcgctggacccaatcgctcctctacggcatcaatctcatcggacccccccaccctaccgcctctcagaaatgaccacttttgcaaaattgcatgcatttccaagcttcatccggctccaggcttggcctctcccagaggcaggcggcttgtgagacgggctccagagaaaggacctccctgggtctctcatttcctggctgaagtttctcttctcgctgctgtggcagcatccaacccacacacacaggacccgcatcctgggtgatgaagtcagacacgcagcagctgggtgagtgctaacgctcagataagcatctgtgccattgtggggactccctgggctgctctgcacccggacacttgctctgtccccgccatgtacaacgggtcgtgctgccgcatcgagggggacaccatctcccaggtgatgccgccgctgctcattgtggcctttgtgctgggcgcactaggcaatggggtcgccctgtgtggtttctgcttccacatgaagacctggaagcccagcactgtttaccttttcaatttggccgtggctgatttcctccttatgatctgcctgccttttcggacagactattacctcagacgtagacactgggcttttggggacattccctgccgagtggggctcttcacgttggccatgaacagggccgggagcatcgtgttccttacggtggtggctgcggacaggtatttcaaagtggtccacccccaccacgcggtgaacactatctccacccgggtggcggctggcatcgtctgcaccctgtgggccctggtcatcctgggaacagtgtatcttttgctggagaaccatctctgcgtgcaagagacggccgtctcctgtgagagcttcatcatggagtcggccaatggctggcatgacatcatgttccagctggagttctttatgcccctcggcatcatcttattttgctccttcaagattgtttggagcctgaggcggaggcagcagctggccagacaggctcggatgaagaaggcgacccggttcatcatggtggtggcaattgtgttcatcacatgctacctgcccagcgtgtctgctagactctatttcctctggacggtgccctcgagtgcctgcgatccctctgtccatggggccctgcacataaccctcagcttcacctacatgaacagcatgctggatcccctggtgtattatttttcaagcccctcctttcccaaattctacaacaagctcaaaatctgcagtctgaaacccaagcagccaggacactcaaaaacacaaaggccggaagagatgccaatttcgaacctcggtcgcaggagttgcatcagtgtggcaaatagtttccaaagccagtctgatgggcaatgggatccccacattgttgagtggcactgaacaagcagaccaacaacactgaggaagatagagtggtgacttagaattaactcgtgctaaggggtcgggggctttgaaaatgccacccccctttcttattgcaagacggcttctcgcacatgaactgcatccttctcattctgtcggaaatgaaattcacacaactataccttttggggaggttccagttgattgaagtgagttggctgcattttcttatctgatcacaatggcaggggacagaatgtgcatggagtggagcatgtgtgtgttgggaggggggctaggaactgcacagcccttgtgtaattttcgttgtttgtttttgttttgagacagagtctcactctgtgtcccaggctggagtgcagtggcacagtctcggctcactgcaacctctgcctcccgggttcaagcaattctcctgcctcagcctcccgagtagctgggattagaggcgccagccaacacacccggctaatttttgtatttttagtagagacagggttttgccatgttggccaggctggtctcgagctcctgacctcaggtgatccgcctgccttggcctcccaaagtggtgggatcacaggcgtgagccaccgtgcccggcctcccctgtgtcattttaaatggctaagtaaatgggtatatgtgtttgaatggggcatgttcactctcttaggggctatggggcagttagcagcatttcctatcctctgaccttaaatcattccttatctcagaaaacagaaaccgggctcagtcaatcaatgctttatttcaggccgaatgaggctctttagattgggatctattgatctatcaattttcatctttacatttctttgtacatctgtacattttgtccaaatgtacatctgtacgtctgtcatcattgtgacttcctggtagcccaagaagaacaacaacaaaacaatctgctctgaccttcttcaaatctttgtatttcaaagaaggtgctgagggatctgtttccttgccctggcttctccagtgggatgtgctgagtccaatacaattgcttttataattgcttttgacaacttgtcatgtgactgtgaattgaaattattcacttattttccaagtatttactgaattcgtatttggtggcaggcagtatactgtgtaatttttagtggagggtcattagtcaactcttatgtgacagtaaagttttttgggggggtggggacagagaagttaagagctttcatcctttcacggaatacagtttctagaccgattctgtgtgaacatcagttttgtcctcttattgcaagactccctcatacacatgagtttcccaaatgtgtacctggacccctcgaaacagaggactctacgaaatgacaagctgcccctgccctgaattagggggaaacattccaggccaactctagctcctttctcaagctacaaagtggtgaacatggttctcaactccttaatttatactctctcaaatgcccaggatactctacccacttaagaaccttgccaacttctgggggttgggcatggtggctcacgcttgtgatcccagcactttgggagactgaggcggatcacctgaggtcaggagttctagaccagcctgaccaacatggagaaacctcgtctctactaaaaattcaaaattagcctggtgtggtggcgcatgcctataatcccagctattcgggaggctgaggcaggagaatcacttgaaccgaggaggtggaggttgcggtgaggtgacatcgtgccattgcactccagactgggccacaggagtgaaacgccgtctcaaaaaaaaaaaagaactttgccaacttctagttctttggcctcaaaacacccctctaggctgtccctattattccttttttcagaggcactgtgcagcctagtgatgaaaagtacgagctatagagcattagaagcatcgaagtttgaatctcagctcaagcatttactaggcctgtgatcttagggcagcttgtgtttttagacactgaatctcgctctgttgcccaggctggagtgcagtgagtggcatgatcatagctcactgcagcctcaaactcctgggctcaagtgttcctcccacctcagcctcctgaatagctgggagtacaggcataagccaccacactcagctaatttttaaattttttttatagagacgaggtctcactcactgtgttgcccaagctggtctcaaactcctggcctccagcaatcctcccaccttggcctcccaaagtattgcgattgccagcatgagccactgctcccagcctggcatatatatagatatatatagagatatatagatatctatctatctatatatatatatatatattttttttttttttgagacagagtcttgctctatcacccaggctggagtacagtggcccaatctcagctcactgcaagctctgcctcctgggtccacgccattctcctgcctcagcctccagagtagctgggactacgggcgccccaccaccacgcccggctaattttttgtatttttagtacagacggggtttcattgtgttagccgggatggtcttgatctcctgacttgtgatccgcctgcctcggcctcccaaagtgcttggattacaggtgtaagccaccgcaccccgcccagcctggcagattttatttaatcatttgtagcttcattttcctcgtctgtcaaacagggatactgtaatacaacctcagtgtgtcattgggcagtttaaatgaatgtacattcctgaggcatcagaactttgttcactgttatatacccaatgcctagaagaggacctgcacatagcaggtgctcagtaaatgtttgttgaatgaatgattaagtgcatgtaaagcattaagcatagcgcctggcagtaagtgctcaatattatgacttcttatattaacacgttttacatataaagaaatggaggcaagaaagcatttcctttggggtttagagcgcttaagttgttcctctgttatcatgcctgaattcccccgcccctcagttacctggggaagagtaaaggcaagaattcttaccagcattagtcatacatcctcctgataggaatctgcaaaaacacacacttctgcttttagttctattcttagaattctctcctgggctgttgctcctttgttccttcattgtaataaaaatggattctgaaagcaaatctgtgtcctgtgtgtgactctaggtcaaaggacccctaggattttgccctccaaggaaaaaaagctaaaatatctagaactgcatggcaggcaggcaggcagaggttctcaccaaaaaaacagcaagcacaaacaaaaagaaaaatcaaatccaaactgaaatacagtcttgattctaaatttgcttccctttttacgttcgcagaatgtgacgaaaaatacatcttagcaagaagtttctttggacattgtaaagaagtggagtatagctttgttgacaacactttgtttaaactatctgaaacaggaaaatgattgttttagaggaaaatgtgttctccctctttttttttttttttttggtgagatggggtctcactgtgttgcccaggctggagtgcagtggtgtgatcatggctcactgcaacctcgacttccaggctcaagcgatcctcccacctcagcctccctagtagctggggccacaggtacactccaccatgtccagctaatttttctgtaatttttgtagagatggggtctcattatgttgccgaggctcctctcaaactcctgggttcaagtgatccttcctccttgttcctccttttagagtctttcaggaaaagtcacatgaaagctggaagagctataagtctatagggatgatgtggaaaaaacaagaggtgtcttttattcgtgctaaccatggtaaaactttcagttttggtctattctcggaatggatttccttaccctttattaaaaccaaaatgtttaacatggcatctgaaggttactaaagtgcagcagctccttggaggggattagaactctgaggcacaagggcttgagccagttgttctcaaggtggagacttggctgcactgtgaggcgtggtctctacctgttggcttcccaggccttctgattcacagaggtttctgatacgattcaagaaagactccatcatcacaacgagtgcataaatggcttcaagatcagcgacctactttgcaggccccagtgaaaaatgaaaatgtggggtcccttgttcaaaaggtgttaatggctgagcgaggtggctcatgcctgtaatcccagtaccttgggaggccgaggcgggcagatcacgaggtcaggagatcgagaccatcctggctaacacggtgaaaccccgtctctactaaaaatacaaaaaattccccgggcgatgtggcgggcgcctgtagtcccagctactcgggaggctgaggcaggaaaatggcatgaacctgggaggcgggacttgcangtgagccgaaatcgcgccaactgcacctcaacccggggtgacaagcgagactcccgctcaaaaaaaaaatttaacttaaatttaagaggaaaatatttaaaatctacaggcattggcttttagcnaggtagccaagcaggtttaaggggcttaaacancccctttggatggattatccggacccgggcaaacccagggcccataaggtggttcctgcgtgggaaaatgggtatctcggcttataaattcccacccaaaataaaagaccggggaaccaataaaggtggaaaggcccgtggggggccctataggagggagggcaaacccccacataaaattggggggcgggccctactgccgcctttttcaagagggggaaaacctgttcgtccccccggtttattataataggcccccccccgggggaaaagagggggttttgtttatagccccccgggggggtttttttttcttaccgggagaggcgccaaagtgttatgcnnnnnnnnnnnnnnnnnnnnnnnnnnnnnnnnnnnnnnnnnnnnnnnnnnnnnnnnnnnnnnnnnnnnnnnnnnnnnnnnnnnnnnnnnnnnnnnnnnnncccgtggaggctcatgcctgtaatcccagcactttgggaggtttaggtgggtggatcacctgaggtcaggagttcaagaccagccgttaacattatgaaaccccatctctactaaaaatacaaaaaattagcccagcgtggtggtggtggacgcctgcaattctggatatctgggaggctgagacctaagaatcacttgtattaggaggaggatgatgcagtgagctgagatcgcaccactgcacttcagcctgggcaacaagagtgaaactccatctcaaaaaaaaaaaaaatactattacaggcattctttttaaaattttatttttatttttattgaaattaataattttttttcttttagaggcaaggtcttactctaatgcccaggccggtctcaaatttttgggctttagcaatcctcccacctcagcctgctgggattacaggtgcaagccaccaggccccaccaaaaaaaacgttatttttagagatagagtctcaatatgttgtctagattggacctgaattgcttggctcaaaagatcctcctactccagcctcctgagtagctgggattacaggcatgtgccaccacacccagctaaattttgtattttagtagagatggggtttcaccatgttgaccaggctggtatcaaactcctgacctcgtgatccacccacctcagcctccaaaagtgctgggattacaggcgtgagccaccgtgcccggctttttttttttttttttttttttggggggagtctcactctgtcacccaggctgcagggcaggggcacaatctcggttcactggaacctccaactccctggttaaagcgattctcctgcctcagcctcccaagtagttgggattataggcgcccgccaccacacccagctaatttttgtaaattttagtaaagacggggtttcaccatattggccaagatggtctggatctcctgaccttgtgatcctcccgtctcggcctcccaaagtgttgggattacaggcgtgagccaccatgcccggccatgctctgctcttatgagctgggtggccctgaatattttatcctctctgagcttcactttcctcattttgaaatcagaatcagtaataataccttccacatgggctacagtcagggtgaaacaagcaactataaaagcactgagctcctggctaacacggtgaaatcccgtctctactaaaaatataaaaaattagctgggcatggtggtgggtgcctgtagtcccagctactcgggaggctgaggcagcatggcgtgaacccgggaggcggagcttgcagtgaggcaagagcgagactttgtctcaaaaaaaaaaaagcactgagtatgggttccagcacatgggaagctctctataatgtaggtgccaccatcatcttcttcatcatcgtcttcatctcacctggatcatcatcaagtacttgtagttctatgggaatctaatattaggtcatcctgactctagtttactgtgaagagtctataagctcctattattgaacctgcgtttgcagctaaagaaataaattgacatcttatggtggcagcgatggttcacacctgcaatcccagcattttgggatgccaaggcgggaggatcacttgaagtcaggagttcaagaccagcctggccaaaatggtgaaatccatctctactaaaaatacaaaaattagccaggcatggtggcttgcacctgtagtctcagctacttgggaggctgaggcaggagaatggcatgaacccgggaggcagaggttgcagtgagccaagatcatgccactgcactccagcctggacgacagagcgaaactccatctcaaaagaaaaaacagaaaaaaaaaaaaaaggaagaaatttacattttataactcaaagtagaaggaacacaatttagaaacctcctgcatggaagaattcataagaccaaaatattaaagggagaaaacattctataggatgacacccaatcgcaccgacaagcagagaaacaatgtgtgcaatggtgtcccgctacaaggcggggttccatgtcctcttaggtcctgtcactctaagtttaattttacaaaaatgggggctttgaaaatatcacatacttagtgggggaggttttgcgtgtgtggagacagagtgcacaggaccgtccgtactttctgctccattttgctgtgaatctaacactgccccaaaaaataaagttcattaaaaaaaatcacggccaggcgcggtggctcacgcctgtaatcccagcactttgggaggccgaggcagacggatcacaaggtcaggagtttgagaccagcctggccaacacagtgaaacctcgtctttactaaaaatacaaaaaattagctgggcgtggtggcgcacgcctgtagtcccagatactcaggaggctgaggcagaagaattgcttgaacctgggaggcggaggttgcagtgagctgagattgttccaccgttctccagcctgggtgacagagtgagactctgtctcaaanaanaaaaaaaaaaaaaaaaaaaaaaatcacatcctaaggtcccaaggacataaaacaagttagagacctcatccagttttttgtttgtttcagggacctgcaaccaactttcttactgaccagtttcctgggctgtctagaacagacagcttatggggtactaaccccatgctctatcctaaggtacccctcttcatgcagagcgacacagaaaaacaaatttgtagcacaaagtacacccgatttgctacagcttacgactagcctcatgaatcctttttctcattaattcaaagtttgcaaaaaaaagaaatcacatacttaaaaataaatcacttgagcacagaagcatatcaaaatctaatataaacaaacaaaaaacccaacttatgttaacatgccactgaaactgggctcaagttttcaaatgtcttatgaaatattacactctccagcaggctatt

SEQ ID NO: 758 - protein, 476 aa, Homo sapiens
MASMQPDTRDLPVATRIGAGVQWYDHGSLQPLTPGLKQSSRLSLPNSWDYRLECNGAISAHCNLRLPALCALQHGVRGGTAKLKMKITLALDPIAPLRHQSHRTPPPYRLSEMTTFAKLHAFPSFIRLQAWPLPEAGGFQTRSSWVSANAQISICAIVGTPWAALHPDTCSVPAMYNGSCCRIEGDTISQVMPPLLIVAFVLGALGNGVALCGFCFHMKTWKPSTVYLFNLAVADFLLMICLPFRTDYYLRRRHWAFGDIPCRVGLFTLAMNRAGSIVFLTVVAADRYFKVVHPHHAVNTISTRVAAGIVCTLWALVILGTVYLLLENHLCVQETAVSCESFIMESANGWHDIMFQLEFFMPLGIILFCSFKIVWSLRRRQQLARQARMKKATRFIMVVAIVFITCYLPSVSARLYFLWTVPSSACDPSVHGALHITLSFTYMNSMLDPLVPLFMQSDTEKQICSTKYTRFATAYD

SEQ ID NO: 759 - DNA, 1849 bp, Homo sapiens
  source (1)..(1849)
  CDS (201)..(829)
  CDS (1106)..(1649)
atataattgtctatcagagaatgcttttatgtggtcccgtgtgaggtgaaggaaggcaaactaaaacagcgtgaggaccttctggtttcatgatcccacatctttatgtgggaagattagaatcctaagaatatgtatgcattttcaaaaagatactgtttgttttaacatttttttcatctttttgcagaagtttagcaatggcgtctttctctgctgagaccaattcaactgacctactctcacagccatggaatgagcccccagtaattctctccatggtcattctcagccttacttttttactgggattgccaggcaatgggctggtgctgtgggtggctggcctgaagatgcagcggacagtgaacacaatttggttcctccacctcaccttggcggacctcctctgctgcctctccttgcccttctcgctggctcacttggctctccagggacagtggccctacggcaggttcctatgcaagctcatcccctccatcattgtcctcaacatgtttgccagtgtcttcctgcttactgccattagcctggatcgctgtcttgtggtattcaagccaatctggtgtcagaatcatcgcaatgtagggatggcctgctctatctgtggatgtatctgggtggtggcttttgtgatgtgcattcctgtgttcgtgtaccgggaaatcttcactacagacaaccataatagatgtggctacaaatttggtctctccagctcattagattatccagacttttatggagatccactagaaaacaggtctcttgaaaacattgttcagccgcctggagaaatgaatgataggttagatccttcctctttccaaacaaatgatcatccttggacagtccccactgtcttccaacctcaaacatttcaaagaccttctgcagattcactccctaggggttctgctaggttaacaagtcaaaatctgtattctaatgtatttaaacctgctgatgtggtctcacctaaaatccccagtgggtttcctattgaagatcacgaaaccagcccactggataactctgatgcttttctctctactcatttaaagctgttccctagcgcttctagcaattccttctacgagtctgagctaccacaaggtttccaggattattacaatttaggccaattcacagatgacgatcaagtgccaacacccctcgtggcaataacgatcactaggctagtggtgggtttcctgctgccctctgttatcatgatagcctgttacagcttcattgtcttccgaatgcaaaggggccgcttcgccaagtctcagagcaaaacctttcgagtggccgtggtggtggtggctgtctttcttgtctgctggactccataccacatttttggagtcctgtcattgcttactgacccagaaactcccttggggaaaactctgatgtcctgggatcatgtatgcattgctctagcatctgccaatagttgctttaatcccttcctttatgccctcttggggaaagattttaggaagaaagcaaggcagtccattcagggaattctggaggcagccttcagtgaggagctcacacgttccacccactgtccctcaaacaatgtcatttcagaaagaaatagtacaactgtgtgaaaatgtggagcagccaacaagcaggggctcttaggcaatcacatagtgaaagtttataagaggatgaagtgatatggtgagcagcggacttcaaaaactgtcaaagaatcaatccagcggttctcaaacggtacacagactattgacatcagcatcacctagaaacttgttagaaatgcaaattctcaagccgcatccca

SEQ ID NO: 760 - protein, 390 aa, Homo sapiens
MASFSAETNSTDLLSQPWNEPPVILSMVILSLTFLLGLPGNGLVLWVAGLKMQRTVNTIWFLHLTLADLLCCLSLPFSLAHLALQGQWPYGRFLCKLIPSIIVLNMFASVFLLTAISLDRCLVVFKPIWCQNHRNVGMACSICGCIWVVAFVMCIPVFVYREIFTTDNHNRCGYKFGLSSSLDYPDFYGDPLENRSLENIVQPPGEMNDSNSFYESELPQGFQDYYNLGQFTDDDQVPTPLVAITITRLVVGFLLPSVIMIACYSFIVFRMQRGRFAKSQSKTFRVAVVVVAVFLVCWTPYHIFGVLSLLTDPETPLGKTLMSWDHVCIALASANSCFNPFLYALLGKDFRKKARQSIQGILEAAFSEELTRSTHCPSNNVISERNSTTV

SEQ ID NO: 761 - DNA, 35956 bp, Homo sapiens
  source (1)..(35956)
  CDS (201)..(321)
  CDS (16549)..(16699)
  CDS (21351)..(21489)
  CDS (34637)..(34813)
  CDS (34839)..(35756)
  modified_base (1127)..(1226): a, t, c, g, unknown or other
tcagggttatggtgagattaaatgagtccatatccatcaagcactgagtacagcacgtggtcagttcagtgaaggcatttctatttttatttttgggacagtgagctttgaaattggcctttgcacatctgggtgtctggtgccttgtgatcttgggttcccagactggaaaatgtcatttgggctagtctcttgcctccatgtctggccccaaggagaggtcttgggctctgctggtggagagtgccctgggcctcactgtcttcaccatagacagtctctggcaatgttggaagtaccagcggctgactcagcagggaggtcagctgctatccaggcagaatgtcagaatcggttctgctttcttggggtataggacatgggtcctcagattccagccctgggttcctgctgagggcagctcttgtgcaaggaggtgggtgggtggggagatgggtacaaaaaacaacagtgagcacacttggtttttcctcctggaaatcaggggtcagagaaacaggaagtcaatggagagagggtgtggtgtagtgagaagagggcaggccctgtggtctggcagatgtgagttctaatcctgggtttgacacctattgatttattttttattttttgagacaaaatctcattctgtcacccaggctggagtgtagtgacatgatcacagctcatttgcagcctcgacctctggggcttaagtaatcctcccacctcctgagtaggtgggactataggcatgcattaccatgtctggctagtttttgtattttttgtagagacaggatgtattagtcagggttctcttagagggttctcttacggttcactctctacatataaaaagggggagcttattaagtattaatttacatgatcacaaggtcacacaataggccatctgcaaggagaatcagtctgagtcccaaaactggagaacttggaatccgatgttcgagggcaagaagcatccagcatggtagaaagatgtaggctgggaggctaggccggtctctccttttcaggtttttctgcctgctttatagtctctggaagctaattagattgtgcccaccggagtaaggtgatctgcctgatgaactaattgctannnnnnnnnnnnnnnnnnnnnnnnnnnnnnnnnnnnnnnnnnnnnnnnnnnnnnnnnnnnnnnnnnnnnnnnnnnnnnnnnnnnnnnnnnnnnnnnnnnngagaaattagttcatcagccagcagagagtgtcagggtgggggacattcaggtgctgtggacataaacacagggaaggggaggcttttggttggggatcttcttagagacaagcaagccacagcctcctctgctgcaaggacctgaggaaagaaaactactgagtcaatttcataggagaagtttgtagttccaacttatttgcacctccgttggggcctctctcttcctcccttttcttgtagacagaatggccaaaattgggttatcttaaaaaaaatgacaaagctgcatgttagcagagttcagagaaatagggcaggcctgggaggtcacggaggtgagtgtcccaatcttggtgcactcatgtctacactgcccacccacccgccagcatttctgacagagcctgggggtaggagtggttaccccaacatgtcctgtgccctggatgaggagcctggggtccttgcactttctgcagaactggtaaaactgtctttcaactcattttcctcccctccttgttcagggagtggaagtgagaactgggagaggatgtggtgttggtggctgcgctggtgtgggtagaagtgcattttatccaggtgtgtttagagaggcaggatggcaagacggtcaaagcttctggaattcggtggcttggcttcaaattccttgacttccttgcttgattgcctcagtttcctcatctgtaaaatgggtgtaaggatgatgttgcctcatagggttatctgggtggggcagggggagatggatctgtgggagggtatgttttatttcttttcttgcttttggtatttgcaacagccagctatttaaatatttttggtatttgccacagccagctatttacccattggggaagttggaattgggctgataacagtaggggtgcaagttgccttgcacctgccaggagtctacacagggctgcgcttagtgagtgtacagcctgagctattttgttaccagcaacccatatccccagccacgatgtggatttagtaagaagctctgtggctctgatcttcatgctctcaggtgattgagagtggacaggggtgaaatgaaagaagccacagtccaaggcaggcccccaggacaagtttccagaacgactcatgaggcttgtctgggtgtcttctggctccccgaggggtgtggtgtctggaagccctctggaaatgctggggacaactccaggctgcctgatccctgtcctcccagtgcaccttccacagccctggctctgctgccctgtctcggctgctccgtctccttctccctcctccttttcctcttgccctctttcttctgtagcaagtgctctgaaccagctgtggtcttccagaggttgagtgcagcaactttgggcaaaaccaagcacttattcccggtgggagtgttctcaaggccctgggtattgacagggttcttgctggtttcttccctctgggacctggctgtggtcagactggaggctgtgggaggaagcatgctcaggccacccaccacattgtgggtgctcagtaaacacttgcaaggaaatgaacaagtgagcccaacagcagaagggtgcaccctcagccctcagggaataggatctctttcccttagggaaaaccaaaccctcactaaaattatttcaagaccatgtgttttatttttaaactgcatacaattattttgagggcacatgctttaaaaaaatagcttgggaactttgcattcagtgccataataggcccatgcatttaaagatgaaagtggagccccttggaagtctttgggtcggctccagggagaggcgcctcgtctgtgctctggcttcccgtctgcgtggcttgcttggagaaacttggggtagagaactcatggattttcaggtctgaggggagtgctcccacatgataggatcctcttcccctcacctctccattgtatattggagggaataggggcacggggaggttaagcgacttgcccaaggtcacacagctggtaagcggcagagccagggcttgaatccaggcagccttcactacaacacttgaaaagatgcccctttggtgagccctgttcctatctgcccccctacatctgtgtctgggcagccaggccacatttcctggacagctgagatgtgcttgttctacaacaagcgtgatcacatgcagctcccagaaaaaagagaccggcaagaacccagtcgtcaccagggaccccaagtacctttccactggggacaggtaaatgcctggttttgcccagagatgtaaactctggggtctccctgctggagccctagacctctggcctgggctgggtctctgacagggaggggacctgccagggctggactgtagacccctggtctctctggagctggaagtagtcctctgtgcctcttatcagaggtccttggctgtggggccagcctattcctccaggtggcttagctgttgccagttcccttcccttggcccctgtgccactgtctgtgtggcagtctggagttggcaatgatcaaagaactcatttccagaagaggaaactgaggcgctagattggatatcagagaaagaggactggcatccagtcctgtttctccagccaagcttgtttgtgagctcaggcagggactgcaccccaagtcctacacattggaccagatggcaacttccagctcagtgtcatctgaagatttgcagccttgtggttcagagaggggcagaaacttgtgcaggttcatggaacatttggagcagagtcaggactaaaacccagccttcctgtctccactgcaccttgttcattcctcaggttccctcagggaaacatttgagggctagggtttgaatggagaaggcaagctgtcctttgggtcttagtttcccccaatgtcaaacagaagggttgacaaccccagcccaccggagcctgtgtccacatttttaccagtctgcagataagccacaaaaataaataaataaataaataaataaaataaaaaagggaaaatcacagatagcaaggtaagcatttcataaagtgaaacattttcaactgaaaaagatgagtctatgtctcacctattttcgtgggtattaatgtgttgtttcttttctgaagtggtggtgatggtaaaggatggttttagttttgcagtgtccttacttggcaaatgtagaaaggtggcaactctatgacagtctcaaaaatttgtgggaaatgtaaccagttcatgaaatcccaaggcgtgaagttgactgaactaagctggtctcttgggcttctttgagctcagtgggggattcaggtgggcactgtctggctgaagggggaatctgagagaatgaggtatggagggaaaggtatctgctgccagatccaaggctggattgcagggggagaatgcacctggcacatagtaggtgcccagctgtggcaattggatgaaatgattaccatgtgtcttagtccattttgtgttgctataaaagaatacccaaggttgagtaatttactaagaaaagaggtttattttgctcatggttctgcaggctgcacaaacagcatggaatcagcatctgcttctggtgatggcttcagggagcatccattcatggtagaaggggaaggggagccagcatcacatgaggagaggagggagagagggaaggaaggtgccaggctcttttaaacaatcagttcttgtgggaactaacagagtaagcccagggctaggggaacctgttggcatagtatcaactccagctgccaagtcagggaaggctgcctggacacagtgaaatttgaaggacaagcaggagttggccagtgggcaccccaggctgaagtaactgcagaggcacaaaagcattgcactttcacacgatacagctggagaagaaagttgtgaactgagttgggatttaaagctgtgatggtggaaactcaggcactgtgtggagcagaggtagagtttcagccggaacatatggaccccagtgtctccctaaaatcccaaaggggtggcatgactaggggacgaagccctgagcttccctccccaagccctgggaggtatgcaccaggtaaggggtgctttctcctgagctccagcaggagttccaacccgttccagggatccgggactcagaattaacatcctagccctcagactgttaccacttctccctccacatttagaaagagccaaaagtgccagcccacctcccaagcccctcatgtaacatatacctgattacccaaaagcaaagatttatcctttctcccctcccttcttctaccttcccctcaacctcttccttttaaacaatcaattcttgtgggaactaatagacaactcacccattacttggaggacagcaccaagacagtcaggagggatccacccctatgacccagacactgcccttaggccctacctccaacactggagatcagatttcaacatgagatttggaggggacagatattcaaactgtatcaccatatgtgctcaattcctagttcagtcagggcagtgagcagagagagagccttggctggaagggggctgtgtggggaggagctagggaagggcatcagggtgtcttagatctgggaatacagaggagaggaatgagtcaaagtacattctaagaacccctgcagtgggttctgatctggatccctgtctcagattgggtttccctgaagcagagcctgagacagggatttgggtgcacgttctgtgttagggtgtgctctccagcagagtcagagttagggggtggtgagtgacgcagacgcgtgaaagtgcaggatgggatcccatctttattttgatgttttgctcatcatgcaatattttgcgttaatttttattatttatttattattatttttttggagacagggtctcactctgtcacccaggctggagtacagtggtatgatcgtagctcactgcagccttgaccttctgggctcaattgatctgcccgccttagcctcctgcatagctgtaaatttgattttgaaaaaatgttgcattacattattattttttgtatgagtgaggtttttggcaaccctcctccctaagtttgcactcaaggcaagtgcctcacttgcctcctccagtccaagctgtgctctcaggagaatgggaatcagggaaggggttattgaggatatggcctcaggtgagactagcttcagtctgatcccacggggacccctggagtgagcattgtgctctgcggcagccagggagaggctgctcctgctctgctgagggcaattcttaggaggagagggcagctgtgagctgttagcatctaatattccctgcagctggcagatgggggaccctgctagtgaagaggacccagactaggcaccaaaaacatccaccacaataccatcctgttgttctttgagaagtggcagtaaaaatttcacaggtttacaagcacttttggctgctggactgtgtttctttgaatatggctgtgctggagtttctggggtccagtttctattcctcttgtagaacgaatgaatgagcaggagggtgggtggagccagtgtggatgtgggtgtgacctgaggacctggttggtcctaagctgctggctcagtttcctggagggtgggagctggggagaggaaggccaaagtggaacaggtgtctgtgattctgcccacggaaggagacatggaggaggaagaggctgaggggaagatggaagaaggagggaaggaaggagaaatctttgcttttgggtaatcaggtatatgctatatgaagggcttaggaggtggactggcacttttggctctttctaaatgtgggggagaggtattcacagtctgagggctgggatgttaattctgagtcccggatccctggagtgggttgggatttctgctggcactcaggagaaagcaccccttacctggcgcatacctcccagggcttggggagggaagctcagggcttcgtcccctagtcatgccacccctttgggattttagagacactggggtccatatgttctggctgaaactctacctctactccacacagtgcctgagtttccaccatcacagctttaaatcccaactcagttcacaaccttcttctccagctgtatcatgtgaaagtgcaatgcttttgtgcctctgcagttacttcagcctggggtgcccactggccaactcctgcttgtccttcaaatttcactgtgtccaggcagccttccctgacttggcagctggaatggatactatgccgacaggtcccccagccctgggcttactctgtcatgatttactcatcgtctgttgctcttacctggctttgggtttcttgggagtgggaactatatctttgtattctatctcccagcctgacacctggcaggtaatatgtgctcagtaaggtttattgaatgtaagaatgagaaatgtgtaatatgtcatcagatatttatacctcagtgtgaaagaaattctgagaggaggtttttgttttgttttgtttttaaaccatactcccttacaatcatgccacatttatgtgtgaggccaagtcatataatggtaagattcataattatactcaacaacaacaacaacaataataacaatggataatatactgagaacataccatgggccaggtattattattctagctgtttatattccttctcttatatcctaatactaactttataaggtatatattatttatgaggtatgtactttgtgaggcatgtattgctccattttacagattgggaaactgaggaaagaatttaagcaacaaagaggtcttacaggtagtaagtgacagagctggctctgaactcaggtggtctggcttcagaacctgtacccttaaccatcacacattgaacatggcttttgggttgaagtcctagctcctccattttctagctgtgtgatcttgggcaagttgcttgacctctctgactttcagtttactcacctgtgaggtaggggtggtcctcaatgttgttgggaggctggggcaaagtaagggatggaaaggaccctgagggttgacagggatggttctcatggctcagcgaggcagcggtttcaaagatctctgctcatggttacaaaatgagccttggaaacctgcatcagcagagacgtcatggccagggttcttggcaaagggcatggaggccaggaagagggagacaaaggctccttgtcagcaccttggggccctaggggaggcaagttgggaagatgtgagtgctacaaagagggagatgaggactcttgcctggaagtgaggcaggcaccctgttgtccaccaggatttgctctgcataaggcatgggtggaaaattcctttggatcctttcctgagtggctgggaaagctgagactaattcgtggaggggaggggtgtctccacaccttgggaatgtgatcactattttattttaaaacagaataaaaagcagcttcaacttggcagttctcagggctgcttggggccaccaaaggcacctccagaacatggctccttgtgggcttgggctctggctgctatgggatcagggaccacactggaaacctgccattggcaggtggctgctctgttttctgcagagactccctcctccagcctgactggcatcttctctgggaacccacagagaacagatctgccctctggggtgacgaggaggcctcaggcagaaatctccctcacactgtggatactgtcatatatccacagaattctctcctgatagctgatccccacagtgaccctgcaaacaattgtcatttccctttgataaacgtggaaactgaggacagggagttggaacagccagtacagctagaataagaaccaaggttctctgacttcccatgagacagactttgtactaaagacatggcccaggttctatggggactgaaggtctaagtggctctgaaggatattcttgatggatcaaaacacagcacagtcagtgcaaagggagtgcttaaagcccatttgctcattataaaagaccagggcttgagaactccagactctattaagaatatgtggaaaatgatacacatatgtagttaattgtaacattgtaacacacacaatgatttattataacattgtaacagcaagaaaccggaagcaactcaagtgcccatccctgggactagttaattaaatgctggcaaatctaccaatggaatactatgcagctatcaaaaaggataagatgctttgtacatatgaatatactaataagaaatcatcaccaagagatattgttaggcaagaaaggccagttgcaaaataatgtgtttagtatacttccgtttatgcaaaatgagagaaatgaaatgaaaagagaatgtatttctccaaagaaactctggaaggagacatgaggaactaacatagggaggtgggtacagtggaaactggatggatggtggcaggtaggagcaagatttttcattctaatctttctatagttttagatggtttgaacatcaccagttagaaggagttgtgatgcctggtcagcaatttaaattcaaaaagcctattagaattgtggatggatggctgttaggctaacagtgttattatgtgaatagtatgtgtgttgtaaattctaaggcccgtggttttcattcctattttctccttgattgtgacataagcacatttggagttttcaaactagctggatttattgcccagctgactacggctttccttgatgtcagaatgaggccacctttggcccactttgaaccagctgagagagtcctgtggggtttacacagagcccacccctccctccagtgtccacatcatcctcatgaccgtgatgcactcctggtggcctcctgaggccatgggtagtcaatacctatgtctcatagtggacctgccatttcattccaagctcttggtgaaatgtttgtagggaaaacaatgcgttcttgtgggctctccttgacactaataaccatggatgaagagaacctctagagcacataatgactgaaacccatgctcaatgaagagaactgcttgggatggctttcagctcatcttgtgtctgccaggaccttcccaaacactgcctccagcccaccaccaaacaggctgtgtgttaaatcacaccttttcctgttaaaatcaaccaatgacattgaggctgggtacagtggctcatgcctgtattcccagccctttggaaggctgaggtgggtggatcacttgagtccaggagttggagaccagcttggccaacatggcgaaaccccatctctacaaaatacaaaaaaaattagtggggtgtggtggtgtatgcctgtagtagtcctagctactcaggaggctgaagtgggaggatcacttgagcccagggaggttgaggctgcagtgagctgtgattgagctcccactggcggttccaaccggtgcctgtggctttccatcccaaagcaaaagccccacccatttctgctatggggttgacaccttgcccgtagctccctgatctttggggattttggaaatccccagcactgcctttcctgtgcttttaaatgtatgcaaatgcaatagcaaatggccctcaccccaggaggacagctattcatggggcccctccctgcccacaccgggtggctccatggggtcttgttaaaccttctcagaggttggcagaagactccttttagccttgtccctttcttcttgcctctgggtctctcttcctggggactttcttcaccctgccttcgtctttcttctgccactttgctgctttgccctgaccgctctgtcctcctttttccagtccctgtgcgtctctcctcttcctgctggctttcctctccctgcccctcttccccctctctttctgtctacgttgaggaggtgtcatcctctgttctctctgctctttcttggctgtgctgcttcttcctccctcctaagatcacctatcccgccgagcccctgccctgctggggcctgaagtgaagagggctcttccctcaaattccctagagctgaggggcagggccagcatctcaggctggcgaccagtgcagccacacagggctcagaaggcctgtgctttgtttaacacttggcagttgctgtcctgaattctcagtaatttttgaataaggggctgcattttcattttgcagtgactccatgaagtatgcactgtttctgctgaggattatgaacttcctggggggaacacatcccctcctcttagagctgtaagagctgggctgaggcgcagggtccaagtgctggtcctgcgtctgctcctcactcacccaacagtaagcagcaagattcatcttcattttaccaatgagataaatcaaggctcagagaggccatgtcacttgcccagggacccacagctcatgagcccggattgaaggaagctgactctgaaatttggacattctgtggtcctttcctggctgaaaccataggggctttggtaagccacccttttatcagtgaactaaggctcagtctttgcatctggaaaatagaggtagtgaaagtagccatctgtgcagaaccagctggtgtttaaatcctggaaagttcctggcacatggctacctcctgaaacagcagccacagcctttctgagcctccattttctcatctgtcaaatggggatcatggtggtacctgcctcacaggacccttatgggaatttaatgacacaggacgtgtgcttagcttagggcctggcacaagtaggtgggcaaggctagtacacaggagcttctaggccagaggagggagtaatctatgagtagggaaactgtaggatttattgtcctgactggggcactttgagaatgaaaggaacatgacaagaagcataaacagggattgttgtgggcaagccaggatggagggtcactctacctgtgtatcaagtatgtctttgtcatgattgtctgtttcataaaatatgttcacagataggtgagtataaggatgccccaggcccacccccagctggtgtggagaaagactgtgtttgggctgggtgcagtggctcacacctgtaatcccagcactttgggaggccgaggcaggtggatcacctgagaccagcctgaccaacatggagaaaccccatcactgctaaaaatacaaaatcagccaggtgtggtggcgcatgcctgtaatctcagctacttgggaggctgaagcaggagaatcgattgaacctgggaggtggatattgcggtgagctgagattgcgccattgcactccagcctgggcaacaagagcaaaactccgtctcaaaaaaaaaaaaaaaaaaaacaaggctgtgttcgagcctgggccatagagaatgatgtccctcgggctgggcatgatggaacatgatggtaagcccagcactttgggaagcaaagtgggaggatagcttgaggccagaaattcaagaccagcttgggcaatatagcaagacctcatctccaaaaattaaaataataaaattttaaaaagggagggggaaaaaagaaagagtagtgtcccacttatcactgctactgctaccaaagcttcagttctgaaaaaacatcagggagaatgacttaaaggccacggttcaggccccttctcagatattctagaaaattctttggattacaccagcagtgcatacacctggatgtgtagactgaaactcacagtcatatctaggaaaagcagcttttactgaattgcagtttggggcagtgctgtccatcagtgagtgtttggagcctcccttaaaacattcaggaactggagaccccgttccgtgatcagatcccccatgtcttctctccacaggcttctggagacagtccttctgctcctagcatcaggaagccttactattcccctgagtgggtttggtttttagcaaggagcatgtgactcatgtaactgggtccccctttcaggaagctggggttccagtgtatggtccagccactgtcagtgtctaggaacttctgtgtcccctgcatttcacccttagccgtgactccattttctgtctctacacatgtttcccttccttcttttactttaatttatgttccctgtataagtgagcctcttttgaacctcccaccatccacagctgcatcacgccaataattaagtgaacaaaaataaaaaatcgacaaacctgcaagcaaaaccatattgtggcacccctccccaacccaggagagcagctcagttggcctggtgggggtcggctggcaaagggttaagaatgatgcagaggaagtgctggcggagattaaagggaggaagtggctgctgcctggggagggaggtggctggcttgtcctgtgtgactccaggggcctaaaccaacactgacacgaatgtggcagtttgctcaaggtcagtgtagtgaaaaaaaggaagagctttccaatgacttgacaagtctttctagaagttctactggtgggggtttcaaactcactgatagctgactccagacatagctctctttaaacataacagccaaagggcatgtttgtttgagccagtctcttcatgttcatagagtgaccagcgggccctgattggctgggacattccagtttgagcactttacattctgcatcccaggacaccccttggtttctggcaaaccaggacaactggtcaccctatgcaccctacgtatatgatctcatgaaatctttacattgaccccctttacagacgaggagtctgtgatttagtaatccaagattacatagcatgggaagggccaagctgggattcacatgtggatttgctgtaactgagtgaggcttaagctgtcagctgcactgagccacttcccttttcctgtaagatgagggtgtgagaccccttgatcctaaagcctctctagcaatgacttttaggattctagaatttcctctggtcttcgagcagctttttgttttccatggaaggtggggtggggtagggtggggggcaatttttccagcaagacccctcctaggtcaaggcttgggctttgccttgggagaggtgacagcctggtgacagggtcaaaaggaagggcagcctgcccctccttccctgtgcctgggaacagggtgggatctcatactccaccgtcctgattgctggcagtggtgccagtccatttgtcagctgcttgggctggagccagggaattccaaggggccagagcctgcctgagcactccaaggcctctgtgctcgtggctggcagcctaggcaggaggaccctggggcagctcagggctctgggatttttcaaagctccatgtggctggacaggcctctacagactccctgccctgggagtctggccagcctgtggagactgtgcagaggggggtgatttggagtctctaagtaccccaagtcagtgaggtagcattgtgaatgtgcaaggtgcggaagttgcacaggtggggacaactgatatgagatcacagggccccgtgtgcagcaggcaagccacagaacataaaggacagtgaccgtcactgaagacctggactccagagtcaggcagtgcagattcagatctctcctctgccccttcctactgtgagatcttgggccagtgcccttgcttctctatggcttgatttccacatctgaaaaatgggaatgaaaatatctacctcgaaggtttgttgtgagtggaggcactgagtatgccgtctgtgcctaataagcagggggtggattccatgagccccagactctcagttttggttcctctcaccccatagctgcaccccaggaccctgtgacaggcagtgggtgagggctcttccccatggagaagccgtgctggtaggctgtaagggaagtcctagggagaggaaggaatgctgcctggacacgtttcacagtcttgtgatgaaaggggcctgtcagcccatccacgatgcttggaaatgctgtgataagggcatagatgctttgagttctcacagatctgagttcaagtcctggttccactgggcactggctggcgatcctgatctggttccttttacagcctcagtttcaacatctgtgaaatggaggtaatgtcctcaggccagggggaagatggattgtcaggacacaaggagatgagggggtgtcaagctcacagctaggtgcctggcacgtaacaggatgggtctctttcctcttgtcaccttgctgtttgctctgcctggatttgtgcacatgaggctgggagaagcaaggggatgcttgtggaaagcacaccccaggcagagggacctgcaagagcagaggcccaggtgcttgaaccatgctcggggtactgggctccttaagcacagggagcaggttggtttggaaggacttggcctctgagtccccccagcagtccttccgtgcccccagcctgtgggcttcccatgagtcctgcagccctgtcctgggtcaggggtcgctgacttcacttgggttgtccaaggggaagggaggctaatgcccatgctcagtggcccacccttcctcctgttgcctcttgcctccaccagctctccccctctatgctgccttttccccttagcgtcctttccctggcactttttttctttttaggaggcaaagtcttgctctgtcacccaggctggagcgcagtggtgcaatcatagctcactgcagcctcgacttcctgggctcaagcgagcctcccaccttagcctcctgagtagctgggactaaaaggtgtgtgtcaccacacttggctaaatttttaaattaaaattttttcccctagaggcagggtctctctatgatgcccaagctggtgttgtactcctggctataagtgaccctcccgcctcagcctcccaaagtgctgggattacaggcatgagccactgtgcccagtctccctagcacttttaagtgttaatatctcacacgcacacatacacacattcatgtcaaccactaactggatctgacatagtaggaatggttttggcatctgagccccagtcctgacgccattttgctgtataactgtggccaaaaacctcctttgtgtgtgggcctctgcttctccatcgtcatcacgacattgacttcagttcactggggaaaagttgaaagcaggaccctgatggtggaattgaaggcatagcagcagtgtgtatctggcatcaatttgcagtgggggatgcctttccagaaccccagcaccagaccccagagactgctgactgctccttcatctgcaccctgctcatctcctgggcggggggtgggggggcggtcttcgaacttacctgcctcacacacgtgtcctgggatgtgcctccctggtgagctgcaggttctggctgcccctcagcactgcctccctcctgtctctgcctacccgccttgctgaaaggccctgggtccatgaggcccggggatgggggactcggtgttaccatggcaaccatagcttatctgtggcatcatggactccgggggaagatggctcccagcccccaggactggacagtatgggcccttctctgtgacctggcttttcccgtgaagacccatctgagtatctctggtcctcactcctccgctcactcaagacctttcttggagcattggtggttgccatggaaatggctctggaagcaaaccagtccctgtgggctgaggaaaaatccttaagaaaaataaagagattgcttggcttcctggctctctgatgggacatcctgatgcctggagcctccaaaaactgcactttctgggtaggcctggaactggcagaaggatcctcagttcaccaggcctcttgctattctcctgcctccagcctttcctcttccaacgcagtgcccacatcagccacccaggttagaagctggaatctttttagaaggatgataccctctgcttaaaaccatccatggctccctattgcccataggataaagttgatggcttgcagggatctcacaatctgaaaccctcttctttccttagccacatctcctgccttctcccctcccctaacacacacacacacacacacacacacacacacacagcccctaaccacactttttcaagcctctgttcctctgcaggtatgtcatttccctcggctgctccacctggcaaaggcttcataccctccaaggctcagctcaaatgccacctcctccaggaagcatcccctgatttccccagccctttctctttactttgtgcagagccagggccacacactcagtgaccaacagggccaggcaggagacccaaatgacccatttatgaacatttttcatgtccacaaagacatacgtgctctcctatgaaagctgaaaatgagaatgacttggttcctctttctctcactggattgcacttatttctgccacagcagagaccctggacaaactcaatggcaaattgcaactggcttattaccccagggaacaatagggaggggtggggactgtggataacccctgttctgtaatgcaagcccagcatggccagtttgctggaagcctggaatttaggtgacatctcagaatactgactgtgccacgatctgttcctgcaaccactttctctgcatgaaggtagtgactgggccatcttactcccacagcatttggcaaggagtgtgacccttagacgttgcccactactggctttttttttttttggagatggaggtctcaccctgtcacccaggttggagtgtagtggtgcaatcatagctcactgcagccctaagctgctgggctcaagcgatcctcctgcctttgcatctgctgttcccactgcctaccatgctcttccacagcaccagcccatgtctccctctctgtgtattcaggtctccattcaaaggtggaacagggcataaatgctgggggaggggaattctatgttagggagagcgttccaagaagcttctctgagaagatgaccctctttgtattttattcacagcacaaatcactgcctgctattatattcattgtattttttcagcatttacatagagcttccgatgaaccaggcatgcttctaaaacattaccaacataaacccattaccaacattcaatccttgcaacaactctgtgagggaggagcaatgatcactcctattttccagatgagggaactgaggcacagagaagtgtgatgacttgcccatggtcacacagcagagctgggattcaaaccgaggcagtctggctccagatgtgtttgtcttccttattatgtatttgtttacttgactgtttagcatctgtcacccccgactacccctcgactccaagggcagggatgtgtctggtttgttccctgctgcaaccccagtactcagatccaggcctggctcataataggtatttaatgactatttcttggaaggatggaggaagggaaacaggaggattagaggactggaaggaagaatctttggccttcagagctgagcccaatatcaagattgtcttgtcggaagcttctcagcctcctgagggatttgagtcagcctgtctggaggggcccctgccttgcccgtcctcaccctctaatagaacctctattttctgacctctcccaagaagaggtgccaaacctcattcccagctccctggacccatgctgagcacacttcctacagtgatgggagccctggaggggaacagtcaaggcgagggcaggaagtctccagaaggaggtggcctgcagggaacaggctgttgagcggccagcgagaggtccgggcggggctaccctggaccagatgtgctcaggggatgagcagaagagagagctgggaaggggcttgtgtcctgagaaattctcctgggaccctaaaacagtggacttcactgagggagcagtagaaacacatttcagtttcaccctgtgaaagaaatcccctttccctattaatgcagtggctgtggtggtgacaagcacctcaccagccttgtttcattgaatcctcacaactccttgagacagatgctacagatgaggctcctgaggctcagagaggtaagtaacctctatgaggtcacacagccaggaagtgctagagctagaagtgaaacctacttccagatgatatgtgacaggattccatggaaaaccaagggaggagaagctggaagcccagcctggagctcctgattctacccacgtgctcactcggtcacttcactgaatctgaatctcagttttctcatctgtgaaatgagaataatgggcaactggcattgtttgtgacctgatgaagggctggctgtttttctaggtgtgccacagaggttattctccttcaccatcatggtatgttgggtggtccacatgccccagaagtggaaaaagagacttggaggtgtggagagcagatccaggtcacccagccaggaccacctccttgttaggtgttaatgccctgtcccgactgaggccagacaatagcttggtttcagctgagggacttgaataaagtgaaacacgctttgcagagcctcttgcagaggatgtagggatgctggggaggtgggaggctgagctgaagctgggaatggcagaagccatggcttccttatccagctcaccagagcaacagaaaggaaggagcgaggcatgggactcaaacacaagggctccagagcggatgagtctgggttctccacctccttgcccttctccccacccgctggcagattgggaccctgtggctgggtaagtttcttgagttgccacttttcaggtatctcagggtgccagagaagagaagcaagggcagagggtgagctgtgctgacctggttgtaagagaagagtgacttctcagggggcgcttctggaggcatgtggggcctccgctgcctcccagagtcgagattccaagcccacacccagaacagcacaccaagtgcgtgccacaggctggctcccagcatgggcagaagtcactcaccccagctgccttcttgaccacatcctgagcaagctgtaagcatccccagcaccagccaccctttggctacaatgtgttcatagcttggggattatttgcaagagtggacccaaggctgacgtcaggggattaactaaatatggtgctggacctcccagtccagtgggatatgcgcaggggagaaaatttgtttacaggccagctccaggggctggggcggtgtttatggggagaggcacaagctggatggctgggaagatacttagggcttgtgtacgggacccattattgggggctacaggggcttcctggcctggaaggacagatgtccatcaaatgctcttgctggggaccttctgtgactaggaatggctgctggggagatggttacaagggcagctaggtgtccaataaagtaatgaggctgagtttgcaagggcgtgttctcatggaacttggttccgtctgggtctgggctcgagcctcagctcagtcctcaggtaggcagggtctagattgctcaggccatagtaaggcattggtcttgattctaagaacaaggaggtgctaagaggttttcagcaaggagtgacatgatgtggtttgcttcttgaaaagatttgtctactaggaataaaatggtctgtgtactaggtagataggtttctaacagttaggagcccctggtagccacataggtaagcagaggtgatgctcacagctgtgagttgttgggaggacaaaatgggaagaacttgttgatagatgtgtgggtagggagggaggggaaagtgtggagagtctggtttctgagtcagagtgttggcaggagatggacaacccactcaaatgaggtgattaacgagaacttagtcaggggaggactgacaaaagggtagacagtacaagggatccctaccacgctccgggtccagtgaaggcgagaactcactgttcctagactgaggggctagagcaggaagtagttaaggcacccaaggagtgtggctgtggccaacccgcacacctctgacaaggagggagctggagggtttgtacccaaccgcacgctccacgcctgcagttgtggatcaaaccagaggtcagagggcaaacagcctattgagattttcaagcaggtcagcctgtagggcacagaacagacagggatctggagacagagatccccggagaggaaggaaacgcttttaaggctcaaggagtagtgttctaatgggaggatgccaggcagtggcgtgaatattttgggtgggggggtctccctgagtcggtgagctcatcagctgcttttcctggcctctaagcaggtgggctgtctgggttcaggggcataagctccttgtttttgcccattcttatggagtcctaagctccgtcgtggccccttccaaacccgaaagaaaatgggacagtctgttaggcagcccgtgccgctctgctctgctgcagtgactcagtgcgagctcccacatgtgggcgtgggaccagggaggaaattctctcctgacacggagctaattctgtcctggggctggcagccaggcctgtggctggaacatctgcagacactgtgtggtttccaggttcccgagtctgtcagagcctggggatacagggatctggaggtgtctctggagccatccttgggagatgagaggccccttctctctgccctggagggtaggagatctggtgaatggactggcccagaaggcagcaggcaaagacatcagcacctacagtcgtccaggccagggggaggctggtatgctgctcaggagagacatttttgagggcaagagtggtgactggcccgcctcattacatttcagctgctggttgaggctgtgatcttgtgctttggggtcaaaaagtccttggttcaaatcccgagctgatgcttaaaggctgtgtgaatctggactagtcacttcacctctctgagtccctatttgcaaatctatggaacggtctatgtggatcacactgaggcagaagttatggaagtcccaggcacagttctaggctctggggatacaccataaacaagagagaccaagtccctcttttctatgatttagagagggtcatgcactctctgggccttagtttcccctgctacaagagatggtcctccgaggggcctcccagctccttttggaggctgacagaattggaggagaggtgtctgagccatctggctggactgtcagggtgggtcatgtggggagaagatggggacaggagccaggccaaacatggtcatttgcagagcgaggaatgtttccagtttccctgatgggctcttacgcccacaggccctgataaagcccctgcatttggcctgtggcctgctttcaggaagaggttagtggtagcctgcgatgaaagagacagcagattgacagagtggctgctggaagcttgggctggctaggcgcacaggtgaggaatgttgcaggtgaggggcagccgagcctgtcagagggggagggctgacccgtgaccggtgtgcaggaggtggagaaaacatgggaagagagaggaggaggtggagactgagaagacagggagactgcagagagatggaagagacggagagggccaggaacaaagagaggcaaacacagagactgggggagagagagaggcagaaagaacaagtcagatatgagacagaggagagtaagaacaggacagaggtggaagcagggaaagagacaaaggacagagagaccagggcagaaaaggagccagtgctttgcgatgtaaagaacccattgggcaaaggggtttaatcaaggaagcagaaggtaaatatctgctgcccagatggtccccggccctgctgtacactgagcccataggacacacaccggcaggggaacagccagaggaggtgaggccctggatccatatgaacttgggttttgaatcccagtcctggtaatggcaaggagaactcactgtctctaggctgaggggcaagagggagcagtggttcttggtgcctggagagtatagctgtggccaagtcgacccatggagaccctacagggaaggagctggagggtaaacacccaaccttgctgtcctccagccctgcaatccctgcttaacactgtcatcgatcaaccaaccaggcaggtgtgaggcaagctacttgctcccctgcctcagcttcagacatccccgttggtaaagtgggactgataccagtgaccttgcagggttagggggaggctgcagagagaaaaggtgtgctctcacccacggtgtgctgcatcccagcagccacaccagctctggggcgcagaaggctccacatgtccttggaggatggatgaataaatgaatgatccccgcctccaaaggcttctcctgtaaccgagattggaggcatttcacattcaggctattaaccagaggcagagggacctgggggagaaaattgcaggggacccggagccctgccttgctccgtctgtaaaatgcacaccctgaatcttgccagattgattttctgggggcccttgggaggttccactggggcaaaagccagagttttgtggaatgttccaaggaggcgaagcagtggacagagagtgagcttgtcaattcagcagggtttgggcttgaagcctgtctctgagcattccttcagaatggctaattggacctaccttacttacctgagctctctgtgtgaccttgggcacgttagttaccttctctgtgcctgttttctccattagtagcagtgcttacaacagtggctggactgtagtgaggactgtacgtgtacttgtttaataaaacttaagccaataatgtccattggaggcttttgttctgcatggcaggagaagccagatgtgaccttgaggccctgtccctttcccagcaagggtccggcagcgggggtgtgggcaggacacaactgtctgcctggtgaccatcccacccccagcaggggctgggctcgacgaggaaggactagggcccaggactctttgcacagcctctcctggctgggctgacgttgttacttcctttggccggtccaagttcattcccgcctaacggggaaaacgggtggagctctgagggctgcatgtttggccccctgcctggccactgtggctcggtcagggattcagtaaccaagactctgagctgggcaccacccaagcatgagccccaggcagggatcggagtgtttgtttgtttgttttggggtttcctggacctcaggagaggagggagggttgacataattatacccctccatccctccacttctccatcaggggcccccagaagtccctgcgcttgtattttctttcttcactgtgctcatttcccagtagccctatttcccagtcccgtgacccctcccaccctctctcccatggagccattctaatgtgttcaatgtgcgtctggctatttggctggattcttgcaaaacgtgtgttgccgctttgcagacatgttctcaatgtaccacagcactattagggtcctgatagccagcacctgtgtggctctttgttgaactgacctgaggctgggagtggctgggaatgcacactccaggacagggcggaggcatgcaaatactcctggaatgtgacctgcactgttcccagggtccttgatgggtgtgagccaaggccaccctctgtaggacgctgtgggatgctgcacccctgcctggcctcctcccacttcctcactccctcaccagtttttcctgaaatgcttccttaataaatcacttttgccagaatcgtcagttgaggatttgcttctggggaaagaagacatatccaaaaacgatgcacatggacacctccctgtgtgtttccttgcagggaggtggggcactgcctggatattcactcaggagccatcacagagggttcgcagatacctgcagcatggcatgaggtgcctgtgctcccacccggccaacctgggaagcgtccagctttctagttcttgccacagtctagaaggtgtagaatgtcatctggttgtggttttcatgtgcatttctttgatcttcaatttgtcatatgcctgggtttgggggtttccctcctgtcaattgcctgttcctatcatttgcccattgtcctgtcagggtcgctgttttttggatttgcaggaaggggctccttgagtacgctagatagcaatcctttttgggtttggagattgtaaatatcttcctccgttggaggcaggaagtgtgtgtgtgtgcattctgatgtgtgtgtctgtgtgagcacacatgcctgtgtgtgtatgtgtgtgtagcccattataatggtgggatctgggctcccacatgagctaagcttcagggcagagaggtggaggctggattcccaaacacaagatgagcaattgagtggagccacaaatagcaacactaataacaataacacaacaacgacatgggcattaagctctgtatgtttccaaagcctcagtctcctcgtctgtaaaatgggggaaggatacaccccctttgcaaggttgttttggaaaaagtctgtgacgacatttctaatgggcttggctcctgccacatagtaggtgcttaataaattatgatgtcagcaatagtaaagcatgtgcttattatgtgcctactatgtgccaggcactgagctgggggctggtggaggatgaacacatgttacatagtagggcttttttgtgtgggtggcctgggtggcattttcaggtaagacatggtctgcagcagagggagaggcctggggaactagacagagtgagaatcagaaccaggtactgatagaaaacttgggtggacgcggccgagcacggtggctcatacctgttatctcagcactttgggagcccaaagtgggtggatctataaggtcaggagattgagaccatcctggctaacatggtgaaactccatctctactaaaaatacaaaaagttagctgggcgtggtgggatgtgcctgtagtcccagctactcgggaggctgaggcaggagaatcacttgaacccgagaggcagaggctgcagtaagctgagatcgcaccactgcactccagcctggcaacagagtgagacttcgtctcaaaaaaaaaaaaaaaaaaaaaaagacttgggtggatgctgattgtggtcagaaccaccactgacaacaacaatagcaacattgactttctgctctacagtgatggaacgtgctttgtagggcttttttcaccccctgagcctctgtgtccctccctgtctgaaaatgcgtataattgtgtcccgaccctgtagggtgatcatgaggattgggcgagatgggataaactccttggctcattgtccagcacaaaggaagtactttattaatgattaatggtgaactttcttatgctaggcagtgctgcaaatgcttcaccaatgccacttattcaattctcacaacagccctaggaggtgggtccttggattatccccattgcaccaatattgaaatggaggctgtagagagggctaagtaatgtgcccagggtcgcacagctcacaggtcatggagcaatagtccagccctgatggatgggaagcaatatcctgggcccttaatccctttgttgtgttgttctatgttctatggcatcaacaatgtcactgttattatttctaatatccagacagatccagtgagacagaaaaacaagcattcattcattcattcattcattcattcatcaaacaatattctgggtaatgcactagagttacgtaagatattactattggggaaattaggtgataggtacatggaacttctctgtactacttttgcaattgcttgtgagtctgtaattatttcaaaatagagttataaaaggagtaaggcagaagtgaccccaatgtgatttctaagcactaacccccaaggttagcttgtaaaaggccgtgttccctggcgcacctgctcctggagcccagggctgccaggcaacaagcccactctcctgaagctgccatgctgtgagtaagctcaagccacatggcgccctggtccatagtgtaagagaaacaaaacgaaaccgaacaaagcccaatatccagaggacctgtctggtgcctggattctgctccagtctgaggaaatggagctgaataagacccaattcttgtcctcagataacttgttatctaatcagatgcatatgccagcaataatcacataaatgccatgtgccccacatgggtgagcaggacgctgtaggagccagaatggggagtgtatttgttttccagcgctgccataacaaactgtcacaaactgagtggcttaaaacaacaggaatttattctctcatggttctggaggccagaactctgaaatcaagggtcgtgctccctctgaaggctccaggggaggatacttccttgcctctgccagcttctggtggctccagatgttctttggcttggggcagcatccctcctatctctgcctccatccccacatggccttctgttctgtgtccatgtgaaatcttccccctgcttttcctcttatacggtgactgcaatctggggcctactctaatcccggatgatctcatcatgagatccttaccttaatctcagctgcaaagacccttttcccaaacaaagtaacactgacaggttctagtggatgcaccatttgggggcagggggtggaatgcagagggcatccttccacttactacaggaaggagaggggatgcttcctagaaaggatgcctgaacctggttgctagggatgaggttgacttagggaaggaatttaaaagggagtagaaactcctacactgaaaaaaaagtgattttgatttttagagactgccacctagcaaatgtgttggtcaagagaagtttcagttgttccagttcatgcctctcccacaaagcacagctctcagacctctggggccttgaccttctgggtctttctctgacattcttgccaagactgatgagctgggaggagcacctggtgcaggcatatgcagggcatcccagagcccaaagtgttctccagaccgtctgctgcccagtcctgactccaaacacaaattcctgtcactttagctattctagtcctgcacagcatgcggggtgggtattgttatcatcctcattttgcagattgcacatctgaggccctgacaggagaagcagcttgttcaggtgacacagcaggtctcctgccgcccacacgtggaccttgtgctgccatctcctccctggcattcccttctggagccctcctgggaccgtcccagggaatggaccagtatgactggcttagggagttctgactcagggggataagagcggagtggcttttgccctggggccaaatccagtgtgagttcagggtctcaggcagaatcttggtgctgggcctggagaatgggcttcccctgggttctctgggcagctgagggtggaaagggaggcagacaggtgtcaggccggcctgcctctatgggctgtgatgaatgatgtggtctctggtgagtaacccccgtgtgtgtgtccagacctcagctagattgtcctgaaaactgggagggtaaattccctgaggggctaggaaaagtggagcaacaaggagggtgtccctgtagggtggagctggacggcctggtgtatcaggaaaggtgtgaacagacatcggtaaatgtgttctcctttccagtaagcagtgtggtgaagagcaagactcatagtcagagcaaacccagatgtggatctgtcactggctgaactctgtgacattagcatcacttcctccctttacaatgggagtgatagcagtaccactcctggaggttgttggagatgcatgagctgatgcaatgaaagtgcttgatacagtgtttggactcttatgtgcacccaatcaattattagttattacaaggaagtaaaaccaatataaagtataattcgatgtagacataaggaccaagcaaaaccagtgcagaaacctgcagactagaggtttttgtgcctttgaccaacaaacatgactctgagcttccttgtggtcacatcaaaaagggaaatgtgatcagttgtagaacatggatgatcaagaacgagaaagcaacccagttcctcaagagaagcaacattgttccttaccctgaatcctccagagtatttctcactgagcacagagcttcataaagggtatcccaagggagtcagggagcaacatcattgactaggaattacatagcattgcaggtgtgattttcatgtggtaactgactgcagaggccttgaggaggagatgaagggaaatctatgaaggtggctcagagaaggcagctctgtggcaggaccaggaatgtgacaaaggtttgggctatcaggattgaaggttgaggcttacggaggtcagagtggttgggatgagagctgataatccctcagggaaacaggaggaacccaacagccttttcacttgggatccttggaagtcagattctggagtcagagctccctgctgtgtggcctcaggcaagtgtatccacctctctgaacctcagttttctcatctgcaaataggagttatttttacagggctattatggagtcttgcaaagcacatacagtgagagatcaagcaaacgttaactatatgtatgtacatattatgtacactggacccttgaacaagtcaggggttaggggagccaactcactgtacagtcaaaaatccacatataacttttgactcccccaaaatttaactactgacagcctcctgttgaccagaagtcttgttaataacatatgcagccaattgacacgtatttttttatgttatatgtattatattctgtactcatacaatcaagtaagctagagaaaaagaaaatgttattaagaaaatcataaggaagagagaatatatttactatttattaagtggaagtgggtcaccacaaaggtcttcatcctcattgttttcatgttgagtaggctgaggaacaggaagaggaggggttggttttgctgtctcaggggtggcagaggcagaagaaaattcacaaataagtggacccacgcagttaaaacctgtattgttcaagggtcagcggtatatatagtgacgcatatttttttcataagcttcctggttgtggaggatttaaggaatttgggtaactagaattttacagctctttataattcacaattggcaaaggcttcattgtcatttcacatgattctcccaacaacacgaggaaggtgttcttacccccacttgagaggagaggacattggagcttagagaagcaaaatccttacctgtgtccctctttttttttttttgaagacagtctcaccctgtggtccaggctggagtgcaatggcctgatcttggctcactgcaacctccgctcctgggttcaagcaattcccctgcctcagcctcctgagtagctgggattacaggcacgtgttgccatgcctggctaatttttgtatttttagtagagaccgggtttcaccatgttgcccaggctggtctcaaactcctggcctcaagtaatcctcccacctcagccacctgaagtgctgggattacaggcatgagccaccgtgcctggcctctgtgtccctttctgacctgcccttgatcccacagctggagagacaagtggccaggaactcactggtcctctggcttcctagcctcatcccaccttcccaggcaaagaccattttagaagggagttaagagtggaagcctgagaaataataacaatgccaataacaacaatatagtgcttaccccataaggggacctgttccaagcacttaatcctcacaaccatcttcttatgaggcaggagctattattatcaagcccattttacagataagacaactgagttgcaaagaaggtaactgacttgcccaaggtcacaggggagttcctgcagatccaggatgtggatgcaggcagtctggctgggcccaagagtctgctcttccgcttggtttggtagcagaaatgtgctcaggacaggagggatgtgtgttaggacagagcagaggctcaaagcaaacctgtgacttgtgcctcccttacgcttccagagagagaggcgtcttggggtgggggcgatgcaccaacaggggacacgaatccactcaattcctggaaggatgaggagttaggggtggaaggagggacatgcccagaggatgtcagcatcattctgtgccagcccagcctggccccagctctaagatgaaaaaacatggcctctgaccccaagctgctcccagcccagccagagagcccgacatgatgtcatctgcttcaggctgcatctctgcagatgctgtgcgaagcactcagtcctgagtcccagatcctcctcgacctcctctcgggactcacacacccagcccactgtcaatgagggaggggaaggtcagagatggggagatgcccggcgtgcccttcctcctttctctgccttccaccttcttaactcatacttgtccttaaaactcaactcagatgccattggccccaggaagcttcagactcccaggctgggtaacagcccctcctctgggcttcttggggcattctagtcttgccccagcctcaacactgtctctttgtctcatacctgtgagctccttttgggaagggaccctagtaaggccatgtcctcatccctggtgcctgcaccgtttggcacagggaatgtcaacttggtcatttcttccaaaaggaaggttggtgatggtcatcaatctgagcagatcatggtctcaggggcagtgtggagtgacagttaagagctcaggctttgcagatgtggttcaaatcccagctcttccagcccctgcctgcatgcttgggcatgggtcctgatctctctgagccctgctgtagccccttatggggttaaagtgagaccatctggactgagggcttaacatggtccctggcatacacaagagctcaatgtgcattccccactactgtcatgcacacctgtcaggttacctccagtcatgggaggccagctccagtgtccccatcttctctctgcattccagtgccatagaaaacccttggagaccccttggtgggcacttctgaaatattgtcccagcatagagtgggataacacccaagctttgattgtgagccctctgagtgcaaagccctcaatggaattttccaagtggcttttatttaataaaagcaaaagatgacttttatgtaataaaatataaccttaagctgggaaggatcagtaatgaatttatgtgcaggaaggttggagttatttataataaagcattgattagcagccttgtgaagctgaaatatctggtttggagcccatttgacaagatggggagatcatgagccgcagaaaaaagtgcatgggctctggggtatcagagccttggttttaaatcctgcttatcagctgtgcacctctaggcaataatgcaatcactagtatttattgagggcttactatgtgccaataccaagctaaatgctccacatttctgatgcttctagttcttatatacactctgtgaggtgagaaatcccatttattggtaagaaaactgagattcagggaagagaaatcacttgcccaaagccacacagctcataagtgtccggggttaggtatgaaccctgcatgtgatcactgcctccaagatcttgcaaacttgcaaactcctcagaatatgtttgttcttccatagactggaaaaatactcagcaagattgttatggggcttgtttaaagtgccacttaagttgtctgcacagcggaggctcagtggatatatttgtgtctgtcttcacaccagactgctgtggcttcagagcctgcatctcattcatggttcccatagggcccagagaatatccagcaagaatgatgcttctttctctgagcctcagtctctctatttcttaacacaaaaggaataacacctgcctggaaaagtcccaaggaagactaaataacaagaaagaataaaagttcttggcacatagcaggtactctgtgtgggtcttctcctgttttctctgtgctcacacttcctaaaacagtattttgtgggtcctgccctggtagtggagttgagtcccgacctggtagtggattgagccatccatgtacctcctctgtgtcttcctttactcatgcccgactccagctgtcagctagggatgtgctgggagaggggagtggttagaatgaagagtccagcacttgacctgggaagagtcagttgacctaggttcaaggggctccatcccttcctggctgcataaccttggctgaataacagcctttctgaacttctgcttccttctctgtaaaatgggaataagaacaacagatcttatttctggctgggtccactcaaccctctggttcttagacctggatccaattgctgcttttttttttttttttttccctacaggtgtttctagctgtgtacagggactgattggctgaggactcacattggagagctgcagacaacataacggtgaatggtgaggaagtcttgtggtctgaactccaaagggcaccagtgaccactgacagattgggtgcacagggggatcacaacaaggctgtccacttggttttagaagcatgttggaatcaagttcacagcaccatgtacctcttcttcattgcacttagcattattgcaatgttcccattatttgagggactttttgatgaacaattgtctcccccactaggctctagaggaagacagggccccaagcagacagaaaacatggttgtcaaaaggatagactctgaagcttggattcaaatcacaggtctgccttttcctagctgtaggacttcaggcaaatgacataagctctctgtgactcagtttcctcatttgtaagttgaggctcataacctacctacctcattgagttactgtgaagattaagagagtgtagaatgcaatagtgcctggcatgtaggaggtaccagagaggcatttgttcaataaataaaatagcaaagaaggaaatggttaaatcacaaaactggacttgctcagagtcagggggaacattgttggtcttgctggtattggtcaacctcttaaagccaactctagggttcctctaatggtccctgtcttctcttgcagagaatggaggatgaagattacaacacttccatcagttacggtgatgaataccctgattatttagactccattgtggttttggaggacttatcccccttggaagccagggtgtccaggatcttcctggtggtggtctacagcatcgtctgcttcctcgggattctgggcaatggtctggtgatcatgcattgccccctttcagatgaagaagacagtgaacatggtctggtcctcaacctggcagggggaagatttcctgttcaacgtcttcctcccaatccatatcacctatgccgccatggactaccactgggttttcgggacagccatgtgcaagatcagcaacttccttctcatccacaacatgttcaccagcgtcttcctgctgaccatcatcagctctgaccgctgcatctctgtgctcctccctgtctggtcccagaaccaccgcagcgttcgcctggcttacatggcctgcatggtcatctgggtcctggctttcttcttgagttccccatctctcgtcttccgggacacagccaacctgcatgggaaaatatcctgcttcaacaacttcagcctgtccacacctgggtcttcctcgtggcccactcactcccaaatggaccctgtggggtatagccggcacatggtggtgactgtcacccgcttcctctgtggcttcctggtcccagtcctcatcatcacagcttgctacctcaccatcgtgtgcaaactgcagcgcaaccgcctggccaagaccaagaagcccttcaagattattgtgaccatcatcattaccttcttcctctgctggtgcccctaccacacactcaacctcctagagctccaccacactgccatgcctggctctgtcttcagcctgggtttgcccctggccactgcccttgccattgccaacagctgcatgaaccccattctgtatgttttcatgggtcaggacttcaagaagttcaaggtggccctcttctctcgcctggtcaatgctctaagtgaagatacaggccactcttcctaccccagccatagaagctttaccaagatgtcatcaatgaatgagaggacttctatgaatgagagggagaccggcatgctttgatcctcactgtggaacccctcaatggactctctcaacccagggacacccaaggatatgtcttctgaagatcaaggcaagaacctctttagcatccaccaattttcactgcattttgcatgggatgaacagtgttttatgctgggaatctagggcctggaacccctttcttctagtggacagaacatgctgtgttccataca

SEQ ID NO: 762 - protein, 501 aa, Homo sapiens
MSGPKERSWALLVESALGLTVFTIDSLWQCWKYQRLTQQGVGDAFPEPQHQTPETADCSFICTLLISWAGGGGAVFELTCLTHVSWDVPPWSVAVANPHTSDKEGAGGFVPNRTLHACSCGSNQRSEGKQPIEIFKQRMEDEDYNTSISYGDEYPDYLDSIVVLEDLSPLEARVSRIFLVVVYSIVCFLGILGNGLMKKTVNMVWSSTWQGEDFLFNVFLPIHITYAAMDYHWVFGTAMCKISNFLLIHNMFTSVFLLTIISSDRCISVLLPVWSQNHRSVRLAYMACMVIWVLAFFLSSPSLVFRDTANLHGKISCFNNFSLSTPGSSSWPTHSQMDPVGYSRHMVVTVTRFLCGFLVPVLIITACYLTIVCKLQRNRLAKTKKPFKIIVTIIITFFLCWCPYHTLNLLELHHTAMPGSVFSLGLPLATALAIANSCMNPILYVFMGQDFKKFKVALFSRLVNALSEDTGHSSYPSHRSFTKMSSMNERTSMNERETGML

SEQ ID NO: 763 - DNA, 5006 bp, Homo sapiens
  source (1)..(5006)
  CDS (201)..(1106)
  CDS (4597)..(4806)
tgcagcctgtgatgaccctggcattttcaccaccccgtaacactgccaaattactagtttactaagttccaaaaggttgaccaccattcatccatcctgttttataattgggcttctgggaccaagtgggtaccttctattaccccacagctatacccttgtgcttttcccatcatctttcctcctcaaacaggccccagatgctaaggaatggcagcatagtgacggaatttatcctcgtgggctttcagcagagctccacttccacacgagcattgctctttgccctcttcttggccctctacagcctcaccatggccatgaatggcctcatcatctttatcacctcctggacagaccccaagctcaacagccccatgtacttcttcctcggccatctgtctctcctggatgtctgcttcatcaccactaccatcccacagatgttgatccacctcgtggtcagggaccacattgtctcctttgtatgttgcatgacccagatgtactttgtcttctgtgttggtgtggccgagtgcatcctcttggctttcatggcctatgaccgttatgttgctatctgctacccacttaactatgtcccgatcataagccagaaggtctgtgtcaggcttgtgggaactgcctggttctttgggctgatcaatggcatctttctcgagtatatttcattccgagagcccttccgcagagacaaccacatagaaagcttcttctgtgaggcccccatagtgattggcctctcttgtggggaccctcagtttagtctgtgggcaatctttgccgatgccatcgtggtaattctcagccccatggtgctcactgtcacttcctatgtgcacatcctggccaccatcctcagcaaagcctcctcctcaggtcgggggaagactttctctacttgtgcctctcacctgactgtggtcatctttctctacacttcagctatgttctcttacatgaacccccacagcacacatgggcctgacaaagacaaacctttctccctcctgtacaccatcattacccccatgtgcaaccccatcatttatagtttccgcaacaaggaaattaaggaggccatggtgagggcacttggaagaaccaggctggcccagccacagtctgtctagcaggaaggccctgaaaggaaagctccttcacctggggaatgggagagttaccccatccccagccctggcagatgagtaactctcctatgctgaaaggctccaggaaagagcgttcatggcttccttggcactagaatcagacctgaaagttcctcctgatgtccaatgtcctgatgttatctctctgacttcacttccacattgttttttcttggaccttcctcgggagaatttcggattttccttagtttttttcctcagtttcttttcctcttaagttctcacaacaggattcaataaataagtgcacttaactccattttatttgtatatacctttacatgctagtcccccaacctgagtttcgtacatacatttagaaataaactcttttatttttcagctcttcattttactgtttttctttctcaaattccactctcacttcctgggtctaccctcatctacccaattcctgtgaaaagtaggtaaagaagcaagaaaaaaagggctgggcgcagtggctcatgactgtaatctcagcactttgggaggctgaggatggagtttgagacctgcctgggcaacatagggagacccatctctacaaaaaatttaaaaaatgaactgggtgtggtggcacatgcctgtagtcccagctactgaggaggctgaggtgggaggattgcttgagcctgggaggttaaggctgcacgagcaatgatagcactgctgcactccagcctgagcaacgcagcaagaccttgtctcattaaaaaaaaaaaaaatgaagaagaagaaggaaggaaggaagggagggaaggagggagggagggaagggaagggaagaaagagggaactaggggtaagtactcacataagaaaagtcagttaaagaaaaaaaaaagatcagcaccctgaacttcatcttcttagcttccaccagtcatggggggagaatgatactaaatgtcaacagtgcactcaatttgtctgtgttgtgtgttgtcggggacggatgggtgatagaggccagtgtgccaaaccccttctcctaaatcctctagcttcctttagcaacaggaccgtctgcatgatatttcccttcccatgcaagtggcaagtgcctctaccaagcttctcaggttacctatttccttccctgttatccataccccaaattaactcccctctccccctactgccttcctttttctcttccatctttcatttcattccacctcaatcctactccaccttacctcctcatcttacatggatccctgtattttaaggaacccttctgcatactacctctaccattgcagaagtctttcaatttgtaaccctgccctctgtggcttcctctagcttctcaccttaaccaaacacagctttctttgagaaggtactacatcctcagcagttctctttctttgaaaattgcatttttctcataccccttcataataaaacaagggggtaggcctgttctttatttcgcagtgcacttccataatatgaatggacctcatttgggatgctctcaaatagatgtactgccctttccactcctgcgcatcacacactaccctttgcaatgatgacttaaaacagtagcttctggcagcacgtggtggctcacacctgtgattccagcactgtgggaggccaaggtgggcagattacttgaggccaggagctcaagaccagcttggtcaacatggtgaaaccccgtctctaataaaaatacaaaaattagctgggcgtggtagcgcatgcttgtaattctagctacttgagaggctgaggcaggaggatcacttgaacccaggaggcagaggctgcagtgagccataattacaccactgcactccagcctgggtgacagagtgagactctatctcaggcaaaacaaaacaaaacaaaacaaaacaaaaacagtagcttcactccacaaaactccaatcttttgagtccaaattgatttctccagaaatcagaggatgtgagaagctcttcttaacaaggagaaaggagaaaccactgtaattgggaagaaacgataaatgcagaacctaaaatttccattgtcaaaatttgcatcaaagttaaacaggcaagaaagaccttaagactattgcaatacgagattaaactcaacactactcaaacaagggtctgggaagtttttaagagctgctgtacgggaaatcacatgacatctgtgtttgctaactgcaaaggaaaaggacactttcttgtatcttcaaaacaagctgtagttttacaattccaaacaaggcacccacaggaggttaggctcccaccctcccacagagactgagagataggggtgctatcttccttgatgattacatttcaaagggatggctcacaggtccttgagaaagacattccctaggtcgtaaaactggcataagcttctaaggagatttatacacatttcaaaggagcagagaagaattttgcaatcacaagttttctaaagtaaacactcaaagaaaggggaggtcagggccctaacatccagaagaaacctgtctaaagttgtcaggctgaggtgaatgttaaggctcttttggtcaccactgagaacaacaacaaaaaggtcccaatctttccccctagggtctcagcttcttctctaggtttgaaaattcctatctcaaagaggaaaaagtgaaggaaaggaagaaagggaaaggagaagaaagactgcttttaaaaagttttctaagaaatcatttcttagctttacatttgcccagcactgacagacgctgagattataaacaagacagttccagcttttgagaatctcagtctagtagggcaggcaagaacaaataatggtaatagaaagggcaagcgttataaaaggcctacacaaagtactttggaagcacatatgataacatacttattaagcacttatattgtaagagctttccatttaatcgtcacataaccttatgaggtactagtattatctcaatgttgagatgcaaaaactgaggctcatagaggtcaaatactcaaaatccacagcatttacaatggcatagaggcctgcgcctataatcccatacactcaggaggctgaggcgggaggattgcttgaccccagcctgcagtaagctatgatcccgccactgcactctagcctgggcgacacagcgagatcccatctctaaaaaaaaaaaattaaactaaagaaaaataatagaacagcatagctcctgttcctaagcctgcactcctaagaaggtccaggacagcgcaggctttataccaaggaggtgatactggctgcgccgttaaaaatacgctggagttgtaacgtagaaaattggggcgggggttcgataccggggacgagtgaaattccaggcaagaggaatcgcccgcttcgtcgtagaactggtgttgtcaacatggatggcggaaggtgagctggggcccggaatgctggcaaagcaggccgagtgacctagaactgctttttcaaggacgagcactgtctcattcaaggccctgggctcccggaggcccgggcgccagacgggaacggacgcgaaccgagctcgcactagaagccacggccctggccgcgtctcccctgccgtagcttcggccctggtccctggtctctggaggacacaaattgcccccagactctgcgaaaacccatgaaaatgtaattaaccagaaaccaccctgaaactgcacggcacttcccagtcccctttcatgtcccaatgaaagacacttgtcgctggtgagcacgcaaccaggctctgaggttaccacggcgcagcccaaagaccg

SEQ ID NO: 764 - protein, 371 aa, Homo sapiens
MLRNGSIVTEFILVGFQQSSTSTRALLFALFLALYSLTMAMNGLIIFITSWTDPKLNSPMYFFLGHLSLLDVCFITTTIPQMLIHLVVRDHIVSFVCCMTQMYFVFCVGVAECILLAFMAYDRYVAICYPLNYVPIISQKVCVRLVGTAWFFGLINGIFLEYISFREPFRRDNHIESFFCEAPIVIGLSCGDPQFSLWAIFADAIVVILSPMVLTVTSYVHILATILSKASSSGRGKTFSTCASHLTVVIFLYTSAMFSYMNPHSTHGPDKDKPFSLLYTIITPMCNPIIYSFRNKEIKEAMNWCCQHGWRKVSWGPECWQSRPSDLELLFQGRALSHSRPWAPGGPGARRERTRTELALEATALAASPLP

SEQ ID NO: 765 - DNA, 5015 bp, Homo sapiens
  source (1)..(5015)
  CDS (201)..(1248)
  CDS (4769)..(4815)
agagccttgctggctttttttttttttttttttttttttagagatttcgtagtttcctggtaaccattcagtcatctatttcaacaccctgacatgacataaaggcaggcgtggaaccacacgttcaccacacagacacacacctccttgctggagcattcactaggcgaggcgctccatcggactcactagccgcactcatgaatcggcaccatctgcaggatcactttctggaaatagacaagaagaactgctgtgtgttccgagatgacttcattgtcaaggtgttgccgccggtgttggggctggagtttatcttcgggcttctgggcaatggccttgccctgtggattttctgtttccacctcaagtcctggaaatccagccggattttcctgttcaacctggcagtggctgactttctactgatcatctgcctgcccttcctgatggacaactatgtgaggcgttgggactggaagtttggggacatcccttgccggctgatgctcttcatgttggctatgaaccgccagggcagcatcatcttcctcacggtggtggcggtagacaggtatttccgggtggtccatccccaccacgccctgaacaagatctccaatcggacagcagccatcatctcttgccttctgtggggcatcactattggcctgacagtccacctcctgaagaagaagatgccgatccagaatggcggtgcaaatttgtgcagcagcttcagcatctgccataccttccagtggcacgaagccatgttcctcctggagttcttcctgcccctgggcatcatcctgttctgctcagccagaattatctggagcctgcggcagagacaaatggaccggcatgccaagatcaagagagccatcaccttcatcatggtggtggccatcgtctttgtcatctgcttccttcccagcgtggttgtgcggatccgcatcttctggctcctgcacacttcgggcacgcagaattgtgaagtgtaccgctcggtggacctggcgttctttatcactctcagcttcacctacatgaacagcatgctggaccccgtggtgtactacttctccagcccatcctttcccaacttcttctccactttgatcaaccgctgcctccagaggaagatgacaggtgagccagataataaccgcagcacgagcgtcgagctcacaggggaccccaacaaaaccagaggcgctccagaggcgttaatggccaactccggtgagccatggagcccctcttatctgggcccaacctctccttaaataaccatgccaagaagggacattgtcaccaagaaccaggatctctggagaaacagttgggctgttgcatcgagtaatgtcactggactcggcctaaggtttcctggaacttccagattcagagaatctgatttagggaaactgtggcagatgagtgggagactggttgcaaggtgtgaccgcaggaatcctggaggaacagagagtaaagcttctaggcatctgaaacttttgcttcatctctgacgctcgcaggactgaagatgggcaaattgtaggcgtttctgctgagcagagttggagccagagatctacttgtgacttgttggccttcttcccacatctgcctcagactggggggggctcagctcctcgggtgatatctagcctgcttgtgagctctagcagggataaggagagctgagattggagggaattgtgttgctcctggagggagcccaggcatcattaaacaagccagtaggtcacctggcttccgtggaccaattcatctttcagacaatctttagcagaaatggactcagggaagagactcacatgctttggttagtatctgtgtttccggtgggtgtaataggggattagccccagaagggactgagctaaacagtgttattatgggaaaggaaatggcattgctgctttcaaccagcgactaatgcaatccattcctctcttgtttatagtaatctaagggttgagcagttaaaacggcttcaggatagaaagctgtttcccacctgtttgcttttaccattaaaagggaaacgtgcctctgccccacgggtagaggggtgcacgttcctcctggttccttcgcttgtgtttctgtacttaccaaaaatctaccacttcaataaattttgataggagacagtctggcgttgctatatctgggttatggttcacagaaatggacttcttacttaagcagagacctttatgggttgttaactttgtcctggtagaaaactactccacactgcaaagtaagaaagagacacagacactgagctacatcatgaaacaactaagcagaaattacacctgtgtctaaacaaagatagaaagagctgggattaaaaataatttggaaggatagtacagataggattgcaagagcacttacattttattagagtttggtgaatattgctcttcatatttgtgcattaaaaagggaatcaaggccaggtgcaatggttcatgcctgtaatcccagcactttgaggggaccgaggtgggcagatcaccctgaggtcaggagtttgagaccagcctggacaacatggcgaaaccccacttctactaaaaatacaagaaaaattagccaggcatggtggcggccgcttgtagtcccagctactgggaaggctgggggaagaagaattgcttgaacccgggaggcggaggttgcagtgagccgaggtggtgtgcctgcactccagcctgggggacagagcaagacttcatctcaaataataataataaataatataaaaagggaatcaagccaggcagatatttttccataggagggggaagagcgagcttcctatggaatggtttcagttcccaattcggagaaggaaaggagatgtactggtttgagtctgtgatcagtccaagtttctgttacgctttcatttctaactctgtcagtccttgattatttggcaagacgaggcttgcttcaacctcctgacatgaacacagataaggaatttagagacaggctcccagctctgggtgaatgacagtaaatgaagaaaggtggatgctctggaattacctctgtgctttcagagcagttggcttgtctgtatcaccaagcaatgtacaggtaaaaagccaaaagcaaggatcaccttaaagaggaagagatgtcagggatgagctcagaggaaaatagggattccccagcctcggaggcatgagtcagtggggagcctcgttgtgaaacgcggattcgttcaagggatgaggtggtttggggtgtttggacctccacagctcacattcattcactgattcaggcattccatcagtttttttttttttttttgagaccgagtctcactctgtcatctaggctggagtgcagtggtgtgatctgggttcactgcagcctctgcctcctgggttcaagtgattctcctgcctcagcccccccagtagctgggattacaggtgtgcaccaccatgcctggctaatttttgtatttttagtagaggtggggtctcgccatgttgcccaggctggtcttgaactcctgacctcaggtgatccacctgcctcagcctcccaaagtgctgggattacaggtgtgagccactgtgcccagcctcattccatcagttttatgtattaagcaccaactgtgtgccaggcgctgttctgggtggtggagatagaacaagaaacaaggcagccacagtcctcttctcatcgagctgacttttggagtggggaggcaggcaggaataaaaaggagccttggggtggctatgggtgtcatgactatggtggagtgggacaatggggataaaaagtaaccggggctggggtgactgggatggcttctatgaggcattgaccctgagctgagccatgaatgactaaacagaaaagcaatgcaaaagtctgggggaaagacacgccaagcagagggaatggtaagtgcaaaggccctgaggtgagaattaggttggtgactgcgtgttcatttcctgtggctgggtggcttggaacaatagaaatgtattctcccacagatctagaagctagaagtgcagaatcaaggtgttggcagggttggttccatctggaggctaagggaaaatgtttcatgcctcactccgagctttcggagactgctggcactcttggactttccttggcttgtagacgcttcactccaatctctgcccctgtcaccacatggtggtcccctctgtgtcctctcttcttacagacacctgtcttttcttctctttttttttggtctgtatttgagacagagtctcgctctgtcacccaggctggaatgcagtggcttcatctcggctcactgcaactctgcctcccgggctcaagcggttctccttcctcagcctctcacacagctgggattataggcatgcacccccacacctgtctaatttttctatttttagtagagacagggttttgccatgttggctaggctggtcttgaactcctgacctcaggtgatccacctgcctcagcctcccaaagtgttgggattacaggtgtgatccagcaggcctggccataaatatgcctgtctttataacccaccctaatccaggatgctctcatcttgagatctttaccttagttatacctacaaagacccttattccaaataaggttgtattataaggtttggggtgaacatagctgttgggaaccagaactcaaccgactatagtgaggaacaatgtggccagcatgatgagcgtggggcctgccatatagtgtcgtgatcccctttcagacaaaagtaatgaaagacttgagatgaagatcatactatatttaaatgaagaagtttctaaacagaatatgatatccattttcttttaaaatacgtgtatctgtgtacttgtgtgtggaacaacagactacaggaacacacaccaggccgggcacagtggctcacccctgtaatctcagca

SEQ ID NO: 766 - protein, 364 aa, Homo sapiens
MNRHHLQDHFLEIDKKNCCVFRDDFIVKVLPPVLGLEFIFGLLGNGLALWIFCFHLKSWKSSRIFLFNLAVADFLLIICLPFLMDNYVRRWDWKFGDIPCRLMLFMLAMNRQGSIIFLTVVAVDRYFRVVHPHHALNKISNRTAAIISCLLWGITIGLTVHLLKKKMPIQNGGANLCSSFSICHTFQWHEAMFLLEFFLPLGIILFCSARIIWSLRQRQMDRHAKIKRAITFIMVVAIVFVICFLPSVVVRIRIFWLLHTSGTQNCEVYRSVDLAFFITLSFTYMNSMLDPVVYYFSSPSFPNFFSTLINRCLQRKMTGEPDNNRSTSVELTGDPNKTRGAPEALMANSVRNNVASMMSVGPAI

SEQ ID NO: 767 - DNA, 3978 bp, Homo sapiens
  source (1)..(3978)
  CDS (201)..(538)
  CDS (564)..(1029)
  CDS (3656)..(3778)
cctgggtctctcatttcctggctgaagtttctcttctcgctgctgtggcagcatccaacccacacacacaggacccgcatcctgggtgatgaagtcagacacgcagcagctgggtgagtgctaacgctcagataagcatctgtgccattgtggggactccctgggctgctctgcacccggacacttgctctgtccccgccatgtacaacgggtcgtgctgccgcatcgagggggacaccatctcccaggtgatgccgccgctgctcattgtggcctttgtgctgggcgcactaggcaatggggtcgccctgtgtggtttctgcttccacatgaagacctggaagcccagcactgtttaccttttcaatttggccgtggctgatttcctccttatgatctgcctgccttttcggacagactattacctcagacgtagacactgggcttttggggacattccctgccgagtggggctcttcacgttggccatgaacagggccgggagcatcgtgttccttacggtggtggctgcggacaggtatttcaaagtggtccacccccagccacgcggtgaacactatctccacccgggtggcggctggcatcgtctgcaccctgtgggccctggtcatcctgggaacagtgtatcttttgctggagaaccatctctgcgtgcaagagacgaccgtctcctgtgagagcttcatcatgaagtcggccaatggctggcatgtcatcatgttccagctggagttccttatgcccctcggcatcatcttattttgctccttcaagattgtttggagcctgaggcggaggcagcagctggccagacaggctcggatgaagaaggcgacccggttcatcatggtggtggcaattgtgttcatcacatgctacctgcccagcgtgtctgctagactctatttcctctggacggtgccctcgagcccccgcgatccctctgtccatggggccctgcacataaccctcagcttcacctacatgaacagcatgctggatcccctggtgtattatttttcaagcccctcctttcccaaattctacaacaagctcaaaatctgcagtctgaaacccaagcagccaggacactcaaaaacacaaaggccggaagagatgccaatttcgaacctcggtcgcaggagttgcatcagtgtggcaaatagtttccaaagccagtctgatgggcaatgggatccccacattgttgagtggcactgaacaagcagaccaacaacactgaggaagatagagtggtgacttagaattaactcgtgctaaggggtcgggggctttgaaaatgccacccccctttcttattgcaagacggcttctcgcacatgaactgcatccttctcattctgtcggaaatgaaattcacacaactataccttttggggaggttccagttgattgaagtgagttggctgcattttcttatctgatcacaatggcaggggacagaatgtgcatggagtggagcatgtgtgtgttgggaggggggctaggaactgcacagcccttgtgtaattttcgttgtttgtttttgttttgagacagagtctcactctgtgtcccaggctggagtgcagtggcacagtctcggctcactgcaacctctgcctcccgggttcaagcaattctcctgcctcagcctcccgagtagctgggattagaggcgccagccaacacacccggctaatttttgtatttttagtagagacagggttttgccatgttggccaggctggtctcgagctcctgacctcaggtgatccgcctgccttggcctcccaaagtggtgggatcacaggcgtgagccaccgtgcctggcctcccctgtgtcattttaaatggctaagtaaatgggtatatgtgtttgaatggggcatgttcactctcttaggggctatggggcagttagcagcatttcctatcctctgaccttaaatcattccttatctcagaaaacagaaaccgggctcagtcaatcaatgctttatttcaggccgaatgaggctctttagattgggatctattgatctatcaattttcatctttacatttctttgtacatctgtacattttgtccaaatgtacatctgtacgtctgtcatcattgtgacttcctggtagcccaagaagaacaacaacaaaacaatctgctctgaccttcttcaaatctttgtatttcaaagaaggtgctgagggatctgtttccttgccctggcttctccagtgggatgtgctgagtccaatacaattgcttttataattgcttttgacaacttgtcatgtgactgtgaattgaaattattcacttattttccaagtatttactgaattcgtatttggtggcaggcagtatactgtgtaatttttagtggagggtcattagtcaactcttatgtgacagtaaagttttttgggggggtggggacagagaagttaagagctttcatcctttcacggaatacagtttctagaccgattctgtgtgaacatcagttttgtcctcttattgcaagactccctcatacacatgagtttcccaaatgtgtacctggacccctcgaaacagaggactctacgaaatgacaagctgcccctgccctgaattagggggaaacattccaggccaactctagctcctttctcaagctacaaagtggtgaacatggttctcaactccttaatttatactctctcaaatgcccaggatactctacccacttaagaaccttgccaacttctgggggttgggcatggtggctcacgcttgtgatcccagcactttgggagactgaggcggatcacctgaggtcaggagttctagaccagcctgaccaacatggagaaacctcgtctctactaaaaattcaaaattagcctggtgtggtggcgcatgcctataatcccagctattcgggaggctgaggcaggagaatcacttgaaccgaggaggtggaggttgcggtgaggtgacatcgtgccattgcactccagactgggccacaggagtgaaacgccgtctcaaaaaaaaaaaagagctttgccaacttctagttctttggcctcaaaacacccctctaggctgtccctattattccttttttcagaggcactgtgcagcctagtgatgaaaagtacgagctatagagcattagaagcatcgaagtttgaatctcagctcaagcatttactaggcctgtgatcttagggcagcttgtgtttttagacactgaatcttgctctgttgcccaggctggagtgcagtgagtggcatgatcatagctcactgcagcctcaaactcctgggctcaagtgttcctcccacctcagcctcctgaatagctgggagtacaggcataagccaccacactcagctaatttttaaattttttttatagagacgaggtctcactcactgtgttgcccaagctggtctcaaactcctggcctccagcaatcctcccaccttggcctcccaaagtattgcgattgccagcatgagccactgctcccagcctggcatatatatagatatatatagagatatatagatatctatctatctatatatatatatatttttttttttttttttgagacagagtcttgctctatcacccaggctggagtacagtggcccaatctcagctcactgcaagctctgcctcctgggtccacgccattctcctgcctcagcctccagagtagctgggactacgggcgccccaccaccacgcccggctaattttttgtatttttagtacagacggggtttcattgtgttagccgggatggtcttgatctcctgacttgtgatccgcctgcctcggcctcccaaagtgctgggattacaggtgtaagccaccgcaccccgcccagcctggcagattttatttaatcatttgtagcttcattttcctcgtctgtcaaacagggatactggaa

SEQ ID NO: 768 - protein, 308 aa, Homo sapiens
MYNGSCCRIEGDTISQVMPPLLIVAFVLGALGNGVALCGFCFHMKTWKPSTVYLFNLAVADFLLMICLPFRTDYYLRRRHWAFGDIPCRVGLFTLAMNRAGSIVFLTVVAADSHAVNTISTRVAAGIVCTLWALVILGTVYLLLENHLCVQETTVSCESFIMKSANGWHVIMFQLEFLMPLGIILFCSFKIVWSLRRRQQLARQARMKKATRFIMVVAIVFITCYLPSVSARLYFLWTVPSSPRDPSVHGALHITLSFTYMNSMLDPLAGVQWPNLSSLQALPPGSTPFSCLSLQSSWDYGRPTTTPG

SEQ ID NO: 769 - DNA, 2766 bp, Homo sapiens
  source (1)..(2766)
  CDS (201)..(306)
  CDS (508)..(815)
  CDS (948)..(1156)
  CDS (1482)..(2073)
  CDS (2153)..(2566)
tcatttctgcaaccgagtgtctctcaacaaatcaaactgttcggaatgtttggaatattttaaacgaaagaatgcattcaacaggcagtgcccaactccccaagttgggattctctccttggatcagtctctcctgtttacccccctcctctcaccaccggctgcagggggacctctcactcctttccttcccagtccaaatgctgggcggtggagagccgcactcgcgacagacaccagaacgcaccttcgatagcacattcctgccccacctgcccctcagcacccgctgcagccccgacgagggtgggggtgggaggcagcaatccttcaggtcctcggcagccctgcgggcctaccttgtcccctttgcttaggacctgccaaggccacgtctctacgcttccgaacagcgagttcttgatcatgcccaacatgttgtagccgagacgctcccgacgcacgggaggacgtgaggtggcgggggcgacggagcaccacgggcagcgaccaccggcggcagggcggcagggcggcagggcggcagggcggcagggtggcagggcggcaaggcggcgggacggcgaggcggcgaggcgagaggcggggctagaggcaggggccagagggcgtggctagagggcggggcggcaattcagcccggcggtgaggcaagggggcgggacggcgaggtgaaggggcggagagagagggcggggcggcgaggcgagggggcggagagagggcgggtcagtgatgcgaagggcgggcagcagggcagcagtgcagcagtgcagcagtgcggtgaggcgagggtgcgaggcggctaagcaagggatgggcccgccgtggcgagccgctgggccgtgttccgcctcctttcgggctttccgcgggtgtctggggagggaacccggccgcgggcctcaggccgtccccctccgcagaccccttctcttattctgagtctaacctatccgctggggccctggaaagcgattctcgcctggagtggctttaggcagcggtggtggggaacgtcctctctcaggtgcctgggctccaacctccgagccccgggttgctcacgcttctccggtcctctacccgaaggctcgatcccgctggtacagcggcggccaggctccctgtcttggtagctgtccctctacccccgccccatgacctcttctagaccattgaaagagcatccaaaccactttcctgctgccactctttcctaccatccctctaaatcacagtttccaggtgacttttctaagcatggcttttctcgttcactcctgttcaaaaatcttctcaccaattttgtcaccatttactcagctgagtgcctgctttctgtcaagtattttaccaataaatctctactccacaccaccgacaagaaatattttggagccatttaaaaaggaggaaacggaagcttctgccgctgcctgatcctccattgctccgagccgcgcgggtgcagcgggctgtggagccgcgggccgagccccgccggagcgcccgagagcccgcgcgtcccgggcgtccgtcggggtccgaggtccctccctcagggagtccccgctcggcagcgctctcgcgtttcacgcagcggccggggatctgggacaggcggggccccgaggccgagcctggcgctgcccagcggccggtgcaggcctcaagctgggccgggcggaggggaaccggcgagttgaagccccggggccgaaagccggagcctgtggcggccgcgggggtggggaggggggtggggcggcttcttgggcagcgccacacggcggcgcagtgatggatgttaacagcagcggccacccggacctctacgggcgcctctgctctttcctcctgccggaggtggggggcaggctgcccgacctgagccccgacggtggcgccgaaccggtcgcggtctccgggacgccgcatctgctgagcgggggcccccgaggtgacggccagcccggcgcccacctgggacgcaaccccgggcaatgcctccggccgcggggagcaaatcaagaaagggccgagaaagttgtgatcggctctgtcctgacgctcatctctctgcgatcgcgggcaactgcctggtggtatctccgtgtgcttcgtcaagaagctccgccagccctccaactacctgatcgtgtccatggcgctggccaacctctcggtggccatggcggtcatgcccttcatcagtgtcaccgacctcatcgggggcaagtggatctttggacactttttctgtaacgtcttctccatgaatgtcatgtgctgcacggcctggatcttgaccttgtacgtgatcagcatcgacaggtaccttgggatcatgaagcctctcacgtaccctatgaggcagaaggggaaatgcatgacgaagatgattctttctgtctgccttctttccgcctttgtcactttacctaccatttttggtcgggctcagaatgtaaacgatgataaggtgtgcttggtcagtcaagactttggctacacgatttactccaccgcagtggcatcctaatccccatgtgcgtcatgcttttcatgtactaacagatttacaaggccgccaggaaaagcgcggcctaacacaggttacctggcttccctcgagtggagccagacagcagtagtcaccctgaatggcacagtgaagttccaggaggtggaagagtgtgcaaacctttcgagactcctcaagcatgaaaggaaaaaatatct

SEQ ID NO: 770 - protein, 542 aa, Homo sapiens [sequence omitted]

SEQ ID NO: 771 - DNA, 6347 bp, Homo sapiens
  source (1)..(6347)
  CDS (201)..(545)
  CDS (572)..(1165)
  CDS (5956)..(6147)
ccagacagtctctgttacaagcgctcgactcccccttgtagcatgaacacagctgtagataatacgtccaggaatgggtgtggctctgtgccaataaaactttattgtccaaaaacaggtgacaggttggtttggctcataggctgtagtctgccacttcctgttttattctaccttctgttcctttcaggtcactgtgcatggcatcatcctggccccctctagagctccaatcctccaaccagagccagctcttccctcaaaatgctacggcctgtgacaatgctccagaagcctgggacctgctgcacagagtgctgccaacatttatcatctccatctgtttcttcggcctcctagggaacctttttgtcctgttggtcttcctcctgccccggcggcaactgaacgtggcagaaatctacctggccaacctggcagcctctgatctggtgtttgtcttgggcttgcccttctgggcagagaatatctggaaccagtttaactggcctttcggagccctcctctgccgtgtcatcaacggggtcatcaaggccaatttgttcatcagcatcttcctggtggtggccatcagccaggacgctaccgcgtgctggtgcaccctatggccagccggaggcagcagcggcggaggcaggcccgggtcacctgcgtgctcatctgggttgtggggggcctcttgagcatccccacattcctgctgcgatccatccaagccgtcccagatctgaacatcaccgcctgcatcctgctcctcccccatgaggcctggcactttgcaaggattgtggagttaaatattctgggtttcctcctaccactggctgcgatcgtcttcttcaactaccacatcctggcctccctgcgaacgcgggaggaggtcagcaggacaaggtgcgggggccgcaaggatagcaagaccacagcgctgatcctcacgctcgtggttgccttcctggtctgctgggccccttaccacttctttgccttcctggaattcttattccaggtgcaagcagtccgaggctgcttttgggaggacttcattgacctgggcctgcaattggccaacttctttgccttcactaacagctccctgaatccagtaatttatgtctttgtgggccggctcttcaggaccaaggtctgggaactttataaacaatgcacccctaaaagtcttgctccaatatcttcatcccataggaaagaaatcttccaacttttctggcggaattaaaacagcattgaaccaagaagcttggctttcttatcaattctttgtgacataataaatgctattgtgataggctaaatgattactcccgtagattggggggtacctaatccctggacttgatgaatgttaccaaattaagggtcttgagatggggagatgatcctgaattatccaagtgggccctatataatcacaagggtccttataggagggaggcaggaggctcagagtcaggagatgtgactatggaagcagaggccagaggaattcaggacggccactacgagccaaggattgcaggcaccctctagaggctgtaaagggcaaggaaatggcttctcccctggagcctccagaaggaatgggtcctgccaactccctgtcttcagcccagggaaacagatttaggatttctggcctccagaactgttagaggatacatttgtgttttgttttgctttgtttgctttgctttgctttgcttttttgagatggggtctcgctctgtcacccaggctggagtgcactggcacaatcacggctcactgcagcctcaacttcccagactcaagggatcctcccacctcagcctcctgtagctgagactacaggtgtgcaccaccatgcctggctaacttttctattttttgtagagatggtgtcttcctgcattgcctaggctggtctcaaactcaagggctcaagtgatcctccactttggtctcccatagtgctaggattataggcgtggccactgcgcctggccccatttgtattttaagccaccgagtttctggtaatttgtcatagcagcagcaggaaacaaataacaagtatcgggtaatggcctctcttattacacttccatttgtctattcaaagctttctaggctaactgccaggaatacagggatggtatagctagaagttctatattcaaggaacttacatacatctaaatattataatataaaaaatgaaatgagaaattgcatgaacacaccacggatccagcatcttgcgccttcagcgagaaaggggatgggttccctctcaggttagcagagaagacgctgtgaagggagtcagccgtgagcctggtttccacaaagggtgcaatctggatacgtggagacagggaggaagggctggcagaggcgggaaagggtgagctgctcacaaaagaatgcttgtgcatgctcttattgaacgtgtaatgcattggtgcgggtcttgctatgagagacccaacggtgagcctaacggtgtctctaccctccaggggctcacagcaaccaggacaataattaagggattgtcatagagcaggatgcccgccaccatcagggtgaggggtgccgtgagaaccagagcagggctccagtctgggtggctgggagggatggttagagaggggttcctggaggaagagacacataaactgaatcccaaaaaatgagaagctggccaagcaaaatgggggaaaggagtgttccagacagaaggaacaaagtaggcccagaggcaggtggggttacaggttaggagggagaggttgaaggatggcagaggaggaggcgggtcatggagagaattggggctggaggagaatggacaggctgggtccaccatggtcagctggcaaagacagttcacccaggaaggatggtgggctccaggcagctttgagggccccattgaagctggaaagcgtggctgtgttgtgtgaatttactctgataatgctcgacagacccaggaaaggattgctctggagtagggtttagccagatagacggccatacgtcatgggagttggggatcctggtcagactcgggggaatgatggagagggaagaaacgagcacagggagagaaggaagtgaagtgagatcagtgtgttaaaggatggatatagtgagagaacctgggtgacagcaagaaacagaagaagagccaggcgtgatcttctgtacactgtgaagggaatcagccgtgagcctggtttccacaaagggtgcaatctgtaatcccagcactttgggaggctgagacaggtggatggcttgagcccgggagtttgagaccagcctgggcaacatagcaagaccccgtctctacaaaaaatacaaaaattatccaggcgtggtagtgcgcacctgtagtcccagctacttgggaggctgaggcaagaggatcatctgagcccaggaggtcagggctacaagcagtgagccaagattgtgccactgcattccagcctggctgacagagtgagaccctgtctcattaaaagagagagaggaaggcatagccacagagcaggaatgtttgagtagaacattccagaggcagagccatctcaggagatgacaaggaccaagtgtatccctggcaccaggtggctgaagtagagggaagaagaaggaggttggagacaacatagagaatggagaggtcaggtggtgggtgggccctacctgggccctcacaggcaggcgggacattgtcaggccctggggaggagagagtccgtgggccaggaggccattccaaggtcagtttccatggagtgggggagagggtgtagtgactggactccaagacacttgggggaatggggagaatggcagtccccacagctgcacgggaagggctggtcctcacagaatagcagcaaagactcattcattccaggaatggaaagaatgccatgttcttggagcctggagacagggtttgagaggctggcagcggctgggccaccaggacctcatcagtgataaccctgtgatcagtgttccagcccctgcaggtttcctggagagcagagtgtcgtcagaaggcctggagctgagccaacaggcaagatccagcctgcacatgtgtttaatttgaaccacatggtattttttaaaactccaagcccccaggctcttgagttggttaccagtactgaaactccccattgggagccagctttccagtttcttttgaaagtttggaacatccagcaacactgattcaatttcattcattcagcagatatttattaagcatctactttgtcagacactgttttgggcactgaaaatatggcagtgaacaaaagagaggaacatccctgggcccttggagttgaccttccagggtccccccggggctccaattctttggtgctgtgtagcagaggccccgtgaacagggcgccctcccatcaggttcacacgcatggaagctatgggaggttaagtttgcaacccctcatccagaccatcccttcacatacagtctaggaaacagagagcagtaagacctgcccaagcacacccagtgcgactcagcagccacacacaggagtaggctcagtcatctcatttaatcgcctgactcccttgtgaggtctgtttcaggatgtccactttctaggtgaggaagaggaggctaaggaaggcagtgcctgctcagactgcagaggctggattcacccaactcatctgactccaacaccaatgtgatttccaagcccccaggcaggaattcattgggcaaaggctctgtggcaaagtggcaaaagtaggcaggaacaggcaggaatagagagtgggaaagggaaaataatacctgattcctcttctattccgagtgagctgacccacatatgccctcctttcttctttttcagccggccttaagcaggtggcttatcaaaatcctttcgaggtcttgcaaaaaccaatcccacactcgagaagaacgtgctggccggtgaaatcggacaacattgctcacgggatgtaattcaatggtagactgcagccacagcctgagaactcagacacctgatttatgagacgcacataagtaacgtttaccgaagcccagcaaatggccccacagtgggagagaaactggcaaacccgtacagtagaattctgttgcccttctgtggggaaggccagttattcatttacagagggagaaatttctgccttgactaaaaggatcgatgctgtgggaaaaggtaatatatctgagttcccatggatctggttgataggttcacctggcgtgttccatatggggccaggcccaggccacacctgtggtgctaacacctggggtggagggaggaattagcaaatagtcttccagcatccccagctccagcacccatgtgggcttccactctctccctgagaagggccaagtagaaagagagaacaaggtttcactccaatccgttcccagctctgggtctgtcctgggctccagaaccgcgtgatcaggggccatatgtggccttcactgctctctgcagtgggaaggtaagaaaactgtagccaccctgccccatcatcaccccaatccatcatggggagtgggtggactaaggcctccaaatcccagcctcggggaaactcctgatgttgcaatggccacaggcaggctcttgctcttcggagatgagtcacaatttgatgaggagcaggtcggaagcagccctggaaagtgttcctccccacccctgctcccaccacagctccgaggagcctgggcatccaaccagggctgatccaagccttggctccggctgagctccgctctggcctctgtgcaccttcagctccttcctgcccttctctttccctgtgcccagcccctttctccagacccccttgattccttctcagcatcctcttgcctccccggaccacccccagctcaggcccctgcccaagaagggcctcaccgcggggctgcagagtgcacagtgcagccggtcagaggtccaggtctctgagtcacacatgccactgttccagtcctcactccaccaccgcatgggcctggccgaccaccgaaactcggcatcccatctgtaaaatgggaatgaggagagcagtgcctcactgtgtcgttgtgaaaattaagtgacccaaaaggacggccttattccctttttggaaagaggtaatgggcaaagaaagggaaggaaaggcgagaaaggacaagaggaaggtcagagatgtatgtgagacaccaggacagcgccaccccagcaagcaccaacaaccattttctc

SEQ ID NO: 772 - protein, 376 aa, Homo sapiens
MASSWPPLELQSSNQSQLFPQNATACDNAPEAWDLLHRVLPTFIISICFFGLLGNLFVLLVFLLPRRQLNVAEIYLANLAASDLVFVLGLPFWAENIWNQFNWPFGALLCRVINGHLPGGGHQPGRYRVLVHPMASRRQQRRRQARVTCVLIWVVGGLLSIPTFLLRSIQAVPDLNITACILLLPHEAWHFARIVELNILGFLLPLAAIVFFNYHILASLRTREEVSRTRCGGRKDSKTTALILTLVVAFLVCWAPYHFFAFLEFLFQVQAVRGCFWEDFIDLGLQLANFFAFTNSSLNPVIYVFVGRLFRTKHPLASPDHPQLRPLPKKGLTAGLQSAQCSRSEVQVSESHMPLFQSSLHHRMGLADHRNSASHL

SEQ ID NO: 773 - DNA, 1336 bp, Homo sapiens
  source (1)..(1336)
  CDS (201)..(1136)
caatccagatcaatacgtcagtttaaaagaaaaaaagtgactattgacatatctgcattctgttttttactttttacttttatttcaatagtaaatttatgcattttctttcccaaaatgatttaaatataaatctgattccccatctatgtttgcaccgtcattcagtaattgctggtgcttttacaattcacaggcacatgaaaatcttcaacagccccagcaactccagcaccttcactggcttcatcctcctgggcttcccttgccccagggaggggcagatcctcctctttgtgctcttcactgttgtttacctcctgaccctcatgggcaatggttccatcatctgtgctgtgcactgggatcagagactccacgcccccatgtacatcctgctcgccaacttctccttcttggagatatgttatgtcacctccacagtccccagcatgctggccaacttcctctctgacaccaagatcatctcgttctctggctgcttcctccagttctactttttcttctccttgggctctacagaatgctttttcctggcagttatggcatttgatcgataccttgccatctgtcggcctctacgctatccaaccattatgaccagacgtctctgtaccaatcttgtggtcaattgctgggtacttggtttcatctggttcttgattcctatcgtcaacatctcccaaatgtccttctgtggatctaggattattgaccacttcctatgtgacccagctcctcttctaactctcacttgcaaaaaaggccctgtgatagagcttgtcttttctgtcttaagtcctctgcctgtctttatgctctttctcttcattgtggggtcctatgctctggtcgtgagagctgtgttgagggtcccttcagcagctgggagaagaaaggctttctccacctgtgggtctcacctggctgtggtttcactgttctacggctcagtactggtcatgtatgggagcccaccatctaagaatgaagctggaaagcagaagactgtgactctgttttattctgttgttaccccactgcttaaccctgtgatatatagtcttaggaacaaagatatgagaaaagctctgaagaaattttggggaacataaaatgttaatcaaaaaggtccttgcgtaattaatcttgtctttaattttggggtttaaaaaaaaaactggtcttggccaggcgcggtggcttacgcctgtaatcccagcactttgggagcccgaggcgggtggatcacgaggtcaggagatcaagaccaccctggctaacacggtgaaaccctgtctctactaaaaaatac

SEQ ID NO: 774 - protein, 311 aa, Homo sapiens
MKIFNSPSNSSTFTGFILLGFPCPREGQILLFVLFTVVYLLTLMGNGSIICAVHWDQRLHAPMYILLANFSFLEICYVTSTVPSMLANFLSDTKIISFSGCFLQFYFFFSLGSTECFFLAVMAFDRYLAICRPLRYPTIMTRRLCTNLVVNCWVLGFIWFLIPIVNISQMSFCGSRIIDHFLCDPAPLLTLTCKKGPVIELVFSVLSPLPVFMLFLFIVGSYALVVRAVLRVPSAAGRRKAFSTCGSHLAVVSLFYGSVLVMYGSPPSKNEAGKQKTVTLFYSVVTPLLNPVIYSLRNKDMRKALKKFWGT

SEQ ID NO: 775 - DNA, 1378 bp, Homo sapiens
  source (1)..(1378)
  CDS (201)..(1178)
caattgtagatatttctcttatattttccattgctgcttaagtaatgcttaccaactaaccaaccaaccaaggagaaaagatcctctctatgacagagtttcatctgcaaagccaaatgccctcaataagactcatcttcagaaggctgtccttaggcagaattaaacccagtcagagccccaggtgttcaacctcatttatggtggtgccttctttctccatcgcagagcactggagaaggatgaaaggggcaaacctgagccaagggatggagtttgagctcttgggcctcaccactgacccccagctccagaggctgctcttcgtggtgttcctgggcatgtacacagccactctgctggggaacctggtcatgttcctcctgatccatgtgagtgccaccctgcacacacccatgtactccctcctgaagagcctctccttcttggatttctgctactcctccacggttgtgccccagaccctggtgaacttcttggccaagaggaaagtgatctcttattttggctgcatgactcagatgttcttctatgcgggttttgccaccagtgagtgctatctcatcgctgccatggcctatgaccgctatgccgctatttgtaaccccctgctctactcaaccatcatgtctcctgaggtctgtgcctcgctgattgtgggctcctacagtgcaggattcctcaattctcttatccacactggctgtatctttagtctgaaattctgcggtgctcatgtcgtcactcacttcttctgtgatgggccacccatcctgtccttgtcttgtgtagacacctcactgtgtgagatcctgctcttcatttttgctggtttcaaccttttgagctgcaccctcaccatcttgatctcctacttcttaattctcaacaccatcctgaaaatgagctcggcccagggcaggtttaaggcattttccacctgtgcatcccacctcactgccatctgcctcttctttggcacaacactttttatgtacctgcgccccaggtccagctactccttgacccaggaccgcacagttgctgtcatctacacagtggtgatcccagtgctgaaccccctcatgtactctttgagaaacaaggatgtgaagaaagctttaataaaggtttggggtaggaaaacaatggaatgatttctcaatgcattaccacatatctttagaaagtcaagggaacttttaccttaggtggtgtcaccctgagcacattcccatgcccacccctgtgaatattgggcatgccctctggtctgcaggtgcttctgcatctacctgccacagaagaaatgatggtgtcctagagactaagaagtgagaagggtgtgtctgcttgt

SEQ ID NO: 776 - protein, 325 aa, Homo sapiens [sequence omitted]

SEQ ID NO: 777 - DNA, 1381 bp, Homo sapiens
  source (1)..(1381)
  CDS (201)..(1181)
taaaatcatgtttgtgtacataaatgaatgtgtgtatgtgtttttctgtgtctgtgtgtgtctctgtatgagagagaagaggtatctgtgttcattatgtcatgaataacatagctcaacttagtcttgggtttatagatttagggattccatcagtgttacagaaaataatcctgaccaaaattattttattgttcaaaatgtatgtgtcaaattgcaatccttgtgctattcacagaaaaatcaattatccaaataccaaactggatttcgagcaagtgaacaacataacggaattcatcttgcttggcctgacacagaacgcagaggcacagaaactcttgtttgctgtgtttacactcatctactttctcaccatggtagacaacctaatcattgtggtgacaatcaccaccagcccagccctggactcccccgtgtatttttttctgtctttcttttccttcatagatggctgctcctcttctaccatggcccccaaaatgatatttgacttactcactgaaaagaaaactatttccttcagtgggtgcatgacccagctctttgtagaacatttctttgggggagttgagatcattctgctcgtggtgatggcctatgactgctatgtggccatctgcaagcccctgtactacctgatcacaatgaacaggcaggtatgtggcctcctggtggccatggcatgggtcgggggatttcttcacgctctgattcaaatgcttttaatagtctggctgcccttctgtggccccaatgtcattgaccatttcatctgtgaccttttccctctgctaaaactctcctgcactgacactcacgtctttggactctttgttgccgccaacagtgggctgatgtgtatgctcattttttctattcttattacctcttacgtcctaatcctctgctcacagcggaaggctctctctacctgcgccttccatatcactgtagtcgtcctattctttgttccctgtatattggtgtaccttcgacccatgatcaccttccctattgataaagctgtgtctgtgttttatactgtggtaacacccatgttaaaccctttaatctacaccctcagaaacacagaggtgaaaaatgccatgaagcagctctggagccaaataatctggggtaacaatttgtgtgattagagaagataaacacagaacctactcatattttaacaacaggtatgactaatgaaaagggtaaaggtcttgaggtcagaatagtgagtttaagtatattttattcccctcattttctggaatctttaatgatgccttttcataaaagatcaatatctgattaaatgatgactaatgtttctgccaatttgaaacttcttcac

SEQ ID NO: 778 - protein, 326 aa, Homo sapiens
MYVSNCNPCAIHRKINYPNTKLDFEQVNNITEFILLGLTQNAEAQKLLFAVFTLIYFLTMVDNLIIVVTITTSPALDSPVYFFLSFFSFIDGCSSSTMAPKMIFDLLTEKKTISFSGCMTQLFVEHFFGGVEIILLVVMAYDCYVAICKPLYYLITMNRQVCGLLVAMAWVGGFLHALIQMLLIVWLPFCGPNVIDHFICDLFPLLKLSCTDTHVFGLFVAANSGLMCMLIFSILITSYVLILCSQRKALSTCAFHITVVVLFFVPCILVYLRPMITFPIDKAVSVFYTVVTPMLNPLIYTLRNTEVKNAMKQLWSQIIWGNNLCD

SEQ ID NO: 779 - DNA, 1620 bp, Homo sapiens
  source (1)..(1620)
  CDS (201)..(562)
  CDS (619)..(1420)
  modified_base (457)..(556): a, t, c, g, unknown or other
  modified_base (707): a, t, c, g, unknown or other
  modified_base (777): a, t, c, g, unknown or other
tttttcaatttaagagtatgtctgagaggctaaaccagaaatgtgtaaatttggtgagactttaaacagcctgtgaccgacgggccaatcttcctcttttccttccagatgtcacactggatccttggcctccagggtccattaaggtgagaataagatctctgggctggctggaactagcctaagactgaaaagcagccatggacatggcggatgagccactcaatggaagccacacatggctatccattccatttgacctcaatggctctgtggtgtcaaccaacacctcaaaccagacagagccgtactatgacctgacaagcaatgcagtcctcacattcatctattttgtggtctgcatcattgggttgtgtggcaacacacttgtcatttatgtcatcctccgctatgccaagatgaagaccatcaccaacatttacatcctcaacctggnnnnnnnnnnnnnnnnnnnnnnnnnnnnnnnnnnnnnnnnnnnnnnnnnnnnnnnnnnnnnnnnnnnnnnnnnnnnnnnnnnnnnnnnnnnnnnnnnnnncaccacgttcatctcagctggcatgcagatagctatcatctggtctgctttctggctagcaggggctctggtcactggcccttggcaaggccatttgccggggtggtcatggctgtggatggcatcaatcagttcaccagcatcttctgcntgacagtcatgagcatcgacgaatgcctgcctgtggtccaccccatcaagtcggccaagtggaggagacnccggacggccaagatgatcaccatggctgtgtggggagtctctctgctggtcatcttgcccatcatgatatatgctgggctccggagcaaccagtgggggagaagcagctgcaccatcaactggccaggtgaatctggggcttggtacacagggttcatcatctacactttcattctggggttcctggtacccctcaccatcatctgtctttgctacctgttcattatcatcaaggtgaagtcctctggaatccgagtgggctcctctaagaggaagaagtctgagaagaaggtcacccgaatggtgtccatcgtggtggctgtcttcatcttctgctggcttcccttctacatattcaacgtttcttccgtctccatggccatcagccccaccccagcccttaaaggcatgtttgactttgtggtggtcctcacctatgctaacagctgtgccaaccctatcctatatgccttcttgtctgacaacttcaagaagagcttccagaatgtcctctgcttggtcaaggtgagcggcacagatgatggggagcggagtgacagtaagcaggacaaatcccggctgaatgagaccacggagacccagaggaccctcctcaatggagacctccaaaccagtatctgaactgcttggggggtgggaaagaaccaagccatgctctgtctactggcaatgggctccctacccacactggcttcctgcctcccacccctcacacctggcttctagaatagaggattgctcagcatgagtccaattcagagaacggtgtttgagtcagcttgtctgattgaatgataatgtgctaaattgattacctcccc

SEQ ID NO: 780 - protein, 387 aa, Homo sapiens
  MOD_RES (86)..(119): Variable amino acid
  MOD_RES (151): Variable amino acid
  MOD_RES (174): Variable amino acid
MDMADEPLNGSHTWLSIPFDLNGSVVSTNTSNQTEPYYDLTSNAVLTFIYFVVCIIGLCGNTLVIYVILRYAKMKTITNIYILNLXXXXXXXXXXXXXXXXXXXXXXXXXXXXXXXXXXTTGSGHWPLARPFAGVVMAVDGINQFTSIFCXTVMSIDECLPVVHPIKSAKWRRXRTAKMITMAVWGVSLLVILPIMIYAGLRSNQWGRSSCTINWPGESGAWYTGFIIYTFILGFLVPLTIICLCYLFIIIKVKSSGIRVGSSKRKKSEKKVTRMVSIVVAVFIFCWLPFYIFNVSSVSMAISPTPALKGMFDFVVVLTYANSCANPILYAFLSDNFKKSFQNVLCLVKVSGTDDGERSDSKQDKSRLNETTETQRTLLNGDLQTSI

SEQ ID NO: 781 - DNA, 7972 bp, Homo sapiens
  source (1)..(7972)
  CDS (201)..(492)
  CDS (6814)..(7772)
ggcagcccagcccagcctcgctagccgcagggggtggtggtggtggtggtgtcagggtttgatggtggtgtcagggtttgatggtgagatctttagggaggaggtgatgtaaaaactgaaacctcaaatgagaacaggactgagataagtgagagtgagtagtggtggaaggggtcccaggcaggaggaagggaggaaagatggaagaagggaagaagagaggaaggaaggaagagaaggaagaaaagagggagggaagcagcaaaggaaggagggaggcaggaatggagagggcaatcccaaggtcccccgcctccctccttggacttcgattaccctgcatcctgcatcccaggcaggctcctcaagacacctctgggaacgtgccactggggaagacgcctgcagagatgaagctctcaccctgggtgcactgtgcccagggccattacaggcctggctgcaaggcgtccctaaaggtctctgatgaaggtaagtggagtcgtctatttccaaacctgctttccaggatgaagtggcaagagtactgggaggtggaagggagaaggcaagagaagcagggaaaattggaacagagggaggcacaggtttgggaaaagaaacgagagggagcatgggatgatatggagtaggggttctatagcctcagccacctgactccaggctggatcagcctgtcctcactccaagtcccccatagagtccacctactgcctagagcagccccctttccacagcagtcgtggccaccagggtccatgctggggtggggagtggtctctatactaagttgtggaggagggtggttctgagccaagcgggtgacattgagtgtgtcaccatgcatgtgggtgtacttaggcatcacccatgtgtactcctgccttcactgtgtgtgtgtgtgtgcagttgtgtgcgcttgtatgagattattgtagctgccatttcaaagtgccgcaaaccttgtggcttaaaacaagataaatgcattcttgcagggttctggaggctagacgtcttaaagcaagacgtctacaaagctactctccctctgaagattctaagggagaagatgccttgcctcttccagcttctgggtgctctaggcattgattgatttgtagctgcatcgctccaatctctgcctctctcttcacgcgaccttttcctctgtgtgtcctcccctcgtctttgaggggcaccagttgttggatttagtaaacaacctaattcagaataatctcatttttatttttattattattattttttggacagggtctcgctctgtcacccaggctggagtgcagtggcacgatcacagctcactgcagcctcgacctcccaggctcaactgatcctcccacttggcctcctaagcagctgttagcgcaggcacacagcaccacgcccagctaatttttgtagagatggggttttgccatgttgctcaggctggtctcgaactcctggattcaagcaatcccccgccccacccaccttggtctcccacagtgctgggattataggtgtgagccaccacacccagctgatctcatttttggatccttaccttaatgacatctgtaaaagactctattgccacctaaggtcacattattttattttagtttagtttagtttggtttcagggtacatgctcaggatgtgcaggtttgtcacacaggcaaatgtgtgccatggtgctttgctgcacctatcaacctatcacctaggtattaagcctggcatacattagctatttttctgaggctctccccacccctgccctaccccaacaggccccagtgtgtgttgttcccctccctgtgtccaaaggtcacattctgaggttctgaatgaacatgagttttggagggacatgattcaacacacacagtgccctcacacatggaatggctgtgtgtctccagtttattccagccccagatgagcaccaggcatttggcaagggctccataggtgtgtgcagaatgagtggtggtgtctctggttctggctgggggtgtcaccgccagtgtgcatttcagagccagtgcgactgtgtggcattgctcagatctgtctgcctttgcatctgtgtgttcagttgtatgataaagtgcataagcagaaagagctggatgagttgaattgtgtctcctttgaggagagagggcactggagcagggtctgggagcctgcgtgtgtgccagcctgggattctgcatttgcaccagcctgggattctgtgtgtgcaccagcctagggttctgcgtgtgcatcattctggagttctgtgtgtgcagaagcctgaggttctgcgtgtgcaccagtctggggttctgcctgggagccctcagctgggagaaggaccctgacctttgtccttccctaggtctagacttgtgcaggggagttggagagcccccttggagatttctgctaaggtgctgttctgggaaagagtgggacagaatgtgccagagagctgagagagccctttctgtatttctcttttcttttttttcttttcttttctttttttttttttgagacagggtctcgctctgtcacccaggctggaatgtagtggcatgaacatggctcactgcagcctcgaattcctgtactcaagcaatcctctcacctcagcctcctgagtagctggaactacaggtgcacatcaccacgcctggctaatttaaaaacaatttttttggtaaagatgggatctcactatgttgcccaggctggtctcaaactcctggcctcaagtgatcctcctgcctcagcctccaaaagtgctgggattataggtgtgagccactgggcatggcccctttctgtaatttttagtaacatttgtgcatttaggagcagggaccttggagcctgttggtagccaggagagaggaagaggtgagctgcacaagggagggagtgctggagggtaggaggcatttacagtgacagaagaaggttcatctggaatggggttgaagtccctgactgtcacagtgccaatgtgagtcacctggcaggcaaggatgagtggcaaccagctcagcagacagcaaacagcaatgatgacagagatgatcacgacaacgtcagctggcagccttgagaactgtgtgctaagcacttggcatcccgtcgcccagggaacccccagggcaggtctctggttatcccagcatacagtgagaacctgggatttgaaccatgggtctgcgtgactccacggcctggatatgtcttagagaattgtctctggctgtcagaagagggatggggcagaggaggggagattggtaagcaccgtgggctgagagagagggcgtgaggccagagctggggttgtgtccctgctatagagggggagggagtgaggctcagagatgacagatgagggagaggagggatgaagaagaggagggagttgaggctatgctgcagttgttggcttggctggctgggtcccctccagcccacacatgctacttttctgtgtggaatgatcattcctaacttgagccaaactgtccattttccaggtggtattctgagtcctccaagcattgggctaaccttggctctgagagatagttagtgacaatcttctaggtagggctaggaggaagtgtaatattggggtgaaccaggtcccaggtaagtattcgaaaacgtgctatcacaacagtagctttctcatagaagtaaaaagtaggacagaggatactagaggctgggaagggtaggcagaagggagagatagggagaaattggctaaaagatacaaaattacaaatagaggccagggatggtgactcacgcctgtaatcccaacaattcaggtggccgaggcaggcagatcacttgaggacaggagttcgagaccagcctggccaacatggcaaaaccctgtctctactaaaaatacaaaaattagccaggtgtggtggcgggcacctgtaatccgagctactcgggaggctgaggcaggagaatcacttgaacccgggaggcagaggttgcagtgagccgagatcatgccactgcactccagcctgggcaatgagagcaaaactccatctcaaaacaaacaaacaaaaataagtaaatacaaataaaatttaaaaacagtagtcttcagttaatcaaagatatctatatagttatatagataccatacacacacacacacacacacacacacacacacacatttttgttggacttaaactacagatgtactccgcaactcctcagtgatattttatcatccttatttgatcatcattgatatgaacaacaggggtgatctcattttatttattcccatttatcatcatgtctcacttctacttcccttccctgcccccaccacagacagctgttccattttgttcaaagtgtatccctttgtttgcatgaattattattatttttttttttttttgagacggagtctcgctctgtggcccaggctggagtgcagtggcgccatctcggctcactgcaagctctgcctcctgggttcatgccattctcctgcctcagcctcccgagtagctgggactacaggcccccgccaccacgcccagctaatttttttgtatttttagtagaaacgggttttcaccatgttagccaggatggtcttgatctcctaacttcatgatctgcccgtctcagcctcccaaagtgctgggattacaggtgcatgaattattattaaattctccagcctaggtgacagagtgacacttggtctcaaaaaaaaaaaaatcctctcttttagcttttttgaaaatatgcaataagttacaattagccatattcacccaccagtgctgcagatcttactggaattttgccagtttgtcagctaattccctctttatgttctagggcacaattcatttcatttagttgttatttctatttttcattatcatttttttattcgcattttttaattttccttttattctaaagattattatgtgatatgttactgtggcaatatcacgtaactcaacctgatatttatgttctaaatatataggtagttttaagggtcctcatcttagtaatttccaattttatttcagaatgctcagaaaacctgggtctttcttttattagcacttgctacaaattaagagaactttagtctgaccatccatgccggccctcaatcttaaattctttgtttgtttgtttatttttgagacagggtctcactgtgtcgcccaggctggagtgcagtggcgtgatctcaggtcactgcaacctctctctccttggctcaagcaattctcccacctcagcctctcaggtagctgggattacaggtgcatgtcaccatgcccaggtaatttttgtgcttttagtagggacggggtttcaccatgttggccaggctggttttgaactcctgacctcaagtgatccacccacctcggcctcccaaagtgctgggattacaggagtgagctactgtgcccggcccttaaccttaaattcttaagtgtttattccaggccctgtggcaggtacattatgagcataatcttattaaatcctcataacaaccctgtcaatttgggattattatccatttcttttagggatgagaaaactaaggctcacaacaatcaagggaccaacccacggtcccctagctctgaagtggggatccaacccaggtgtggctgaatagagaccaccgagatttaaaaataggaataataattattatttttatcagtattactatttgtgaggttcttactacgggccaagacttgtgcaaagcaagtaagatgcatgatcttatttaaacctttacacagtttgtttttgtttttgtttttgttttatgagatagcatctcgctctatcacccaggctgaagtgcagtggctcagtcatagctcactgcagccttgacctcccaggctcaatcgatcctcccacctcagcctctcaactagccaggaccacagacatgcaccacaatgtgtggcacattttcttatacttcgtagacatgggggtcttgctattttgcccagactggtctcaagctcctgggctcaagtgatccttctgcttcagcctctgacgtagctgggaccacaggcatgcaccaccatgcctggctaatttttttttaaatttttattttgtagagatggagtttcactatgttactcagggtggtctcaaactcctggcctcaggtgacccccctctgcctccgcctcccaaagtgctgagatgacaggtgtgagccatcattcccaggctaaacttcagcacattattattaacatatttttggccaggcgtggtggctcaagactgtaatcccaacactttggaaggctgaggaaggtggatcacctgaggtcaggagttcgagaccagcctggccaacatgctgaaacccatctctactaaaaatacaaaaatcagctggcgtggtagcacatgcctgtaatcccagctactctggaggctgaggcaggagaatcacttgaacccaggaggcagaggttgcagtgagctgagatcacaccactgcactccagcctgggtgacagagcgagaccccatctcaaaaactaaaactaaaaataaataacatatttttgcacatggagtaaccatggcttggacagatgaagaaggcgctctcagatgtcctcccaggtgggagtcactagacacccctgtgctcctaaccactgggtcttctttcctctctccaccaactaggggtggccgccatgcaggggctaaaccacacctccgtgtctgaattcatcctcgttggcttctctgccttcccccacctccagctgatgctcttcctgctgttcctgctgatgtacctgttcacgctgctgggcaacctgctcatcatggccactgtctggagcgagcgcagcctccacatgcccatgtacctcttcctgtgtgccctctccatcaccgagatcctctacaccgtggccatcatcccgcgcatgctggccgacctgctgtccacccagcgctccatcgccttcctggcctgtgccagtcagatgttcttctccttcagcttcggcttcacccactccttcctgctcactgtcatgggctacgaccgctacgtggccatctgccaccccctgcgttacaacgtgctcatgagcctgcggggctgcacctgccgggtgggctgctcctgggctggtggcttggtcatggggatggtggtgacctcggccattttccacctcgccttctgtggacacaaggagatccaccatttcttctgccacgtgccacctctgttgaagttggcctgtggagatgatgtgctggtggtggccaaaggcgtgggcttggtgtgtatcacggccctgctgggctgttttctcctcatcctcctctcctatgccttcatcgtggccgccatcttgaagatcccttctgctgaaggtcggaacaaggccttctccacctgtgcctctcacctcactgtggtggtcgtgcactatggctttgcctccgtcatttacctgaagcccaaaggtccccagtctccggaaggagacaccttgatgggcatcacctacacggtcctcacacccttcctcagccccatcatcttcagcctcaggaacaaggagctgaaggtcgccatgaagaagacttgcttcaccaaactctttccacagaactgctgaaatggctgactttctctcaagagatgtagcgaatgggaacactttagtcttcctcctttatttcttttcctttcctccctccctcctttcctccctccctcccttccttccttctttccttcctccctccctcctttcctccctccttctctgacctacagtccaccctccctcccccctcctccttgccttccttccat

SEQ ID NO: 782 - protein, 416 aa, Homo sapiens
MEEGKKRGRKEEKEEKREGSSKGRREAGMERAIPRSPASLLGLRLPCILHPRQAPQDTSGNVPLGKTPAEMKLSPWVHCAQGHYRPGCKASLKVSDEGVAAMQGLNHTSVSEFILVGFSAFPHLQLMLFLLFLLMYLFTLLGNLLIMATVWSERSLHMPMYLFLCALSITEILYTVAIIPRMLADLLSTQRSIAFLACASQMFFSFSFGFTHSFLLTVMGYDRYVAICHPLRYNVLMSLRGCTCRVGCSWAGGLVMGMVVTSAIFHLAFCGHKEIHHFFCHVPPLLKLACGDDVLVVAKGVGLVCITALLGCFLLILLSYAFIVAAILKIPSAEGRNKAFSTCASHLTVVVVHYGFASVIYLKPKGPQSPEGDTLMGITYTVLTPFLSPIIFSLRNKELKVAMKKTCFTKLFPQNC

SEQ ID NO: 783 - DNA, 55611 bp, Homo sapiens
  source (1)..(55611)
  CDS (201)..(308)
  CDS (11659)..(11804)
  CDS (21744)..(22668)
  CDS (26684)..(26781)
  CDS (39985)..(40051)
  CDS (43601)..(43993)
  CDS (54992)..(55411)
gaaaccccatctcagaaaaaaaaaaaaaaaaaaagaaggaaaagaaagaaactctacacttcctgtccttattcctgggaatttatttaacaatttaatttctcaccatacccgagggaaggcacagcctattgcaaagtcattttgcacgaaagcaaactggggctcagagaaccaggcctccagtcagtgctggtgtcatggacaaccaggctgagggcccatggcagaacctgttttatgacatggctgctctccctgaagccagtgaggcacaaagcctaggggagtggacaagggacaggaaggtgtgggtttccatcctgctgtgtgaccttggggaagtcacctaacctctctgagcctcatttttctttcttttttcttatttatttattttgagacagagtctcgctctgtcgcccaggccagagtgcagtggcgcaatctcagctcactgcaagctccgtctcccaggttcaagtgattctcctgcctcagcctcccgagtagctgggattacaagcgcgtgccaccacgcctggctaatttttgtatttttaatacagatggggtttctccatattggtcaggatggtctcgaactcctgacctcgtgatttgcccacctcagcttcccaaagtgctgggattacaggcatgagccaccgtgcccagccttcttgtttttagtttttttttttttaatgaaaaaaaaagtattattatggccgggcacggtggctcacgcccgtaatcccagcactttgggaggccaaggtgggtggatcacctgaggttaggagttggagaccagcctgaccaacatggcaaaacctcatctctactataaatacaaaaattagctgggcatggtgtcgcatgtgtgtaatcccacctacttgggaggctgaggcaggagaatcgcttgaacccgggaggcagaggttgcagtgagctgagattgtgccactgcaccccagcctgggcaacagagagagactctgtctcaaaaacaaaacaaaacaaaacaaaaaccagaagagatgtgtggtgcatgtaaaatacacatgagatgagattttgaagactgattttgaaaaaaagaatgtaaaatgtcttggccataactttcatcagaattacttgatttgtatttaaatatcatggcatttagtttatgggggatttttttgttttaatttatcttttttctttttttccagcaaatgcttaacatccaaagtttatggttatatgtttgagatgggatctcattctgtcgcccaggctggggtgcagtggctcactgcagcctctacctcctgggttcaagccatcctcccacctcagcctcccaagtagctgggactatataggtatgtgccatcacgtttgactaatttttaaatttttttgtagaagccgggtgcagtggcaaatgcctgtaatcccagcactttgggaggccgaggcgggcggatcacctgaggtcaggagtttgagaccagcctggccgacatggtgaaactccgtctctaccaaaaatacaaaattagctgggggtggtggcgcgcgcctgtaatcccagctacttgggaggctgagacaggaaaatctcttgaacctgggagacagagattgcaatgagccaagattgtgccactgcactccagcctggacgacaaagtgagactctgtctaaaaaaaaaaaaaaaaaaaaaaagttttctgtagacaccgaatctcactatatatgttccccaggatgaacttgaagtcctgggctcaagtgatcctcccatctcagcctcccaaagtgctgggattacaggtgtgagccaccgcgcccgacccatagatgcttgttaagggaaaatcccagcactttaggaggccaaggagggtggatcacctgaagtcaggagttcgagaccagcctggccaatatggtgaaaccccatctctacaaaaaatacaaaaattagctgggctttttggctggtgcttgcaatccttgagaggctgaggcaggagaatcacttgcctgtagtcttagctacttgggaggctgaggtgggaggatttgcttgaacccaggagttcaaggctgcagtcagctatgatagcgccactgtacttcaacctgggcaacagagggagacctggtcccttaaaaaaaaaaagacatttctcaagagggccttctaccttccttccttccctttgaaaaacctaggagggagttacagatgttattgttcaccagctgtatcctaaggaattcaggttcgtcctaaaggaaaatgccttttcccctttcctcacctcgttttagatactctctggaggattttcctcagattctcgctgaaacctgactctctcctggtaatgcaaatattcctgggctctctatgggaaagctgcggccctgtgcctgaccccagggcactgggagagaaagtctttccgggccgcaaggtgtcataggaaaggggtcccaatccaaaccccaagagagggctcttggatctcaggcaagtctgtaaagtgaaagcaagtttttaggaaagtaaaggaataaaagaatggctactccatagacagagcagccccaagggctgctggttgcccatttttatggttatttcttgataatatgctaaagaaggggaggattattcatgcctcacctttttagagcatctggggtaacttcctggtgtcgccatggcatctgtaaactgtcatggtgttactggtagaaggtgtccaggttcttggcatcccaaacaaagaattggacaaaacacaccaacaaagcaaaagcaaggaaggcagaagcagggatttttttttttttttttttttttttgagacggagtcttcctctgtcatccaggctggagtgcaatggtgcaatcttggctcaccgcaacctccgcctcccgggttcaagtgattctcgtgcctcagccttccgagcagctgagattataagcatgcacccccatgcccggctaattttgtatttttttttagtagagtcggggtttctccatgttggttaggctggtctcgaactcccaacctcaggtgaactcccgacctcaggtgatccggctgcctcggcctcccaaagtgctgggattacaggtgtgagccaccgcgccccagccagaggcagggatttattgagaatgaaagcacactccacagtgtgggagtgggctggagcataggggctcaaagtccccattacagaatttttcggagtttaaataccctttacttggggtacgccctatgtaaatggagaggatgaagtaaggttacagtcattgacttggcttccgcccttcctgccataggtgaagtgtgaatcgaccttatattcttggcctccagaccttgttttcctgactcagtgacactgatgggagtgtagcagtgaggacaaccagaggtcactattggggccatcttggttttggtgggttttgactggcttctttttgcaacctgttttatcagcaaggtctttatgacctgcatcttgtgctgacctcctatctcatcctgtgacttagaatgccttaattgtctgggaacacagcccagcaggtcttggccttattttacccagcccctacacaagatggagtcactctggtttaaacatctctgacaaaggcattcagagagaaagtctgtccatgtgaacattgtctcctaagcttgccgggtgctccaatcacggccatgggcaggacgtgtgacagctggtctccccctccaagactcccagactagcaggcaaatctaacattccagaaacccttaaatagttcatgaatgacacctgaaatctgcattctgctgggggaggcagggacatgtcttggccgtggctgggaagcaagatttttaaagctcaggcctgagctggaagaaaagactggaggaagaggggaggggatgggcaggattccaactctcctgggggagttccaggctggggcaacaccggttttactttctgaagcggagggaggtctctgtccatctcctgctgacacccaccccacctgggcctggctgctacccgagggtaattatctgcacccagccatgcaccgcaccgccgttcccactgcccatgactcactcggccccccttgcgttctttgttcttcgcctccttcccccacctccctgcaggcttcacactttgcaggcctaggtcttagtcatctctgggaacggctccaattttcttacaatgataagtaaatggatcattctttagctcggctagaatgtccccatctttattctcagagcaattccttgcacatagccgcatgccctcatcatagggattttgccctggctgccaccttgccctccttctggttccctgtttcattttcgaaggtctttcttctttgagacaaggtctcactctgcccctaggtgaagggcagtgatgcgatcatagtttactgtagcctccaactcctgggcccaatcgatcctccaaccttggcctcctgagtagctgggactgtaggcacccggctaatttttaaaaattattttcagagacagggtcttggccgggtgcggtggctcatgcctgtaatctctgtactttaggaggccgaggtgggtggatcacctgaggtccggagttccagaccagcctggccaaaatggtgaaaccccgtctatattaaaaatacaaaaaaattagccaggcgtagtggtgcacgcttgtagtctcagctactcaggagactgacgcaggagaatcacttgaacccaggaggtggaggttgcagtgagccgaaattatgccattgcactccagcctgggcgacaagaacaaaactccatctcaaaaacaaaacaaacaaacaaacaaaaaaactcaaaagagacaggttcttgctgtgttgcccaggctggtctcgaactcctgacctcaagtgatcctactgcattggcctcccaaaatgctgagatgacagtcgtgagccaccacacctggcctcgttttgaaggtcttgaatcaaataattaccttttccttgaggtatctggaatatatagataacataaccggttaggtcaggggtcgatctttaaccaggcccagggtgcggtgccgggctgtctgcctatggatttgatttctgccatttagtttttacttcttctttctttggaggcagaaattgggcataatatgaggggtggtgtcctcccttactatgattgtgcccctgcactccagcctggtcaacacagcaagaccctgtctcaaaaagaaaagggatctaacatctttttaaatttacttatttattctacctgtagactcttaacactagaatgtcagggatttttgcatgttggttcattcactgatccgttgtattctcagacctggggcttgtcaagcatgcaggcactgaatgaacatctgttaaggaaatgccgagtgagccaagcatggaatttgtaaggctcttgtgtcgtttcgaaccccgagagcaagccaacaaacaacatgagctggtgtggagcaacacgctgttttaatgtgcacctgggtgcagacggctgaggcctaaaatggcgtcagccccaagtgaggacggggcaggggttttatagtctcccgtaaacagcaagtgtcccagtctgacgtaactgctacatggtacccggatggcccgtctcttgatcttcaggggcatgtgtcttccggccagggtagatgtcttccagccagggtacgtgtcttccggccagggcaggtgtcttccggccaaggtagctgtcttccggccagggtagatgtcttccggccagggtagatgtcttccggccagggtaggtgtcttccggccagggtagatgtcttccggccagggtagatgtcttccggccagggtacgtgtcttccggccagggtacatgtcttcctgccagggtaggtgtcttccggccagggtagatgtcttccggccagggtagatgtcttccggccagggtacgtgtcttccggccagggtacatgtcttccggccatctctcttcctgcttctgctatcttgctggcgcatgctgctggggcaagtagccttgcaccttgggactgggcctgagaagggaggagttattcatccccccaagtttatcctcccaagttttcaggccgcggggagaatctttcagaattattctgtcaatattgtttcttcccccttaccctggctctcttctcccaatcctgccctggtccccactctgcagatgagtagacactgtgtcccaccttgtcctgtgggtgcctgatacttgactctgtcagtgcttgtggctgctgtagttttatttattttcgagacagagtctcactctgtcacccaggttggagtgcagtggcgctatctcggctcaccgcaacctctgcctcccaggttcaagcgattcttctgcctcaacctcccgagtagctgggattatctaggcgtgcaccaccatgcccagctattgtatttttagtagagacagggtttcaccatgttggccaggctggtatcaaactcctgacctcaggtgatccccccacctcggcctaccaaagtgctgggattacaggtgcgagccactgtgcctggcttgtagtttaatttttatttatttatttatttatttatttatttatttttggagatgaagtcttgctctgtcacccagtctggagtgcagtggcacaatctcggctcactgcaacccccacctctcaggttcaagcgattcccctgcctcagcctcccaagtagctgggattacaggcgtgcaccatcatgcctggttaatttttgtatttttagtagagatggggtttcgccatgttggccaagctggtcttgaactcctggccttaagtgatctgcctgccttggcctcccaaactgctgggattacaggcgtgagccactgcaccaggccaattaacttctcctaatctgtaactaaggtctgagtcctgaagaccttcctctgagcctcagtaaatttacttaatctagatgggtccaggtgccagggatagttacccttatcttgtctcctgctaaattttagagtctagagagtttcttcagactcccaataaaacttgtttaatcctaaacaggtccattaagaattccttcattatcttgtcatgcttcaaggcccaggaaaggcctgggcaaaactcttggtgtgcttttgttacgttccagcctttgtctaagggcactggcgctatcatctttaaatatttaacttaaccacgcagtcagtgctgaaacagttgttagagaggcctgtgttagtgagacctggcctgtcacagtatctctctgtctctctttccctccctctctctttttcttgcataactgcagtatctctctgtctctgtctctctctctctctgtagcgctccctctgtctctctctttcatttttcttttctttttttttatttttattttttttttgagacggagttttgctcttgttgcccaggctggagtgcaatggtgtgatctcggctcactacaatctccacctcccgggttcaagcaattctcctgcctcagcctcccaaatagctggcattacagtcacacaccaccatacctggctaattttttttttttttttttttttttttttgagatggagtctcgctctgtcgcccaggctggagtgtagtggcgcaatctcggctcactgcaaccgccacctcccaggttcaagtgattctcctgcctcagcctgccgagtagctgggattacaggcgtgcaccaccatgtccagctaatttttgtatttttagtagggacagggtttcaccatgttggtcaggctggtctcgaactcctgacctcttgaactgcccgcctcggcctcccaaagtgctgggattacaggtttgagccaccacgcctggactaatttttgtatttttagtagagacggggtttcgtcatgttggccaggctggtcttgaacgcctgacttcaggtgatccacctgcctcagactcccaaagtgctgggattacaggcgtgaaccaccaggtccggtcttctctctctctttttcttgcataacttcagtatctctctgtggacaacagaaaccagatggcgccagtcctgggttaggtgggaagatattcaccgagcccaggggctggggtgggaaatttggaaaacgtaaggccactttcaaccctttcccagtgtgccttaacttgggaagcccctgggctataggcttctggctccccagtggcaaaaggcactgaggtcaggtggggaaagggaccaggattaagcaaaatgtctgtgctaggcgggagatgctgtctgtgaaaagtgcccgagggactggagcacctgagacgtcctcgctgcgtgtttcttctgccctcgtgtgtctccattgggaactgcagtaacccaagtctaggtttttgttgttttttgagatggagtctctctctgccgcccaggctggagtgcaatggtgtgatcttggctcattgcaacctccacctcctgggttcaagcgattcgcctgcctcaacctgccgagtagctgggattacaggtgcccgccaccacgcctggtgaatttctgtatttttagtagagatggagttttgccatgttggccaggctggtcccaaactgctgacctcaggtaatctgcccgcctcggcctcccaaagtgctgggattacagatgtgagccaccacacccggccttaagtttattattattattattattttagacagcatcttgctctgtcacccaggctggagtacagtggtgcaattatggctcattgtagcctggacctcccggcctctgctgatcctctttcctcagcctcccaggtagttgagactacaggtgtgcaccaccaggcctggctactttttttttcttttttggtagagatgggatctcactatgttgcccaggctggtcttaacctcctgggctcaagcaatctacccacctctgctgggcatggtggctcatgcctgtagagccagcactttaggaaacctttatttcttaacacagagcaagttggagatgtttttgtttggctgacagaatcttaagagatttattggtgcctgaggcatttctcatttcacaggggagggaggggtctaaataaatgcttcagctcaagctggatacagagggagggattttcccaaatttctagcagcccccaggttgtaataacttcccaagtctctggcaattccagccttctgtcaattagcactgtaatcacctgcgtgcctatggcaagagagtttagggaacttgcaaggagagagagctgtagtttcgctttcccatggtttctggttactccaaaaaggccctgaccagaatcatggactctccatggcaaactctcatcttattttatatttatttgtttatttatttatttatttatttttgagatggagttttgttcttgttgcccaggctggagcgcgatggcatgatcttggctcatcacaacctccacctcccgggttcaagcagttttcctgcctcagcctcccgagtagctgggactataagcatgcaccaccatgccctgctaattttgtatttttagtagagacggggtttccccatgttggtcatggctggtctcgaactcccaacctcaggtgatccacctgcctcggcctcccaaactgctgggattacaggcgtgagccactgcacctggcctattttattttttatgtattttattttttgagatggagtctcgctctgttgcccaggctggagtgtagtgacgtgatcttggctcaccgcaacctctgcctcctaggttcaagcgattctcctgcctcagcctcccgagtagctgggactacaggtgtgcaccaccatgtctggctgatttttttgtatttttagtagagacgaggtttcaccatcttggccaggctgctcttgaactcctgacctcgtgatccagccgcctcagcctcccaaagtgctgggattacaggcatgagccattgcgcccaggcttactttatttttttagtttaatttttttttttttgagacaagggtcttgctatgttgcccaggctggagcacagtgtttattcacaagcacaatcattgcacactacagccttgaacttggtctcaagcaatcctcccaacttccaattatcttaaattctgtttttgtctttgtttttgaaatggagtctctctctgtagcccaggctggagtgcagtggtgggatcttggctccctgcaacccccgcctcccgggttcaagtgattctcctgcctcagcctcccaagtaagtgggattataggtgcgcaccacctcgcctggcaaatttttgtatttttagtagagaccgggtttcaccaccttggccaggctggtctgaaactcctgatctcaggtgatccgcctgcctctgcctcccaaagtgctgggattacaggtgtgagccaccgtgccacctggccattcttttttttttttttttgccagagtcctgctctgtcacccaagctggagtgtggtggcaccatctcagctcactgcaatcttcgactcccgggttcaagtgattctcttgcctcagcctccgaagtaactgggattacagatgcccaccaccacacccagttaatttttgtattttagtagagatgcggttttaccatgttggccagtctggtctctaactcccgatctcaaatgatccacctgccttggcctcccaaagttctgggattgcagtcatgagccaccatccccggtcaaattctgtgtttcattcaccagaatagtcaccagaaagcagattttcttcgtctttccaacctgtgtacttacttatagaaatctacagcagggccacatctggaggtctgtttgttcacctgagaaattaaaatttaattctcttggaagaaaagtaacacaaataaatcagaggtttgattattcaaagccattctgcttaatatcatgtcagcttgaggccgggcactgtggctcatggctgcttttgcttttgctttgttggtgtgttttgtccaattctttgtttgggaatccaagaacctaaacaccttctaccagtaacaccatgacagtttacagatgccatggcgacatcaggaagttaccccagatgctctaaaaaggtgaggcatgaataatcctccccttgtttagcatatcatcaagaaataaccataaaaatgggcaaccagcagccctcggggcttctctgtctatggagtagtcattcttttattcctttgctttcctaaaaacttgttttcactttgtggacttgcctgagatccaagagccctctcttgggatttggattggacccctttcctgtaacaccttggggtcaggaaaggctttctctcccagtgccttggggtcaggcacagggccacagcttccccatagagagcccaggaatgtttgcattatcagggataagagatggccttgcttccggtttgaaggctcaccagcatcttggggatggtgttggtggccagacagaaatcaatcagggacaggttggccaggaagaagtacatgggggtgtggaggtgggagtctatgctgatggccaggatgatgagcaggttccccaggactgtaccaggtacatgcagaggaacagagaaaagagaagtgtttcctgctccggcttttctgacagtcccaggaggatgaattgagatgcactggtttggtttcctggttccatgggtgtgattcctctggaagtatggaaaggggaggttataggaatgccagggagatggttttggaaggttagatgaactctaacctttaattttaacctttaactttagagaccctgtctctaaaatataaatattatatatgctataatatatatattatttttcagagacaagatcttgctctgtcacccaggatggagtgcagtggtgcaatcatagctcattgcaaccttgaactcctggactcaagccatcctcctgccacagcctctctagtagcagggtctacagtcacacatcaccatgcctggcctatttatcttcttttttggggggtggagacagggttttgctatcttgtccaggctggccttgaactcctgggctcaagcgatcctcccatctaggacttccgaagctctgcgattgcaggtgtgagccaccacacttggcctgacaacagcttatatataggttgcaccttgaaccatggatgaaatgtttacagcaactcatcttcttctttttttattaattaaaaaattttaggttggacgtggtggctcacggctgtaatcccagcactttgggaggccaaggcgggcggatcatttgaggtcaggagtttgagaccagcctggccaacatggcaaaaccctgtctctactgaaaatacaaaaattagctgggcgtggtggcaggcgcctgtaatttcagctacttgggaggcagagacaggaggattacttgaacccaggaggcagaggttgcactgagctgagatcatgccattgcactccagcctgggcaacaagagtgaaactccatctcaaaaaaataaaaaagtaatataaccattaatattgatgctactgtcaactgttgactctccaaacaaacccagcaagtgcttgtaagccaaaaataaccacccccatccatctgaagggacccctcctcttggccaaaggcattctaaagttaacctgaaaagctgcttcaggactgtgtgtggtggctcatgcctgtaaacccagcactatggtagatgggcgaatcactagaggccaggagttcaagaccagactctccaacatagtgaaatcctgtctctactaaaaatacaaaaacattagctgcgcgtggtggcatacacaggtaatcctagctacctaggaggctgaggcacgtgaattgcttgaacccaggaggcagaggttgcagtgagccaagatcgtgccattgcactccagcctgggcgacaagagtgaaactccgtctcaaagaaaaaaaaatgttaaaagaagtaatttatagagaagaatataatagaggtcagaaactcagatctacgtaaataaaggaaaagcattaaagaagtaataggtaaaagagaaacaagagcttttggctgggtgtggtggctgacacctgtaattccagcacttcagaatttttatcatgaaaggtttttatttcatgagtgtttattgagtgagcacattaccccataatctgggcattgcctcataaaaccaaatttctaaaaatttaggaggctgaggcagaagaatcccttggggccaagagtttgagaccagcctaggaaacctagcgagaccccatctctataaaacattaaaaattttttaaaaattagccaggattgatggcacacacctgtagtcccagttactcaggaggctgaagagggaggattatgtaagcccaggaattggaggctgcagtgggttatgaccagaccactgcactctaccctgggtgacagaatgacaccctgttcaaaaataagaaaggaaaacagaaaaacctatagattaaaaggacttaaaacagtaatcaaccaactgcaatctatggacattatatgaattctgatgtaaaaaactaaaaatatatgaggcaatttgggtaatttgaataataattgggtatttgaaaatgttatataattattattaatattttgaatcaaaataattgctaggcgcagtggctcacatcggtaatcccagcactttgggaggctgaggtgggtggatcgcttgaggtcaggagtccaagactagcctggccaacatggtgaaatcctgtctctactaaaaatacaacttgggagcctccctactcaggaggctgaggcaggagaatcgcttgaacccgggaggcggaggttgcggtgagccaagattgcaccactctactccagcctggatcacagagcgagactccatctcaaaataataataataataatggtattgtggttatgctttcaaaaagagctttttgttttttgaagacataccaaaatcattatacatatggaatttgctctgaaattatctctgggaagagagaggtcaaagtaggtaggacacagattcaacagaggcttgacttggtaggtgtggaagctgagtgattgggcacacaggatttcattatatgaagctgaggcataccaaaaaaaaaaatgccagttttgttgatcaaaaatggtagaatattgacaattgcatatggctcaacctagtattttgctctttacatagctaaaggctttgaaaaactgagccttcatgtatccatcagtttcatgagtgtttactgagtagacacaacccaataatctgggcatgaccttataaaaccaaattcctgaaaattcccagtaatgccaccatggtcccaatactcagtgagaatctggctgcagacttagtcagccaaccactctctccatgtacatccattagggtaggctctagtttctccttttgcagaactgaatgaaagccatgatccctttatagagagttgttctgttgaggttgagtgatgaaagcaggcagccctgggtcttggtgacagatcactgggtggacgtgggaaaatgtttggagtgtttcttagttcttttctttttttttttttttttttttttgagatggagtttcgctcttgttgcccaggctggagtacaatggtgcaatctcggctcaccacaacctctgcctcctgggttcaagcgattcttctgcctcagcctcctgagtagctgggactacaggtgtgcaccaccatgccaactaatttttgtatttttagtagagacagtgtttcaccatgttggccaggattgtctcaatctcttgacctcatgatccacccgcctcagcctcccaaagtgctgggattacaggcgtgagccatcacacccggccatttcttaattctttaagtgatgaggaacattggcttccaataagaatggaaccttctgatataagaagccctgggcattggaaagactgagtttagaagacagggagagtttgttcctggaagagagggtgcagagaaagttaggaatcatgcaacttacccctaagttgcctcatgaagacataaaatgcttcttactgccacgtcccagcccccataggaaacagaactattcagggactagagatgaaattggacaatttgtgtaacaaggagcttggggaattgacttcttattggcccagaaattgtaaatattccctcggttcctacaacttatcccccaccctagcttttcttctttggaccaggaggacaacttcccagtatttctatgtagcatctgctggcccaaacatctaacttcatcatctagtacctgctgggaggacactgagccagtttaactcatgcctgggtgatggtgtcaagaagaggaaagatagcccagtgagtgagctgagagagagagagagagagagagactgaacgaatgttggtaaaattaatgaagccaagctcaatgatctcagatacactggaagattcttttttattatttattgatttactgatttatttattttagagacagaaccttgctctgttattcaggctggagtgcagtggcacaatcacagctcactgcagcttctacctcctgggcttaagcaatcctcctgcctcagcctctagagtagctggaactacaggcatgtgccaccacacccagctgattttttgaacatttttcccccaccgagatggagttttgctcttgttgcccaggctggagtgcaatggcacgatcttggctcactgcaacctctgactcccaggttcgagcaattctcctacctcagcctcccgagtagctgggattacaggcatacaccaccatgccttgtgaattttgtatttttagtagagacaaggtttcaccatgttggtcaggctgatctcgaacacctgacctcaggtgatcacccgcctcagcctccgaaagtactggaattcactgtgctcggccgacactggaagattctgtctggtcaatcagcacccacttgtcagcccagaatccaatggctcttcttaccaaactagctcagcctggtttagttgtgatgctaccagtcctttacctaaaaaccatgattatttgtagcactgtttttcttcgtaactagactttttttttgaaatggagtcttactctgtcacccaggctgcagtgcagtggcatgatcttggctcactgcaacctccatctctcaggttcaagagattctcctgcctcagcctcccaagtagctggaattacagatgcccgccaccacacccagctaatttttgtatttttagtggagctggggtttcaccataatggccacgctggtctccaactcttgacctcaggtgatccacccgcctcagcctcccaaagttctggtattacaagcatgagccactgcgcccagcctggactttcttttccaagcccacttgagtgcctgaaggaacagatggcttcctcctcagtacttctgtaggcagaagtttgtgttattccccatgttgggtcttggaagcccttggagattcccaagtattccaggctgagagatcttagacacagagtgcagaggtccagataggataggactggtgcttccttggagagaggctcatcaagaagcttaagggatgaatcttcgggttcctgatacttaaatttttcccaagagctgtggaagaatgaggagtgacagagtaattcagtgaaagcttaggtgtcagggcaggaggatgtctgagatcagttccttgattccattagtagtttaatcacagagcattcactggcttccttgagatggaaaaatactctgactcggccaggcacggtggctcacacctgtaatcccagcactttggaaggccgaggcgggcggatcacctgtggtcaggagttcaagaccagcctggccagcatggtgaaaccccatctctagtaaacatacaaaaaaattagccaggtgtggtggtgggtgcctgtaatcccagctactcgggaggctgaggccagagaaccatttatatccgggaggcagaggttgcagtgagctgagattgcaccattgcactcctgcctgagcaacaagagcgaaactctgtctcaaaaaaaaaaaaaatactctgactccttttaaaatgttttaattgtatatatttatgaggtacatagtaatgtttccatatatgtaatgtatagtgatcagatctgggtaattagcacatctattatcacaaacatttatcatttctctgtgttgggaacactcaatatcctccttctagctgtttagctatatagcatattattgttaactgtattcatcctacagggatatagaacactagaacttattcttccaatttgcctgtagttctgtatgctgtaacaaatctcttcctatctgccccctccctctacccttcccagactctagtatcctctgttctttttacttctatgaaatcattttttttcttttagctttcacatgtgagtgagaacatgcagtgtttaactttctgttcctggcttatttcatttataatatgctccaattctttccatgttgctgtaaatgacaagatctccttcatttttatggctgaatagttttccattgtgtatttctaccacatttttttttttttttttttgagacagagtttcgctcttgtcaccccggctggagtgcaatggcacaatctcagctcactgcaacctccgcctcctgggttcaagcgattctcctgcctcagcctcccaagtagccaggattacaggggcccaccactacgcccggataattttttgtatttttagtagagacggggtttcaccatgtcggccaggctggtctcgaactcctgacctcaggcaatccgcctgtctcagcctcccaaagtgctgggattacaggtgtgagccactgtgccctgcctaaagccaacacattttccaaaaatccctggctgcctcaacagttttcggagtgctcttacaatcctcaggggtgctgtgtgtggggtgtgattctctattaatccaagctcctcataatctgataaatgctgcctggagttcatctccctcactaaactgtgaattcatgaatccatgcgtgcttcatgaattacagagattaagagtacatgctctagatttagaatgcttgggctaatccagccacctgctctcagttaaaccccatttgattgtattaatcttctgtgcttccatttcttcctgcatgaaatagcactaacattattctgttgtcgtgagtagcaaattagcagagaccttcgatcagtgcctggcaatacaggataaccatcactgattcatgcgtatatggaacaattatgtttatgtcttctgtatcccagacaagatgctggtcacaaaaatgaacaaagacaaacaattcctgatttcaaatgtcttgaggacagggtctgtgtattttcatatatttgtccccacaactcaggccagatcctgtcactatatattgcaattaccaataattttttacaaaatgaatgaacgaatgcgtgagtgaataaaagtgacatctgcaaggtgttcattagaaatcacaaaaataaaaaataaaaatataaaagtaacatgatcagaactgtaatgcaggaagattaatttagtgacttcaggattgtttcttttttttgagatggagtttcgctcttgctgcccaggcaggagtgcagtggcgcaatcggggctcactgcaacctctgcctcagcctcctgagtagctgggtttacaggcatgcgccaccatgcccggctaattttgtatttttagtagagacgggttttctccatgttggtcaggctagacttgaactcccgacctcaggtgatccgcctgcctcggcctcccaaagtgctaggatgacaggcatgagccaccgcgcccggccgacttcaggattgtttcaaaggaagataattggatgcatgaggctagcttaagattagtgaacttggcaactcagaagtaataagagcctttcatttagggtgtctggaaagaggagatgactggaaatgactataaaaataaaaagttcaggacgggcgcggtggctcatgcctgtaatcccagcactttgagaggccaaggcgggcagatcacgaggtcaggagatcaagaccatcctggctaacatggtgaaaccccgtctctactaaaaagtacaaaaaattagccaggcgtggtggtgggcgcctgtagtcccagctactcgggagtctgaggcaggagaatggcgtgaacctgggaggcggagcttgcagtgagccgagatcgtgccaccgcactccagcccgagtgacagagcgagactctgtctcaaaaaaaacaaatagataaaataaaaaatggaaagttcaggctgggagcaatggtttacacccataatcccggcactttgggaggccaagtgtgggcggatcacctgatgtcaggcgttcgagaccagcctggccaacaaggttaaaccccatttctttttttttttttaaatagtatttgcaccacaggtgctattgtttattttaattccaattaatcaagaattgccacacatgctaagaataaagctgttggatgtgaactaaggagcacgttgctattttattttagtgtccagatactcagctgggttaaaccccatttctactaaaaatacaaaagtgagctgggcatggtggcgtgctcctgtaatcccagctacttgggagggtgaggcaggagaattgcttgagcctgggaagcagagattacagtgagccaagatcgtgccactgcactccagcctaggcaacagagcaagaccccgtctcaaaaggaaaaaaaaaaacaaaggaaggaagttcgacttgtagaggatgtaacactcattgatggattgcctttgacggtggaggtagaaaggaggaagactgaaaatttcaaacacaggtatctggaaggatggtgattccattcatggacatagtggctccgggagaaaatagactttatttttttatatgttgagtttgccatgtcaggaagaaagaaaagagggaaagaatgctttgtataaccctattattattgttgttgttattgagatgtagtcttgctctgtcaccaggctggagtaccgtggtgtgatcttggctcactgcaacctctgctccaagggtcaagcaatcttcccacctcagcctcccgagtacttggaactataggtgtccaccatcatgcctggctttttttttttttttttttttttttttggtagagaaggggttttgccatgttgctcaggctgctcttgaacacctgcattcaagctctctgcccacctcgccctcccaaagtgctgtgattacagatgggacccatcgtgcctggccctaacattttttaattaatcaaaaaagaagaagagttgctataaatacttcatccatggtttaaagtgcaacctatatataagctgttgtcaggccaagtgcggtagctcacacctgcaattgtagcactttggaaggcctagatgggaggatcactcaagctcaggaattcaagaccagcctggacaacatagcaagatcctgtctccaccacacacaagaaaagataaataagccaggcttacttatggtgtgtgcctgtagaccccgctactagagaggctgtggcaggaggctggcttgagcccaggagttcaaggttgcaatgaactatgattgcaccactgcactccctcctgggtgacacagcaagaccctgtctctaaaaaataatatctttagcctggcgtggtggctcacgcctgtaatcccagcactttgggaggccgaggtgggcggatcacgaggtcaggagttcgagaccagcctggccaatatggtgaaaccccatttctactaaaagtacaaaaaattagccggacgtggtggtgggcacctgtagtcccagctactcatgaggctgaggcaggagaatcacttgaacccaggaggcagaggttgcagtgagcagagattgcacgactgtactccaacctgggtgacaaagcaagactctgtctcaaaaatatatatatatgtatatatacataatatgtaataatatatataatatttctattttagagacagggtctctaaagttacaacaccgtacatgtgtggaatatatttacatatattctctctctctctctctctatatatatatatatacacacacacatatatattctatatatacacacacacacacacacacacacacacacatatatatatatacacatctggtctcataattagcccaaatgagaactgggatgtgatcgcatctaactttccaaaaccatctccctgtcattcctataacctcccctttccatacttccagaggaatcacacccatggaaccaagaaaccaaaccagtgcatctcaattcatcctcctgggactctcagaaaagccagagcaggagacgcttctcttttccctgttcttctgcatgtacctggtcatggtcgtggggaacctgctcatcatcctggccatcagcatagactcccacctccacacccccatgtacttcttcctggccaacctgtccctggttgatttctgtctggccaccaacaccatccctaagatgctggtgagccttcaaaccgggagcaaggccatctcttatccctgctgcctgatccagatgtacttcttccatttctttggcatcgtggacagcgtcataatcgccatgatggcttatgaccggttcgtggccatctgccacccattgcactacgccaagatcatgagcctacgcctctgtcgcctgctggtcggcgccctctgggcgttttcctgcttcatctcactcactcacatcctcctgatggcccgtctcgttttctgcggcagccatgaggtgcctcactacttctgcgacctcactcccatcctccgactttcgtgcacggacacctctgtgaataggatcttcatcctcattgtggcagggatggtgatagccacgccctttgtctgcatcctggcctcctatgctcgcatccttgtggccatcatgaaggtcccctctgcaggcggcaggaagaaagccttctccacctgcagctcccacctgtctgtggttgctctcttctatgggaccaccattggcgtctatctgtgtccctcctcggtcctcaccactgtgaaggagaaagcttctgcggtgatgtacacagcagtcacccccatgctgaatcccttcatctacagcttgaggaacagagacctgaaaggggctctcaggaagctggtcaacagaaagatcacctcatcttcctgaccaccaggactcaggaacttctggggggtagaatatatacatctgggagtcttgggctaacatctggaattgcatgagttgaagagtaggcactttgaattttattattattattattatttagagatggggtctcactatgttgcccgtgctggagtgcagtggcgtgatcatagatcactgcagcttcaaacttctctctctgtgtgcattgttttactagagacagggtctcactaatttggccaggctggtctggaactcctgggctcaagcagtacttccccctcagcctcctaacatcctaggattacaggtgtgagctaccacgccgagcctcactttgaattttttgtttgtttttgttttttgagacagagtctcgttctgttgcccaggctggagtgcagtggcatgatcacggctcattgcagccttgacctccctggctgaagcaatcctcccacctcagccttccgagtagctaggaccataggcacataccaccatgctcagctaatttttgtatcttttgtacagacagggttttgccatactacccagccgcagaagtttcacgggaagtctcaggatggtctggtaactgtttttctttttgttttcttttttgtttttgagacagagtctcattctgtcacccaggctggagtgcaatggcatgatctctgctcactgcaacctccgcctctgggttcaagtgatcctcctgcctcaccctccagactagctggaactacaggcacccatcaccatacccggctaatttttgtatttttggtggagacagggttttaccatgtgggccaggctgttctcgacctcctgacctcaaatgatccacccaccttggcctcccaaagtgctgggattacaggcgtgagccaccaagcctggctggaaaggccatttgaggacacagcgaaagggggtctatctgccacggaagaaagacttcaccaaaaaccaatcccaacggcacgtcgatcttgggcttctgaccctcagaaccatgagacaatccacttcacttatttagccacgcagtctgcggtgttttgttataaccagccctggccgaataacacagtgactgtgaggggaggagtcttaggaagatgtcaacacgtgaaggagtgaaatgccgccatgtggttctgtggctggaccgactctgtctccaaactccgttaggaaagataatcattctggggctctgttgcccaggctggagtgcagcggcatgattatagctcactgcagtcttgacctcctgggctcaagcagtcctcccacctcagcctcccaagtagttgggaccagaggcatgcagcaccatgcccggctaatttatttttatttgtatatatttttttggtagagatggggtctcactatgttgtccaggctgctctcaaactcctgagctcaagccatcctcccatctcagcctctcaaaatgctgggattacaggtgtgagccaccacacctggccaaaattttttttttttttttttgagacagagtctcactctgttgcccaggctggagtgtagtggcactatctcagctcactgcaacctccacctcctgggttcatgcaattctccgcctcagcctccccagtagctgggactacaggagcgcaccaccacacccagctagtttttttgtatttttagtagagacgggatttcaccatgttggccaggctggtcttgaactcctgacctcaggtgatccacctgccttggcctcccaaaatgttgggattacagacatcagccaccacgcctggcccaatcattgtttttaccccttgtctttatatgagtcactaataaagcagaagtgtcccgggtgctgtggcttacacctgtaatcccagcactttgggaggccaaggcaggcagatcacctgaggtcaggagttcaagaccagcctggccaacatggcaaaaccccatctctactaaaaatataaaaattagtcaggtgtggtggggcgtgcctgtaatcccagctactcgggaggctgaggcaggagaatcacttgaacctgggaggcggaggttgcagtgggccgagatggcaccactgcaacctgcacttcagcctaagggatggagcgagactgtctcaaaataaataaataaataaataaataagttgaagtgtctcaagttgatataatgtggatgtttctctcctccagatcttatgttgaaatgtgatccccagtgtcggaggtgaggcctaggcagaggtgtttgattatgggggcagattcatcatgaagaatttagtgccctccccatagtaatgaggaagttcttgctctactacttcacaaagaccctggcactcctcccctctctctcttcctctctcaccatttgacttgccagctccccttgcccttccaccgtgattggaagcttcctgaggtctgcaccagaagtagatgatggcaccacccttcttgtacagtctgcagaactgtgagacaaataaacctcttttctttataaattacccagactctaggctgggctcagtggctcacgcctataatcccagcactttgggaggctgaggcaggcagatcacctgaggtcaggagctcaaaagcagtctggccaacatggtgaaaccctgtctctaccaaaaatacaaaaattagctgggcgtggtggcgcactcctgtaatcccagcttctggagaggctgaggcaggagaatcacttgaacccagggggcagaggttgcagtgagctgagactgcaccactgcactcctgcctgggcgacaagagcgacactctgtctcaaaataaataaataaataaataacccagactcaggtattccttgtagcaacacaaacactgatatagaagtcttcctaaatacgtaaataaatatgataatgctaacttaaaaaaatttttttttgagaaggagtttcactgtgtcacccaggctggagtgcaatggcgccatcttggctcattgcaacctccacctccccggttcaagtgattctcctgcctcagcctcccgagtagctgggattacaggtgtgtgccaccacgcccagctacttttttgtatttttagtacagacagcatttcaccatgttgcccaggctggtctcgcactcctgacctcaggtgatccacccgcctcggcctcccaaagtgctgggattgcaggtgtgagccactgcgcctggccgataatgctaactttataggggagcaaatagagcttggaacagtgaaataaagtgtcaacaattatacggttatttacaaagcacaggtgggattcaaagccagttggtctgattccaaattctcacccttaaccatgatgatcttctcttgtatttgaagaccttaatcaggttttccggatcattcattatgaatttctcttttgtatatttcacagcttaaagtccgaagtagctggcatgttagtggaatgatgacactctagaaatgggtttctgagaggtgagatccacagggagaaaaggccggtgcagtggctcatgcctgtaatcctggcactttggaagctgaggcgagtggactgcacgagctcaggagtttgagactaccctgtgcaacatagtgaaaccccctctctacaaaaaatacaaaaattagccagatgtggtggtgtgaacctgtagtctcagctactccagaggctgaggtgagaggatgcgtcacctgagcctggggtggttgaggctgcagtgagccatgatcacaccactgcactctagcctgggcaacagagtgagatcctgctaaaaaaaaacaaaacaaaaaaacaacaacaaaaaaaaaacacacacacacataaattgcctagtaggaaactctcatccttgtttattttatttatttatttatttatttattttgagacaaagtcttgctctgtcgccaggctggagtgcagtggcaagatctcagctcactgcaacctccgcttcccaggttcaagcgattctcctgcctcagcctccggagtagctgggactacaggtatgtgccaccatgcccggctaatttttgtatttttaatagagacagggtttcaccatgttggccaggctggtcttgagctcctgacctcaggtgatccgcctgcctcagcctcccaaagtgctgggatttcaggcatgagccacagcgcccggcctcatcttccttctgtactggattcaacacctctttctctacatacctttaaaggtgtcctcactttagcaaacaatatcagaaagattaatactacatttcagcttaaaaataaaattaattcataaggatgtgtgtatttttaaaaattttacattcctgcataagaatatgtggtattactttctcttgcattcaaattgtctctttcattctgagaatgccaccagatgatgaaaagcatgacaacttttttttttttagatggagtcttgctgtgttgcccaggctggagtgcagtggtatgatcttagctcattgcaaacctccgtctcccgggttcaaacgattcttctgcctcagcctcccagcctgggtgagagtaagacccttctcaaaaaaaaataaaaaaggaaacaacaatcagggcacaaaattcgttcatgaagtttcaacttttacaatgtcaaaaagaataaaatttgattaataaattgtctagggctataaacaacatgcatattaaaaggacagatttgtagggcaaaaatgtacaagactgtcaatcaaatactaattaataaaaaaatcactaatcaaatacagcatcaataaaattcctgtctccatggttacattacttcttccttttctttgtgtttcctccacttctgtctttttttttcttttttttttttttttgtttgagactgaatctcactctgttgcccaggctggagtgcaatggtgcaatcatagctcactgcagtctccaactcctgggctcaagcgatcctcccatttcagcctctcaagtaattgggactacaggtacacaccactgtgccaagctaatttttaaaattttttgtaacagggtctgattttgttgcccagctgggttcaaactcctggcctcaagcaattctcttgcctcagcctcccaacgtgttggaattacaaggatgaaccactgcgcctggcctccacctctgcctatcttataagaaaacatgtggttacatttagagcctgcccaggtaatccagggtaagctgcttctctgcaaagacccttttcccaaataagtcacattcacccttttgtcatatgatttaaggccaggtgcggtggctcacgtctgtaatcccagcattttgggaggctgaggcaattgtatcacttgagtccagaagttcaagaccagcctggccaacatggcaaaaacccatctctactaaaaatataaaaattagcaggctgtggtggcaggcacctgtaatcccagctactcaggaggcagaggaaggaggatctcttgaacccgggaagcggaggttgcagtgagccgagatcacgccactgcactccagcctgggcgacagggcaagactccagctcagatagatagataaataaataaataaataaataaataaataaataaataaaagctcagattcacaagcgagaggattaaaatgtggatatagtcttctgagggccatgagccaactcatgacagaaatgtcttctggttgactccatgaaagttatctattatcaatggacccagggaagggttctccattttctgtctctgggaatcaggtctagatatgtctcttgcattgactgcaactacctgttgcagtcagaggaaaaccagtgctggggggagggaacctcgtgaaggactgaatgaagccctctcctattcgtgcacattccttaattctgaggtccttgtaatgaaagagaactgtctttactgtttgagcatattagagttaggggtgctatttatttatttatttatttatttattttttgagtcttgctctgtctcccaggctggagtgcagtggtgcaatctcggctcactgcaacctccgcctcgcgggctcaagcaattctcctgcctcagcctcccgagtagctgggattacaggctccagctaccacacatggctaacttttgtatttttagtagagatggggtttcaccacgtgggccaggccagttttgaactcctgacctcaagtgatccacccaccttggcctcccaaagtgctgggattacaggtgtgagccactgtgcccagcccagggctcctattctttaaactggaacctaaggtatcctcacttatgaagttcaaatatctcacaataatctcaaatcactaagataatctaatcatgctaattttttgatgataaaactgagtataatagatgctaatgttgtctagggagaatatagtttaccagtgactggtcccagtagttactaaattgggtatgaaaacttagctcccttgacccactgtaggtctacactggggtgcaattgacaagaccctaaatacgcaataaggtggaagcttgtctccagatataacaacaacctcgcttaaatccttttcctggcagcgcacagtgacttcaccactaatctcagatctttgggaggccatggcaggaggatcacttgaacctaggttttgagaccaacctgggcaacatagccagagtccatctctacaccacaccccacactggacgtggtggtgcatgcctggagtcctagcttcctaggaggctgaggtaggagggtccctggagtttgagccctggagtcctggagtttggggctgcagggagctatgatcatgtcattgcattccagcctaggtgacaaagcaagaccctgtctatggaaaaaaagaaacaaaaaacaaaactgcccagctacttgggagcctgaggtaggagaatcgcttgaacccagaaggcggaggttgcagttagccgagattgcgccattgcactccagcctggtggacagagcaagactccgtctcagcaaaacaaaaaacaaaaaacctaaactaaacaaaaaaccaaaaatacattttcctgacctatcctcctgaactatctaccttccacaacttttcttcttctgagactaatccattaaaaaaaaatcacttagccaggagcggtggctcacgcctctaatcccagtaatcccagaactttgggaggccgaggcgaatggatcacaaggtcaggagatcgagaccaccctggccagcatgatgaaacctcacctctactaaaagtacaaaaattagccgggtgtggtgtcgtgcacctgtagtcccagctactcagtaggctgaggcgggagaatcgcttgaacctgggaggcagagattacagtgagccgagatcacaccactgcactccagcctggccgacagagcgagactctgtctctaaataaataaataaataacttgggctcagcctctgagtctatggcctgagcaaagaaattgagtctagagaattaaaatcacatgtccatcatcacagatccagacataaaaagcaaagtcagatttcaagccggagtggaaatgtagttggcttttatgtcatctagacattttagaagaacttggtgatgaaagagtcaggcaggctgggcgcattgtctcacgcctgtaatcccagcactttgggaggccgaggcgggtggatcacctgacgtcaggagtttgagaccagcctggccaacatggtgaaactctatctctactaaaaatacaaaaattagccaggcatggtggcaggcgcctgtaatccccactactcaggaggctgaggcaggaggatggcttgaacccggaggcggaagttgcagtgagccgaggtcgtgccattgcactccagcctgggagacagagaaagactccatctcagagaaaaaaacaaaacaaaacaaagagtcaggcattctagctcaccaggaatcctgtcactttgacttactctagaaacctgaatccaaagcaaatggcacaccacagaagagaaggtatcctccctatgaacttcctcaaggttcctttcatgtccttattcctcagactatagataaaggggttcaccatttgagggaacacagaatacatcactgaagccactgcagtcttcctaggtgagtcagtaaccacagaactaatgtacacccccaaacctgccccatagaacaagagaacaatggagaggtgagacccacaggtggaaactgctttgtgctttccacttgctgatggcattctcaaaacacaggaggtgatctgagtgtaagacaaaatgattccagacagaggaacaccaccaaatatgcaagctgcaaaatatatcaggatgttattgatgagggtgtctgaacaggtgagttggatgacctgagccagttcacagaagaagagcgggatttccaggtctgtgcagaaggacagcctcaacaccatcaggctgagaagaagggcattcacaacactagtcaacagagagagaagaatcagcaggccacagaggcgggggttcatgatgactgtgtatctaagggggtgacaaatggccacatagcggtcataggccattgctgcaaggagacaattttccaagccagcaaaaaacaagacaaagcagatctgggtgaggcagcctgagtacgtgatgctccgattctgagcttggatgttcaccagcatctttgggatcgtggttgtgcttaaacaaatgtccaaaaaggagagattggagaggaagaagtacatgggggtgtggaggtgagagtcagagatgacagccaagaggatgagcaggttccccaggatggtgaccaagtacatggacaggaacaggctgaaaaggacgggctgcagttccggatcctctatcagtcccaggagaaggaattttgaaatagctgtttggtttctcgcttccatgctgttgatgatgaatctgatggaaaagataataaaatctgtaagcagcagctgcatcggcatcactcgagaacatgacagaaacgcaaaatcttgctcccctccccagacttcttgctgataaactctggggatgagaaccgacagtttattctttcacaagccttgtagatgtttttgatagatgctgaattttgagaaacagttcaaaacatttacttaggaatggagttttcttaatcaaaaaatgtggaaatctttttttttttttttttttttttgagacagggtctcactctgtccaccaggctggaatgcagtggtgtaatcttagcttattgcaagctccacctccatgttcaagtgattctctggcctcagcctcccaagtagctgtggttacaggtgcacaccaccattcctggctaattttgtgtgtgtgtgtgtgtgtttttagtagagacggcgggggtgggggtctcaccatgttggtcaggctgatctcgaactcctgacctcaagtgatccacctgcctcagcctcccaaagtgctgggattacaggcttgagccaccatgcctggcccaggagtggagttttcttaatcaaaaaatgtggaaatgttttttttttttttttttcgggagatagggtctcactctgtcgcccaggctggagtgcagtggtgtgatcttagctcactgcaagctccacctcccaggttcaagtgagtctccttcctcagcctctcaagtagctagggttacaggtgcacagcaccatatttggctaattaaaaaaaaattttttttttcgtatgtttagtagagacagggtctcaccatgtaggtcaggctggtctcgaactcctgacttcaagtgatccgcctgcctcaggctcccgaagtcctgggattacaggtgtgagccatcacgctcggccaaagaatgtggaaatcttttatctttattctttctgctgttcccttacccatggcagacacttctagtctagtctagtgctctttcctgctaagaccacatgtacctttgggattcttatcagcatagagctccaaacagcgctagagatagacagaaagtcagagttagcatgctaaatattacctatttgtcatctttcacatgtgattttctaagacaatcatccaattttcaatgttacccaaaacaaatgaatatagaaacatactgcaacattgctaacattttgtcagtttgtgtcattcttaaacttttaaaaatgataaaacttgacatttaaaaaattttaaaattcttggtggggcgtggtggctcatgcttgtaatcccagcactttgggaggccgaggcgggcagatcacggggtcaggcaatcgagaccatcctggctaacacggtgaaaccccatgtctactaaaaatacaaaaaattatcggggcgtggtggtgggcgcctgtggtcccagctactcgggaggctgaggcaggagaatggcgtgaacccaggaggcagagcttgcagtgagccgagatcgcgccactgcactccagcctgggcaacagagcgagactccatctcaaaaaacaaacaaacaaatttttaaattctctagtgtgcactgtgaacccaagtgaatattcaaatccttccccttgcttactttcttcctacatttcttttctctctcctcctgttccctccattttcttttctttttttctttttctttttctttttttcgagatggagtcttgctctgtcacccaggttagaatacagtggcgcgatctcggctccctgcaacctccgcctcccgggttcaagctattttcctgcctcgtcctccaaagtagctgggattacaggcgccagccaccgcacccggctaatttttgtatttttagtagagacgggtttcactatcttagccagactggtctggaactcctgaccttgtgatccacctgcctcggcctcccaaagtgctgggattacaggtgtgagccactgcgcctggcctctccattttctttattgaaacaaattattataagacactaactcaatttcatttcttcttctacgtgctgagaataaaacaaggtataaaacatgattatccacatcaaaaaacttatccaccactatcaaatagactttaatccctctgatgcaagattggttcaacatacagaaatcaataaatgtgattcatcacataaaaagaactaaacccaaaaaccacattattatctcaatagatgcaaaaaaggcttttaataaaattcaacattgctttatgttaaaaaccctcaacaggctgtgcgtggtggttcacgcctgtaatcccagcactttgggaggctaaggcaggcggatcatgaggtcaggagttcgagaccagcctagccaacatggtgaaaccccatgtctattaaaattacaaatattagccaggcatggtggcatgcacctgcaatcccagctacttgggaggctgaggcaggagaatctcttgaacccaggaaatggaggttgcagtgtgccaagattgtgccattgcactccagcctgggtgacagagtgacactctgtcttaaaaaaaaaaaaagtttagcttgttttttaacaactgatgtatgattcacaaaaaaaagagagaagggaagagaaagagagagaaaaagaaaaggagaaagaaaggaagaaaggaagaaaatttttgtatgataaacagtgtacagtgtgagaaaaattctaaacgtttttgaacctgcacagatatattcatttttattatagattattcatgtgtgaattattcagaaagtacggagaataatgaagggctggctacccatcagtcaacgatataagattcacacaaggccaggcgtggtggctcaagcctataatcccagcactttgggaggctgaggcaggtggatcacctgagatcaagagtttgagatcagcctggccaatatggcgaaaccccgtctttactacaaatacaaaaaaattagctgggtgtggtggtgtggtgcacgcctgtaaccccagctacttgggaggctgaggcaggagaatcgcttgcacctgagaggcagaggttgcagtaagccgagatcgtgccactgcactccagcctgggtgacagagggagactgtgtctcaaaaaaaaaaaaaaaaattcacacaattcaccatccttgattagatatttttattgcaaaaagtaaaaaatatttttattgcaataaagtgtgtatttgaggctgggcatggtggctcatgcctgtaatcccagcattttgggaggctgaggcaggtggatcatctgaggtcaggagttcaagaccagctgaccaatatggtgaaactccgtctctacaggagaatcgcttgaacctgggaggcggaggttgcagtgagccgagatcatgccactgcactccagcctgggtgacagagcaagattccatctcaaaaaaaaaaaaaaaaaagtgcatatttcaaaaccaccgcttcatgtttttgattttttttcccttccctaggggaaccagtacacacacttgatctatattattcttctatacctttcattatatttgatattattcttccaaataataacaatggcattgtgttgcattttaaaagctttatatagccaggcactgtggctcacatctataatccgggtcctttgggaggctgaggcgggagtacaagaggccaggagtgtaagaccagcctgggcaacgtagtgagaacctgtgtctacaaaaaaaatttaaaaatttgcaaagtgtaatggcatgcacctgtagtcccagttactcagtaggctgaggctgaaggattggttgatccaggaattcaagactgcagtgagctatgatcgagtcaccacactccttccaggcaacagagtgagaccttgtctctaaaaaaaccccaaaaaacaaaaccacctgccctcatttccaaagcattaattaactaaaggactttgggttaactgattggcttcaacaaaaatgatgctcaacaactcacatggatattgcagaggatgatctatcctcaggaagtgcagacagactcgagtcctggtcaaaaatatcatgtctggaaggaggttctgatgcagcttccgagctgggtaagagatgttcagtgaggtgcttacagcctgacttgttgcactgtctatatccctgggacctcaatatccaacgctcctcattacactggctattttaccatcgttctgatcccaggagtgcacatccttaaagaccaagactagaggagtgaggaattcgggatggctgagtccctgtcccctgaggccacgtgtacaccatccatatctctccattgtttctgctcacctccacttcacgaatcttgctcccagaacacataccattcgtctagtaaaaaaaaggattttgatctgaagaatgtgagttctcttcattgtcagacccggaaagacattaaaatgagacagaaaccacacccctcctcccctcctttgaactatgcattcatctcataaaactgcttgctgttgccacaagtagctataaattaacctaataatagcatatgaattaaaaagaaattatttaggcagttagtgagggtacagaagtcctgggtaaggtttttctttttaataaaaagcagcccccaaatcatttcttttcaggcaaaaagtagcctgaaaaatcaagctgcaagcataggtaagcaagctgaaagcctgcgtaggtgaatgccagcagctgtgccagaagacaggtataaccaacatgaaggttttcttttttcttctttctttctttcttattcttttttttttttttttttttttttttttgagacagtctcactctatcacccaggccggaatgcagtggcgccatctcagctcactgcaacctctgcctctgggttcaagtgattcttgtgcctcagcctccagagtagctgggattacaggcgagtgccaccacacctggctaatttttgtatttttagtagagatgagatttgatgctgggcgtggtggcttatgcatgtaatcccagcactttgggaggctgaggtgggtggataacctgaggtcaggagtttgagaccagcctggccaatatggtgaaaccttgtctgtactaaaaatacaaaaattagccaggcgtggtgacaggcacctgtagtcccagctactcgggaggctgaggcaggagaatcgcttgaacccaggaggtggaggttgcagtgagctgagatcgtgtccctacactccagcctgggtgacagagcaagactccatctcaaaaaaaaaaacaaaaacaaaaacaaaaaacccttaacctgtaagccatctgcaagtttgggtcttacatgtaaactagctgggcacagtggctcacgcctgtaatcccagcactttgggaggctgaggcaggcggatcacgaggtcaagagttcaagaccacaatgaccaacatggtgaaactccgtctctactaaaaatacaaaaattagccagccgaggtggcgcacacctgtaatcccagctattcaggaggctgagacaggagaatcgcttgaacccagaaggcagaggttgcagtgagctcagattgtgccactacactccagcctgggcgacagagcaagactccatcttaaaaaaaaaaaatgtgtaagctgccccaattttccttgcttcgttacctgtcttttaaggttcttcaatctctgaccacacaggtagtatctggcaagcaacagtattcaacctgagatttcaagatgttatgtccattatgccagtaataataatctgtgttcccccagttgatctgtcaatctaaaataatcaaaagggtcagaatctagtttgttttattatttttagagacaggatctggctctgttgccccggctggagtgcagtggtgcaatcatagctcactgcagcctcaacttcttgagcccaagcgatcctcccacttcagcctcccatgtagctgggactacagatgtgcaccaacacgtctgagtaattttttattttttttttcagagagatgggggtctctctatgttgcccaagctggctttgaactcctgggctcaagcgattttcccacctcggcctctcaaagtgctggtattacaagagccaccacacccagccagaatctagtctaaagacagtttattcaagcacgatgtctgagacaagtcaccagggaagcacagcttccaaagaagggaagtgagtgtttcaaggtgcaaaagtttgagattgtttatgtaggcaaaattcagggaagtttaacagaatttcttttttctattttttttttttttttttttgagacacagtcttgctctgttgcccagggctggagtgcagtggtgtgatctcagctcactgcagcctccgccttccaggttcaagtgattctcgtgcctcagcctcctgagtagctgggattacaggcacctgccaccacgtccggctaatttttgtatttttagtagagatggggttttgccatgttggtcaggctggtctcaaactcctgacctcaagtgatccacctgcctctgcctcctaaagccctgggattacaggtgtgaactactgcatgaagcccagtttaacagaatttcaacatctttaaggcttaatgcatagttacaatatttggtattattcttctaaacagtaacaattgcattgtgttgcattttaatgcaactgattagtctgggtggttttttcttttagggaaggtgtatttaacattttacaatgatgacataacagtcgtggggtcctgtgtaccatctggtctgagttaggtacaggacagtaaaggaggcagttaatctataacaaaggtcagtgactggaagcagggagatctggtctctggtctctcccagtgctttatagaacaagaaccacaaagaagagccattatggaaaacagtatagaggttcctcagaaaactaaaaatggaattacgatgtgatccactaatcccaccatggagaatgtctccaaatgactgaaactaggattcacgacagaaaaatcaactggacacagaacaaggcagtaatcgaggaaacagaaaactgaaacgtataaaacacatagaacacagcaatggcagaattaagtctctcctaatcagcaatcatgttaaaaaataaaaggattggccgggtgcggttgctcacacctgcaatcccagcactttgggagattgaagtgggtgaatcataaggtcaggagatcgagaccaatctggctaacatgatgaaaccccgtctctactaaaaatacaaaaattagccaggcgtggtggcatgcacctgtaatcccagctactcgggaagctgaggcaggagaattgcttgaaccctggaggccgaggttgcagtgagctgagatcacaccactgcactccagcctgggtgatagaatgagactaaaaaaaaaaaaaaaaagataaaggattaaactatccaaacaaaaggcagtatttgtcagcataaatactaaaaattgattcaactatatttagaagagacttgttttagactcgagacaaaacagggtaacagtaagagtatggatagacagatgtatttcatgcaaatagtatgcagatgacagctgcggaggctgcactaatatcagaagacagaataaagtcaaaaccattaaatcagtcaaaggaggacatatatatacatatactcttcctgcttttttgtggttatgaaataagcgatgtcactaccttgctaacttttcttttctcctgtcttatttcacactcaatatcttcttctctaactaaagtacttctccatggtagaactgtccttgtaaagaaacattcgaaaggttttcatgacagccccaaggcagcagtgagtcctctaacacggcaatgatagaattacttttattcaatgatgattctttttctttctttctttctttctttctttctttctttctttctttcttcctttctttccttctttctttccttctttctttcttcctttctttctttccttttctttctttctctctctctttctttctttcttgtctttttttttttttaatttattttttgagacggagtctcgctctgttgccaggttggagtgcagtggcactatcttggctcaccacaacctcagcttcccgagcagctgggaccacaaggtgcccgctaccatgcccagctaatttttaaatttttagtagagatggggtttcaccatgttggccaggctgatctcgatctcctgacctcaggtgatccccctgccttggcctctcaaagtgctgggattacaggcgtgagtcaccgtgcccagccaagtaagatttttcttttggtctccaaaggagatgggttagaatcatagcaagggaagatgactgagggggaaagcgagaacttagataacattcttacaaataaatcaatgggactgttctaaaccaagtaagatgtcaaaaaaagatgatcaacctttgtccttcctacctaataattatttattttattctacaattcaggtttaataagtggatgataaatgcaacaaggggaacaattctaatttctaaaacaagagggaaaaatatgtgagaacaatagcattataggatttatgattatagactggttatggaacacaatgattccacattattatactgaatacttaggaggtgctgggcattgaattaagtgtttgtagtgcttatcagagtggagttcccagccgggtgtggtggctcacgcctgtaatcccagcactttgggaagcagaggtgggcagatcacctgtggccaggagttcgagaccagcttggccaacttggggaaaccccatctctactaaaaaaaaaaaaaagaacaaaaattagctgggcatggtggcgcatgcctgtaatcccagctactcaggaggctgaagcaggagaatctcttgaaccagggaggcggaagttgcagtgagcctagattgcacctttgcactcctgcccaggtgacaggctccatctcaaaaacaaacaaaaaaacaaacaaccaaaaaaaccaccaaaaaacaccagagtggacttcccaataggaattatactttatatggtcagtctaaggctctcatactaatcatttccccctcaccaggaattagattaagaaaaaatatatgatctatctctctgtggtgagattaaaggtgatatcttttggattactctatgcaatcccatttatcaatagatctgggaagaagagtcagatttctgtctctgggcatcatgtctgggtattacgtctgtatttgctacagccatctgggtccatgaggggaaccagccctaaaagaaagccacagccgggcacggtggctcacgcctgtaatcccagcactttaggaggctgaggtgggcaaatcacttgaggtccggagttcaagagcaccctggccaacacggtgaaaccccatctctactgaaaatgcaaaacttagccaggtgtggtggtgtgcacctgtaatcccagctacttgggaggctgaggcaggagaatcacttgaacccaggaggcagaggttgcagtgagctgagattgtgccactgcacttcagcctgggtgacagagccaggctgtctaaaaaaaaaagaaagccaaaagaagaaggagtaagtgaattattctctacattccctacctctgatatatttgcaaagaaatgtagctctctttattatttgagtatattataatcaacatttctttcactaaagccgacttcttcactgatcaagatagaatatctcaccactaggccgggcacagtggctcacacctgtaatcctagcacttttgggaggctgaggtgggcggatccaaaggtcaggagtttgagactagcctcgctaatacggcaaaaccccatctctactaaaaatacaaagattagccaggtgtggtggcagctgtctgtagtcccagctactgaggaggctgaggcaggagaatagcttgaatctgggaggtggagtttgcagtgagctaagattgcaccgctgcactccagcctgggtgacaagagcgagactctgtctctcaaaaaaaaaaaaaaaaaaagaaagaaagaaagaaagaaaatctcaccactgaaataatctaatgatagcaattttattgatgataaaactgagggtagtaagtagacgttgatgttgacctgcacagacagtttagcagtgaccgggctctaaaattacagaattctggtatcaacaatcagctcccattttgcacaataggtttcactctggcatgcatttcatatggccctaaatattcaatcaggcagtatcaattctgtgttgcgaacacagccttctttggattcttgccctgacctgtgagacgcctcctgcttttcttcctctgagaatatttaccaaccaaatcactgtaacacttgccacaggttaactttttaaacaccgcatgcaaagaaactgagctttgagaatagaattcatttttgacacatgacagagctccaaaagaggcaagatttcaacaacaacaacaaaaaacacacacacacatccatgatgcagactagtcactttaagaaaatcttgaaaggtcgggcgcggtgactcacgcctgtaatcccagcactttgggaggccaaggtgggcagatcactaggtcaggagattgagaccatcctggccaacacggtgaaaccccatctctactaaaaaaatacaaaaaattagcctggcatggtggcgggcgcctgtagtcccagctactcaggaggctgaggcaggggaatggcgtgaacccaggaggcggaggttgcagtgagcggagatcgtgccactgcactccagcctgggtgacagagcgagactctgtcacaaaaaaaaaaaaaaagaaagaaagaaaaagaaaatcttcatgatgcaagagtcaggcactctggcttaccaaggaatcctgtcatgttgattccttttagaagcttcagttcaaagcagagcacaaagatcacaaaaaagaaagtaggtcaggcatagtggctcatgcctgtaatcccagcactttgggaggccgaggtgggtggattacctgaagtcaggagttcgagaccaccctggccaacctggtgaaaccccatctctactaaaaatacaaaaaaaatccaggtgtggtggtgtgtgcctgtaatcccagctactcgggaggccgaggcaggagaattgcatgaacccgggaggcggagtttgcagtgagccgagatcgtgccactgtactccagcctgggcgacagagcgagattctgcctcgaaaaaaaaaaaaaaaagtaaatctcgatgcaagagtcaggcactctggcttaccaaggaatcctgttatgatgatttattttagaagctccaattcaaagcagaggacaaagatcgctaaaaaggaaacagcctaccaataagtttcctcaaagctttcttcatctccttatttctcaggctgtagatgaaggggttcatcatttgagggaccacagtgtacatcactgaagccacagcagtaattcgggaagactcagcaacagcagaactaatgtacaccccaaaagctgtcccatagaacaaggaaaaaacagagaggtgacagccacaggtggaaaacgctttatactttcctcttgctgatggcattctcagaacagaggtgactatttgagaataagagaaaattattccagagagaggaattgcaccaaatacactacttgcaaaatatatgaggatgttgttgatgagggtgtcagaacaggcgagcttgatgacctgaacgacttcacagaagaacaaagggatttcaacgtttttgcagaaggacagctgcaataccatcagactctgaaccagggcatccatagtgctcatgaacatggagagaagaatcagcaagccccagaaatggacattcatgaggactgtgtacctcagtgggtggcaaatggccacatagcggtcgtaggccatgactgcaagaaagcaactttccaagccagcaaaaaccaagacaagacagatctgggtgaggcagcctgtgtaagtgatactctgattctgagcttggatgttcactaggatctttgggactgtggttgtggttaaacagatgtcagtaaaggagagattaaagagaaggaagtacatgggggtgtggaggtgggagtcagagatgacagccaggagaatgagcaggttccccaggatggtgaccaggtacatggacaggaacaggctgaaagggattaacttcagttctgggtcctctgtcactttcatgagaagaaattctgaaacagctgtttggtttctgggtcccatgtttttgatgatcaaaaaatgggataattagacaatcaaatgtgttttctagactgcgggagcaacgtcaacagaggcaaacaccatcttgaaaaggggtagattctaagggaagaaaataaataagtgttgccttttgtattgatattactttactgcttttacaaaacttgaagctaatacagcacagcatcaataattgttaattctggaaatggttaaggggtcatcattttttatttttatttatttattttttaaatttatttatttatttttgagacagagtcttgctctgtggccaggctggagtgcagtggcttgatcctggctcactgcaacctctgcctcctggtttcaagcaattctcctgcctgagcctcccaagtagctgggattaaagatgcttgccacaacacctggctaatttttgtatttttagtagagacggggttttgccatgttggccaggctgctctcaaatgcctggcctcaagtgatctgcccaacttggcttcccaaaatgctgggtttacaggcgtgagccaccacgcccagcctcatctttttttttttgagatggagtttcgctcttgttgcccaggctggagtgcagtggcacaaacttggttcactgcaacctccgcctcccaggttcaagcgattctccttcctcagcctcctgagtagctgggattacaggcatgtgccaccactctgctgttctgattattaaaaatatttggtaatgaaaaaacaaaaaataaataaaataaaacaaagtacataccaggaaaacggctggaagactctgtctggacccccagagacttcacgccagccaacagaaataatacaaagctgtgtcaagaaccaggaaaggagaatcgcttgaacccagggggcggaggttgcagtgagctgagatcatgccattatactccagcctgggcaacggagcaaaactccattaaaaaaaaaaaaaacaccacaggaaagtgaagataaggtgaagtttagcaagctgctcacctcctctcccccacaagactgcaagtaaattacagagaattttataacagtcatcctgttttcaaagaaaatggtaactacagaattcaggatagtgtatttgttgctggaagaaaacaaggtgatttgagtagaaaatcctacaggtaggttctatggtgatgacattaacttatttttaatgccagataggtatatgcggttttatcatgttactattctctcagaattacagatagatttttttttttttcctgagacagtgtctcgttctgtcgcccaggttggagtgcagtggcacgatctcggctcacagcaagctccgcctcccaggttcacgccattctcctgcctcagcctcctgagtagctgggactacagacgcccgccaccacggccggctaattttttgtatttttagtagagacgggtatcactgcgttagccaggatggtctccatatcctgaccttgtgatctgcccacctccgcctcccaaagtgctgggattacaggcgtgagccactgtgctctacactacctacagatagatagattttatgcattactttgtatatgataatgtaacaagtatgattaaagaaagacccttcatattctaaccctaaatatgttttctcatgttctcctaatattaaagttaggagtgtcaggcttcagaggttatcagcatctctccaagtgcttattaaaaattctcatacctcacacatttctcagagatttaacaccagtagttctcgggcaaggccaagaaccttctctatgaggaaaggtctcgggtggttcctctctgtgtctgttctgtggacaccaacagaggaatctcagtcctaggagactctatgagtgctagaataggagctgcgttccagatatgtaagagctttttgttttgttttgggggttttttagagacaggatcttgccatgttgcccaggctggtctcaaactcctggcctcaagcaatcctcacgcttcagcctcccaagtagctgggactacagccacgagccaccatgcctggcttcccagatattttggtgaaaataaagccagctcctcaagctccaaagacagctgcaacagaagactctccacccactcctttgattctcttttgacacctccattgtttgctcctcacacttagagagataattctgactgatgatcctgcgtgtgtgtgtgtgtgtgtgtgtgtgtgtgcttatagaaaaaaattatgccccaaaatcttgccaacttccattttctcctgtcttgtcttacactcgacatctccttctcaaatgaaagtatttctctacagagtaatcttcctagtgaagacacagtaaacagttttgcacgggagcactgagactacagctaatcctaaaattatacaattagaatatatttgtgtaatatacatataattatacatatagaggattatatatatatgtatatctccaggtgtggtggcactcactcatttgtagttccagctactcagggtcgctgaggcccaggagttcaaggctgcagtgagccatgatcgtggcactgcactccagcctgagtgacagagtgagaccctgtctctaataaacaagtaaataaaaataaaatttaaaaagaaaatttctattacaaatagactctcttcacagcagacctacagaaagaccgtcggttttctctgagcaccatgtctgaatatgatgcctacatttctgcagacatctgtttgcaagaggaaaatcagcacagacatggagccatcttcccgaggcttgcatgaatccccacactactgctcccatgcatttcttacccctgaagttcttgtcataaaaaataactctgtttcttattcatgtaaattatagtcagagtttctttctcttataagaaataaaagcttctggctgggcacagtggctcatgaatgcggtggtcactggtacattgtagtctctgcctccctagcggctcaattgccaaagctcctcattagccaaggaatttgtgttggcactgtaatcccagggtgcttaaatccttgcagaacaagggagaaattcaggatggctgctgtcctgaccctagaggccaagtgtacatcatccacttttctttttttctttctttttttttttttttgagatggagtcttgctctttcacccagcctggagtgcagtggcgcaatctcggctcactgcaacctctgcctcctgggttcaagcgattctcctgcctcagcctcccaagtagctgggattacaggcgcctgccaccactcccagctaatttttgtatttttagtagagatgggatttcaccatgtttgttaggctggtctggaactcctgacctcaggggatccacccacctctgcctcccaaagtgttgggattataggcatgagccaccatgcccagtctattttatttttttaatttttattttaattcaggggcacatatgcaagtttgtacataggcaaacttgtgtcatgggagtttgttgtaccaattatttcattacccaggtattgagcctggtacccattagttatttttcctgatccctgcctcctccagcccttcacccttcaataggccacagtgtatgtttttcccctctatgtgtccatatgttctcatcatttagctcccacttataagtgagaacacgtggtctttggttttctgttcctacactagtttgctaaggataatggcatccagctccatccattttcctgcaaagaacatgatctcattcttttttatggctgcatagtattctatggtgtgtatgtaccacattttctttatccattctatcagtgatgggcatttagattgattccatgtctttgctattgtgaatagtgctgcaatgaacataatgtgtgcttgtgtctttatagtacaatgattcatattcctttgggtacatacccagtaatgggattgctgggtctaatggtattctgtctttaggtctctgaggaattcccacactgccttccacaatggttgaactaatttacactcccactgacagtgtataagtgttcctttttctccacagccttgccagcatctgttattttttggctttttagtaatagccattctgattgatgtgagatgatatctcactgtggttttgatttgcatttccctaatgatcagtgatattgagcttttttttatatgattgttggccgcctatatgtcttcttttgaaaaatgtctgttcatgttctttgctcactttttaaatggtttttttttcttgtaaattggtttaagttccttaaagatgctggatattagaccttcatcagatggatagattgcaaaaattttctcccattctgtaggttgtttgttcactgtgatgatagtttctttcgctgtttagaagctctctagtttaattagatcccatttgccaatttttgcttttgttgcagttgcttttggtgtcttcatcatgaaatctttgctcgtgcctatgttctaaatggtattacctaggttgtcttctggggtatttatagttttgggttttacatttaagtctttaatctgtcttaagttaatttttgtatataatttaaggaaggggtacagtttcaatcttctgcatatggctagccagttatcccagcaccattgattgagtagggaatccttttcccattgcttgtttttgtcaggtttgtcaaagatcagatagttgaaggtgtgcggtcttatttctgggttctctattccgttccattggtctatttgtctgttcttgtacaagaaccatgctgttttgattactgtagccctgtagtgtagtttggagtcagatagtgtgatgcctccagctttgttccttttgcatagggttatcttggctattcaggatttttaaaaaacagttatttctagaaatcattttaaaagagagtaaaatctttttctggaggtgtgtaagctacttcagttgcttcttggatgtgagcctttggttgtagctattttttgataaattttctctgtttttttcttggttgttactggcactactattacatgaatatttatgattatgtcacactaaaatatgtctttgaaccagaaattaataaaagttttctcatcttattgctttatcacattgaaagtcacaaaaattagttttatttctatttctggttctccagcctgggcaacacagcaagattgtgtctctaaaaccaaaataaagaaaaaattgaaatgttcagagactcagaaagggaaaagtcatgaggcaagtgttcagataccaccttggggaaagtttgctgactctgtggaaagtgagcaggaaatgaagtagcgttaagggtagaatgtgttgtcccagggttgataagaaatgtggtggtggtcggcctggtgactcaggcctgtaatcccagcacgttgggaggccgaggcgggagaatctcttgatcccaggagttcgagatcaccctggccaacatggcgaaaccccgtctctactaaaaatagaaaaaaattagctgggcgtggtgatgcttgcctgtaatccttgttactccggagactgaagcatgagaattgcttgaacctaggaggcggaggctacagtgagccgagactgcaccactgcactccagcctgggtgacagaacagactctgtctcaaaaaaaaaaaaaaaagaaagaaagaaaaagaaaaagaaaaagagaaaaactgagcttggagaatggaactaatttttttttattatttatttttaatttttatttatttatttatttattttgagacggagtctcgctctgtcgcccaggctggagtgcagtgcggcatctcaggtcactgcaagctccgcctcctgggttcacgccattcacccgcttcagcctcccaagtagctgggactacgggtgcccgccaccacgcccggctaattttttgtattcttattcgagacggggtttcaccgtgttagccaggatggtctcgatctcctgacctcgtgatcctcccgcctcggcctcccaaagtgctgggattacagacgtgagccaccgcgcccggccgtggaactcgttttcgtacaatcacagagctacacacaaagaacaagtgatgtttcaaccccaagttaaaatgtacttacccactatgttatctaatcattttagaaaactcagtgatagatcagtcaggcattctggctcaccagtatttctgtgtctttgacccactttgaatcccaagtccaaagtggacaacataatcaggaagagaagttatcctaccaatgagtttccccgaggctctcttcatatctctgttcctcaggctgtagataaaggggttcataataggtgtgaccactgtgtacatcactgaagccaccgcagccctccttgaagagtcagaaacggcagagctaatgtacaccccccaacccgccctgtagaatcgggaaacaaatgggaggtgagactcacagctgaaaaaagctttattacttgctgacggcattctcaaaacagacaaggctatttgagaataagaaaacatgaccccagagagaagaatatcaccaaatatgcaagttgcaaaatagaccagaaagttatttttatttatttatttttattgtttttttttttttttttttgagtcggagtctccctctgtcacccaagctggagtgcagtggcatgatctcggctcactgcaacctccgcctcccaggttcaagtgattctcctgcctcagcctcctgagtagctgggactacaagcaagcgtcaccacacccggataatttttgtatttttagtagagacagtgtttcaccatgttgggcaggctggtcttgaactcctaacctcgtgatccacccgcctcggcctcccaaagtgctgggattacaggcatcagccaccgtgcctgactgcagtagccattattttattctgattttatgagatcagctcttttggattctacacatggttgagatcatgcagtatttgtctttctgtacctggcttatttcacttagcataatgttctccaggttcctccatgttgtggcgaatgacagaatttccttctttttaaagggtgcatagtactctatcatataccacattttctttttcttttccagacaaagtctcactctgttgcccaggctagagtgcagtggtgcgatctcggctcactgcaacctccgcctcctgggttcaagtgattctcctgcctcagcctcctgagtagctgggattacaggcatacgtcatcatgcctggctaatttttgtatttttagtggagacacggtttcaccatgttggccaggctagtcttgaactcctgacctcaagtaatctacctacctcaggctcccaaagtgctgggattacaggcgtgagccaccgtgcctgccataccacattttctttatccacttatatgttgatggacattcaggttgattacatttcctggctattgtgactaatactgcaatgaacatgagagtgcagatatctcttcagcatattgatttcaattcctttgaaattcaacagcacaaacataaatcaatataactatagatagtcaacctaaataacagaaagaggctatctaaaagaaaatgatgtttattgccaaagaaagcattgcaatagcgatacgcgtgccatcataaactatgtatgcattcaaggaggtaaaggaagacaaagttttttaatggaaaaatgaggaaggttacataattgttttgaaataattatccttcacagtaataactaataacaagggtgatgccagtctgaagctggacaggcagttgctgggcagatgtacttgcagaaatattttttgtgtaaggttgcaacagccttttgtgcaaggttgtggtttttgtcgtctcgtgatagtttttgtcgtctcgtgatagtttttgtagtcttgtgatagtttttgttattaggcatgcaagtgaaataaatctcttcatggccttccctagctttacttgtcaggatgtttttgtttttttcatttttgtttgtttgtttgtttttcatgagatggagtcttgctctgtcgcccaggctggaatgcagtggtgcgatcttggctcactgcaacctccgcctcccaggttcaagcgattctcatgcctcagcctcctgagtagctgggattacagatatgcgccacaacgtctggctaatttttgtatttttcatagagatggggtttcaccatgttggccaggctggtctcgaactcctgaccttgtgatccgcccacttcagcctatcaaagtgcagacttttttgatagccgctacacccagccttttttttttttaataagtgactccattttgattctgacaattttaacaatatatataccaagtacagtcagccttccatatctgccagtaccacattcatggactcaaccaactgtggatcaaaaatattaaaaatattaaagaaaattttaaaaatattaaataagaatattacaaaaatacaatattaagtaatacaactatttacataggattaacattatgctaggtaatataagtaatctagaaatgatttaaagtataggcgacctgggcacagtggctcacactgcttaatcccagcactttggaaggctgaggcagaaggattgtttgaggccaggagtttgaggctgcagtgagttataatcacaccactgtagttcaacctcggcaacagagcaaggctctctctaaaaaagaaattaatcatttaatattaaaattaaaaattaattacttgatttttaaattgtaaataaattacttaatttttaaattaaaaataaattagctagctgggcatggtggctcatgcctgtaatcccagcactttgggaggctgaggcgggcagattacctgaggtcaggagttcaaggcccgcctggccaacatggtgaaactctgtctctactaaaaatacaaaaatgagccaggcacagtagcaggcgcctgtaatcccagctattcaggaggctgaggcaggagaatcgcttgagccccagaggtggaggttgcagtaagccgaaattgagccactgcactctagactgggcgacagagcaagactctgtctcaataaataaataaataaataaataaataaataagtttttaaatttttaattaaatttaattttttttaaaaaaagacttagtattggatagaccagtagggtgactatagttcaaaataatccattgtatatttcaaaatacctagaagagaacaattggaatggttggagcataaagataagacaaatatttaaggtgatggatatctaaagtaacaaatccttgcagattatacaaatgtattacactatcacatgcatcctgaaacaatgtacatctcttatgcattgatacaaaaatttaaaaaaagccaggtgtggtggcatgcacctgcagtctcagctactcgtcaggctgagtccagaggatcgctttagcccaggaattcgaggcagcagtgagctgtgatcacaccactgcactccagcctgggcaacaaagtgagagactgtctcaaaaatcaattagtcagtcaatcaatccaaaaagaactcaagtccacgtggtccgattccaaaactatcaccctgaaccatctgatctctggtctcatgtattcaaagacattggtcaggtggggcacagtggctcatgcctgtaatcccagcactttgggaggctgagacgggcagatcacctgaggtcaggagttcgagaccatcctggccaatgtggtgaaaccccgtctctattaaaaatagaaaaattagctgggcttggtggcacgtgcctgtaatcccagctactccggaggctgaagcaggagaatcgcttgaacccaggaggcggaggttgcagtgagccaagattgcgtcactacactccagtctggtcaacagagcgagactccatctcaaaaaacaaacaaacaaacaaaaacaaaaacaaaaacagaaaaccccaaagacattagtcaggctttcaagacttctcattacttctttctccctgacatatcccagcagtgtaagcccaagaagctgagacatcaatggaaagatggtatcctagatattagtttcctcaaagccttcaacatgtccttgtttctcaggctgtaaatgagtgggttcagcatgggggtgaccacggtatacatcactgatgctattgcacccttcctggaggagtgggtagccccagaactaaggtacaccccaaaccctgttccataaaacaaggaaacaacgattaaatgtgacccgcagatggaaaaagctttatactttccaccagctgatggaattttcatgacagaggagacaattcgtgtgtaagagaaaatgatcccagagagaggaacaacacctaacaggctggtcaccaaatacaccaggatgttattgatgaggacatcagaacaggcgagcttgagaatatgagctagttcacagaaaaagtggggaatttccaggtctatgcagaaggtcagctgtagcaccatcaacgtgtgcagcagagcatccaggacactaacgatgaaggacagcagaagcagcagcccacagagtttggggttcatgatgacattgtacctcagtgggtgacagatggccacaaatcgatcataggccatcatgaccagaattccattttccaatccaacaaaaaccaggacaaagcagatttgggtgaggcagcctgtgtaattgatggattgagcctgtgcctggatgttcaccagcatcttgggcatcgtggtggaggtgaaacagatgtcgaccaaggacaggatagagaggaggaagtacatgggggtgtggaggtgggagtcagagttgacggccaggatgatgagcaggttccccagcattgtggccaggtacatggacaggaacagcatgaagaggatgggctgcagctccggatcccctgacaatcccaagagaaagaattctggagtgtctgagaagtttcctgctttcatgttgttgatgagtcttgatcttgtcaatattatcaaaaccaaaccagttataagttatagaccttttttccttccttccttccttctttctttctttcttccttccttccttcctttctttttctttctttctttctttctttctttct

SEQ ID NO: 784 - protein, 718 aa, Homo sapiens
MDNQAEGPWQNLFYDMAALPEASEAQSLGEWTRDRKAHQHLGDGVGGQTEINQGQVGQEEVHGGVEVGVYADGQDDEQVPQDCTRGITPMEPRNQTSASQFILLGLSEKPEQETLLFSLFFCMYLVMVVGNLLIILAISIDSHLHTPMYFFLANLSLVDFCLATNTIPKMLVSLQTGSKAISYPCCLIQMYFFHFFGIVDSVIIAMMAYDRFVAICHPLHYAKIMSLRLCRLLVGALWAFSCFISLTHILLMARLVFCGSHEVPHYFCDLTPILRLSCTDTSVNRIFILIVAGMVIATPFVCILASYARILVAIMKVPSAGGRKKAFSTCSSHLSVVALFYGTTIGVYLCPSSVLTTVKEKASAVMYTAVTPMLNPFIYSLRNRDLKGALRKLAGVQWQDLSSLQPPLPRFKRFSCLSLRSSWDYRLECSGTILAHHNLSFPSSWDHKNRGDYLRIRENYSRERNCTKYTTCKIYEDVVDEGVRTGELDDLNDFTEEQRDFNVFAEGQLQYHQTLNQGIHSAHEHGEKNQQAPEMDIHEDCVPQWVANGHIAVVGHDCKKATFQASKNQDKTDLGEAACQSIQDTNDEGQQKQQPTEFGVHDDIVPQWVTDGHKSIIGHHDQNSIFQSNKNQDKADLGEAACVIDGLSLCLDVHQHLGHRGGGETDVDQGQDREEEVHGGVEVGVRVDGQDDEQVPQHCGQVHGQEQHEEDGLQLRIP

SEQ ID NO: 785 - DNA, 23088 bp, Homo sapiens
  source (1)..(23088)
  CDS (203)..(317)
  CDS (1758)..(1913)
  CDS (7056)..(7277)
  CDS (7914)..(8127)
  CDS (8335)..(8597)
  CDS (8685)..(8731)
  CDS (8858)..(8935)
  CDS (9645)..(9822)
  CDS (18385)..(18608)
  CDS (19133)..(19306)
  CDS (21738)..(21935)
  CDS (22589)..(22888)
tgagtctgctgggaagcagaaagcacagtccacagccagagcctggggagggtcctggacccccgcccagcccccttcagcccagggaaagagagggctcgtgcacgggaaactcagcgctctgccccatctcccccagtgccccctttttgtgtattcccttacccctcaccttctgaccgtgctccctgctcttgcaggctgtgcccggtggtgccctcaggactcctcgtgtgtcaatgccaccgcctgtcgctgcaatccagggttcagctctttttctgagatcatcaccacccccatggagacttgtgacggtacagaggcttgagggcagcgcaggggacatctgcgattatgaggcatagcccagtgccagtgggggacagaggttgttgtgaggggccacagccttaccttccagactatcatcatggccagagaaaagagaaagagggcaggtgtggtggctcccagcactttgggaggcagaggcgggtggatcatttgaggccaggaattcaagaccagcctgggcaacatggtgagaccctgtctctacaaaaaatacacaaaatagccgcgcatggtggcacacatctggagtcccagctactcagaagactgaggcgggaggattgtttgagcccaggagtttgaggttgcagtgagctatgattgcaccattgcactctagcctgggcaacagagtgagatcctgtctcaggaaaaagaaagaaacaaagaaagaggccaggtgtggtggctcatgcctgtaatcccagcactttgggagggattgtctgggcaacaggagcaagaccccatctcaaaaaaaaaaaaaaaagacagaaagagagaaggagagaaagaaaagagaagaaaagaaaaagagagagagggagggagggaaagaaaaaggaaaggagggagggagggagggaggaaagaaggaaggaaggaagggaggaaaaaggaaaaaatatgaagggggagaagtaagaagtgaataggcatggcttcctggagagagagaagctgcgtgctcaggaatctggagtctgtgcctcagtttaccgttaagactgggaagggggtacattctggccataggtttttttttctcccttatttttcttttttctttttttttttgttttttttttttttttttgagatggagtctcactctgtcgctcaggctgaggagtgcagtggcgcgatctcggctcaccgcaacctccacctcccaggttcaagcgattcttctgcctcagcctcccgagtagctgggattacaggcatgcaccaccatgcccggctagtttttgtatttttagtagagatggggttttgccctgttggcaggctggtctcgaactcctgacctcaagtgatctgccggcctcggcctcccaaagtgctgggattacaggtatgagccactgcacccggctgccatggggtttaaatttctacaaaaagactggggatggggatatggcgcttcctgtccatcccccacctcagcactgtccactgtgtccaaatctaggatgccagccagagaactgagatcaagtgtggtcttcaggaatggcctgctccagctgcagcatagcctgtgcagtgcaacttgagatcctttccaaaagatactaagcagcaggccccatgttggggagtcaggacgggggtctctgccctgacggaactcacatctttgggagatgacctcctgtcctgttgtgttccagacatcaacgagtgtgcaacactgtcgaaagtgtcatgcggaaaattctcggactgctggaacacagaggggagctacgactgcgtgtgcagcccaggatatgagcctgtttctggggcaaaaacattcaagaatgagagcgagaacacgtgtcaaggtaagaaccaccccacatcctccatcaccactgtccatgaggtttggggtcaccagagctgtttctgcagcatccagggagcaggtacccaagtataggttcagttcctggagtctgagatgagacaggtgtgcatgtacctgtttcgccagcccagagaggcagcgtggtgtgaaggccaagggaaaactctgggaccagctacctgggcccaaatcctggctttgccacctgttacctaaatgatattaccaacatcactactgctcttagagccttggtttacccatctataaaatgaggatgataataatggcctactcctatgccttctaggaggaccaaggaaagaataggtgcttctaacagagcccagcacacagcaggtgctacaggcatcttcattctttaaacgttattatgcactgtaatcccagcactttgggaggccgaggcggatggatcacggggtcaggagatcgagactatcctggccaacatggtgaaaccctgtctctactaaaagtacgaaaattagccgggtgcagtggtgggtgcctgtaatcccagctactcaggaggctgaggcaggagaatcacttgaaccagggagtcggaggtttcagtgagcggagatcgtgccactgcactccagcctggtgacagtgcaagactccatctaaaataaataaataaataaataaataaataaataaataagcaatggatgccttttaggagttgttcagacaagctgggctcctgtggggccacactcctggctggcactcagaagaaatctatttcgacacagcctgcctcatcccttgccatggtcttattccacactgcagctccagcccatgagaagccaggcccccatgcatcactctgctttgccttctttccagtgggaactagttgggtgcgggagggagcttcagacatctgcaaggccagatgggaaccagtagcaggtggacagagaagggagattaacacagagtacacagagtgggaagggaaggtgagcaaaggcaggaaatgaagaagctgaggctgagccaagggtcccaggggacattaagggggttcagcagacctgccctgctgtaaagagaaaagtggcagtgctcctgttcccagccctgtccctcctgttctccctgcagtcagtagagcctccctggtgggaggaaagtgaggacagagcagaggtgtacgttctgagagcacgcagctgcatagagcccagcaggggggctggttcacaggggtcccctgtgaacagatgctacattgcatgcacatatcttgaccaaaggacagagccttcctgtgaattagaaaaaggactctccgggccaggcacagtggctcacgcctgtaatcccagcactttgggaggctgaggcgggtggatcacctgaggtcaggagttcaagaccagcctgacaaacatagtgaaaccccatctctactaaaaaatacaaaagttagccaggcatagtggtgagcacctgtaatcccagctactcaggaggctgaggcaggagaatcacctgaacccagaggcagaggttgcagtgagccaggatctcaatattgcactccagcctgggtgacagagcaagactttgtctcaaaaaaaaaaaaaaaaaaaaaaaaaaaagaaaagaaagaaacaaaaagaaaaagagaaacagaaaagcctctcctctccaggtagacacagccccatttggggaatggagaggttttcagcctctgctcaccgccttggctgggcatccatatgtagtcagcaacctacacaactgtacgtggtggtcatgggtccttgtcagtgagagcctctgttttagtctatgttgtgttgctataaaggaatacatgaggctggatcatgtataaagaaaagaagctgatttggctcatggttctgcaggccatgtaagacacatggctccagcatctgcttctggtgagggccttagggagcttccactcttggcagacgggaaaggggaagctggcatcccatggcaagaggaaggaagcaagagagaagggaggagataccaggctttttccaacaagcagttttcatgggaactaacaaggcgagaactcactcatgacccaaggacagcaccgagatgttcatgagggatctgcactcaggacccaaacacctcccacgaggctccatctccaacactggggatcacatttcaacgtgagatttggaggggacaaatatccaaactgtatcaccgcatgcacaggtggtgtttgtaattattgaggaggtgtgttgccatgttagaaacaggccagcactggccgggcgcagtggctcatgcctgtaatcctagcactttgggaggccgaggtgggcggatcacaaggtcaggagatcgagaccatcctggctaacatggtgaaaccccgtctctactacaaatacaaaaaaattagctgggcgtggtggtgggtgcctgtagtcccagctaatcagagactgaggcaggagaatggcatgaacctgggaggcggagcttgcagtaagccgagatggcaccactgcactccagcctggacgacagagcgagactccgtctccaaaaaaaagaaaagaaaaggagagaagagaagagagaaaagaaaagaggccaacactgagagagggggcttagttggtggataggcagagacacagatgagcaggaatgaagtgggagagggctctcatggaccccatccgcacagaacagcctgctagttcggagcaggacctgcctcttgaagcctcagctcagggaagggctccgtggggccctgtctgcatccccctcacccctcagcattcttgttttttttgtctacctggtgtcacaggcctcataggcaggagacctggggccactccctcagctccttgccccacttactccaggcatcacagggccgtcccaaacacctggtcacctgtcgctatccaaacctcaaggttcagaaccctccacagagggtcacttccaaaagctcagaacatccccctgcccatctggcatcttatttgtttgttttgttttgttttattagtaaagatggggggggggtgtctcaccatgttgtccaggctggtctcgaactcctggcctcaagtgatccgcccgtctcagcctcccaaagtgctgggattgcaggcgtgagccaccatgtccgacctggtatcttatttgtacaaaacaaaaagggggctggcactcaggatattcgatgagctcactgcgtggtgcattccagcgcagtatccattctctctgctatcatcagcgactgccaggatgagacagtctccacacagctctgctcacctggaactctctctgatcccccagctcatcatggacccaggcaccctgtccagaaatgaaggaggagggagatttgaaggcagggccactgtccccagtcgaacctgccactggccaacaaccccacctggagaagatgcctcgtggagccctgacctctttttctgccactcagtctctgtccctttcactgagcgagactgccctgacccttcctgatagttttggtccacctgagtgcactggaggatgttgtggctaacggtgggcacagtgacatggactccccatacttggagagttgagtgaatggaagaggcactagtgtggacccaatggcaagagaggttaacatcagggccattgctccaagcctgatcctctcccaggaggtcaacccagatcccatgggagtggaaccattcagaaataggtctgtgtccctggtggaatgccaagagatgagatgacagatacacctccatctttgcccatcagcatctgtgcccctctccagccactaaaccttcacccagggccagtctttctcagctatggattctcactacatcctgccatttccaagacaccttcctgaggatcaaaaaaaggcaccttcacagccctggggcaacccagctgtatgtcggtccccactgtccaccctggcctgggacccactgtccaggcagccctggcctatgcagcaccagactcatgctcccctggggactggctcaggggccagtcttggtccatgtgcctggagctgggctctcagagctagtgtggatgggagagcaccatcctgctagggccaccgggattctgataactcagccagtgagcagctgtcctggggaaatcaaggccaccagaagcagatgctggagccatgcatcttacacagcctgcagaaccatgagccaaataaacttcttttcttgcaacacaaaacggactaaaccagagggttctcactgagaaggacccatgaccaccatgtacagttgcataggctgctgactgcatatggatgcccagccaagagggtgagcagaagctgaaaacctgcctactctccattcctcaaatatgactgtgactacttgaagaggagatgcctttttccaattcacaggaaggctctgtcctttggcccaggactgccactgggaaccaagacaggtcctacctgggcaagcagcatgccccctgcacttggtcccaagaaaatcccaccctgacctttgtcctgaatcctcaggctgggacatccctgccccagctgggagctgcccagggaggcaggggagatggggaggactcagatgcttccagccatatctgaacaacagaaggcctgggccaccatgctcaccatgggacacctctgtgtggattagaaaagggaggagatggccaggcatggtggctcatgcctgcaatcccagcactttgggaggccgaggtgggctgatcacgaggtcaggagatcaagaccatcctggctaacacggtgaaaccccgtctaatactaaaaatacaaaaaattagccgggcatggtggcgggcgcctgtagtcccagctattcgggaggctgaggcaggagaatggcgtgaacccgggaggcggaggttgcagtgagttgagatcaggcaattgcactccagcctgggtgacagagcaagactccgtctcaaaaaaaaaaaaaagaaagaaagaaaagaaaagggagcagacagtggtgccttccagatgcttccgtgccaggaaacatggcggaccctcagccccgaaagctgctcacagctacgggcattcttcaccctctccttcctcttgcagatgtggacgaatgtcagcagaacccaaggctctgtaaaagctacggcacctgcgtcaacaccctcggcagctacacgtgccagtgcctgcctggcttcaagctcaaacctgaggacccgaagctctgcacaggtagaggccccaggaagacgctgtgaggctggacgggagctggggatggagctgagtcaggtcctccaaagcagccgaggaggagggagaagatccgcaggttcccacaaggtcaaggacctgctaagcccctgcctaaggattcacctcccaggaaggactcgccacacggcagggaggcggcagggccttcagggcttggagtgcccttgtgggcccccagacctcaccccttcctcatctgtcacgtgcgagtggaagaaggtgtcacttccagttctaagaaggggaacctccaccatagtgagggagggagcaggagagagattttagtcagaaagtccagctcccatgactcagtttcccttttggtttcacctcctataaactggggaccatggtccctgctgtgcccatctggtaggaagaccatcataagatgctttgaaggtgaagttgaaggtcaccaagtggtggcacgtgcaataatggtcttcagtctgaggcaatgaaaagataggggagtgggtgcagtgagtggagggcaggcccaggctggtcagggacagggtttgaccctctggctttgtcctcagatgtgaatgaatgcacctccggacaaaacccatgccacagctccacccactgcctcaacaacgtgggcagctatcagtgccgctgccgcccgggctggcaaccgattccggggtcccccaatggcccaaacaataccgtctgtgaaggtcgagagctcagatcccacgttcccagagacccacaaacatctgatcacatgttcaacggcgcccacacaaaccaagcagaatgagcgctggaggcgcccgactgtgtcaggcgttcattcttctgaggctagatgagaaaagagcaagggtcctgcggaaggagctggggtactgaggggggaggctcagggggaccccaggcaacagctgatgactcactgggaggaaggcgtttcaccatattcataacctgctcatctgcacggggcccacctgctgtgcccaggcctctccacgcttccataacccagcgtccacctctccaaggggggcactaatgccgggaggaacgagctgggggcacagacaggagacaggaccctctccaggctgggacaggacctgacccccttcttcctgtcctcagatgtggacgagtgcagctccgggcagcatcagtgtgacagctccaccgtctgcttcaacaccgtgggttcatacagctgccgctgccgcccaggctggaagcccagacacggaatcccgaataaccaaaaggacactgtctgtgaaggtatgacctggccctagaagctccccacccccagcacacacactgacacgctcccgcctaatgagccgcttgtcttgttccctacagatatgactttctccacctggaccccgccccctggagtccacagccaggtgagtggcccccacagggacgaggcggcgggaactccatccacacagcactgcatccgtctccttgttctaaacttcccacccgccgtccaggctctctgacccccacatctcctctctctgcagacgctttcccgattcttcgacaaagtccaggacctgggcagagactacaagccaggcttggccaataacaccatccaggtaaggacaggacccagggcaagggggcgaggcaggaaggtggctgcatcccacagaggcctggggcagtttgggtctgggaggggacaggacccaatgcagtgggtgctggtctgactcccagcatctttcagggctggtggaagctaatggacacccaagtgcacttaatatctttcctcttgctttccctggactttgggtttaggtcagcattgatattgcacagaagtgttggcctctgaggggccataaccagagtcaaggatcacctagggaatcccatccaatgtcattttttttttagacggagtctcactctgtcgccagtccagagtttagtggcccgatctcagctcactgcagtctctgcctcccgggttcaagcgattctcctccctcagccccctgagtagctaggattacaggcacacgccaccacgcccggctaatttttgtatttttagtagagacggggtttcaccatgttggccaggatggtctcgatctcctgaccttgtgacccaccctcatcggcctcccaaagtgctggaattagaggcgtgagccaccgcgcccagccgccaatgccatcttcatcccccagatagacagtctctaggatctgttccctggggctgagcggttggagtcttcatgcgggccctctggcccatggctcactaggtctgtgtccacatccctccagagcatcttacaggcgctggatgagctgctggaggcccctggggacctggagaccctgccccgcttacagcagcactgtgtggccagtcacctgctggatggcctagaggatgtcctcagaggcctgagcaagaacctttccaatgggctgttgaacttcagttatcctgcaggcacaggtaggtccctgggtctgccccagactccagctctgcatgttttctgtctccttcctttcccagtcccaccagagccaagtgaccacacctgtatatcagtgttactctcatcgacaaactaaaataagagattaaaaagaaatacataccagtctggacaagatggcaatactcaatctctacaaaaaaaaaaaaatcttttaaattagacagatgtgatggcacaactgtggccccagctagttgggaggctgaggtgagaggatcgcttgagcccaggaggttgagtctgcagtgaactatgattgcatcactgtactccagcctggttcacagggcaagaccccatctcaaaaaagagaagacgaagaggaggaggaggaagaagaagaagaagagaaggaggaggaggtgaagaggaggaggaggataaagaggaagaaaaaggaggaagagggcaggagggggaggacagaaggaggaggacaggaggagaggaggggaggaggaagaggaggaaagaggatgggaggaggaggacaagaggaagaggacgggaggaggaggacaggatggggaggagaggaggaggagagaaggaggaggagaggaggaagaggaggaatggagaaagagaggaggaggagaaaaggaggaggagaggaggaggaggagaggagaaggaggaggaatggaggaggagaggaggcagaggaagataggaggaggagaaggagaagaggaggagaagagaaggaggagaggaggaggagacgagaaagagcggaggagaggaggagaggaggaggagcacaggaggaggaggagaggagtagaggaagaaggaagaatagaaagaaggaaaggaaaggaaaaagaaatgcataaataacatgcattttcattgtaatatgaattatcagcagtaaataattatgatgaagaatttaaaataacaaaatagaaatcacttcaaaagagaacaatttatttaatttggaatactataaattaatatcatttgatctctaagtatgatttctttcttgtttgtttttgtttgttttgttttgttttgttttgtttttttgagacagagtctcactctgtcgcccaggctggagagcagtgacgtgatctcggctcactgcaagctccgcctcctgggttgacagcattctcctgtctcagcctcccgagtagctgggactacaggtgcccgccaccacgcccagctaattttttgtatttttagtagagacggggttgcaccgtgttagccaggatggtctctcgatctcctgaccttgtgcataatccacttgcctcggcttcccaaagtgctgggattacaggcgtgagccaccacgcccggcctgcataataatttttaaagcatgaaaatgcatatagcattaattttattaagataaaattcacataacatcaagttcaccactttaaagtgtctgtttcacgtggggcgtgcctgtaatgccaggcgctcacacctgtaatcctagcactttgggaggctgaaatgggtggatcacttgaggtcaggagttcaaatccagcctggccaacatagtgaaaccccatctctactgaaaatacaaaaattagacaggcgtggtggtgcacacctgtaatcctagctactcaagaggctgaggcaggagaatcacttgagcttgggaggcagaggttgcagtgagccaagtttgcaccactgcactccagactacgtgagacagagtgccactccatctcaaacaaaaaaattaaaattaaaaataaaaataagaaaaaattttaaaagcgtgtgtttcggtagaatctagtatattcagaaagttatacaaccgtcacctctatttctaaaatgcttgcatcagcccaaaagtgaacactgcacatggtaagcaaccactcctcattcctcccttcctccaacccatggcagccgctaatctgctttctgtttccatggattttcctaatcaggatatctcacataaatggaatcatacaatatgtgaccatctagtctagctcctttcacctagcataatggttttgaggttcatgcatgccatagcatttatcaatatttcattctttttcatggctgaatactattctattgtatgaatacatcactttttttttttttatccatccatccattgatggacatttgggttgtttccaccttttggctgttgacaaaaagagtcaaactctgtaaaatatttgaagagatttattgtgagctaaatatgaatgtatgactgaccatggcccgtgacacagccctcaggagcccctgagaacatattcccaagtgaagtggtgttgttttctggggtaatacctgaggttcattgcctcatgccaagaaaattaaggacacagacacacaccaggagtgagtttatgagtggaggtttaataggcaaaagaaagagaaaggagaacaactctctctcttgtgagagaaaggaatgcccaaatgggacttcccacccatgccagagggcaccggattttatagacaggcttgaggaggcagtgtctaatttacatagggcccaaagattggttggaacaggtgtgacgtttacataaggtgcagggaagctggctgccccaccctaatcttattatgcaaatggagtcttcgccagctccttactgtatacgtggttggcaaagagatgggaagatggagccgccattttcaacatgcctagtcccaggtggccttttcctattggcacagctgccagcattcacctgtgcaggcttccagcttgcttgcctatgtctgcagctcgattttacaggctgctctttgttagaaaaaaaaaaaatgatataggggctgattttcattaaaaggaaagacttacccaggacttccttacccacactctctgcctaaataattcctttttaacttctatatcacaaggtagtcgtggtacagcttgttgtgattgttgttgttgttgtcttctgttggagacagagtcttgctctgtcaaccaggctggagtgcagtggtgcgatcctggctcactgtagactccacctcccgggttcaagcgattctcctgcctcagcctcccaagtagctgggactacaggcgcccgccaccacgcccggctaattattttgtgtgttttcagtaaagacagggtttcgccatgttaaccaggatggtcttgatgtcctgacctcgtgatccgcctgcctcggcctcccaaagtgctgggattacaggcgtgagacaccacgcctgcccccgcaacttggttttatacattttagggggacatgagacatcaatcaaatatgtttaagctatacattggttcagtccagaaatgcaggacaatttgaagtggaggtgtggggcgggtgcttccagattataggtagatttaagcttttctgattggcagttggttgaaggagttattatccatagaaaagaatgtctggaatacgataaggggctgtaaaggctgaagttgtatcatccagatgaactcttcaggtatcaggcttcagagagaatagatggtaaatgttccttattaagcttcaggtctgtgttatgttaaatgctggtcagcttttcctcaactccaaaagggaggagggcatgacacatgtcagaccccccacttcccaccatagcctgaactagtctttccagttaaatttagagtgccctggccaaaaaggaagtccattcagatggttttgaggggggcgggagaggacttcgaattttttttttttgtttagatggctggtgtgaatagtgctcttatgaatattagtggacacattttgggttgaataactgtcttcagttctttggggtatatactaaggagtggaattgctgggtgatatggtaattctatgttcagcttttggaggaaccaccaaactttttccaaagcagctgcatcattctaattccccaccagaaacatacacgggttatcctctccacaccttcagcaaaacttgttacttccgttttcttttgttctgtttttaattgcttttattgatacataaatcttacatatttatgggtacatgtgatactttgttgcttgcctagaatgtgtaacgatcaagtcagggtatctcaggtatccaccactttgagtacttatcatttgtatgtgttgggaacaattgaagtcctcttttgtaactactttgaaatacatcatacagtcttgttaattatagtcactctgctctgctgtcaaacaatagaacttgggccgggcacggtggctcacgcctgtaatcccagcactttgggaggccgaggtgggaggatcacgaggtcaggagatcgacaccatcctggctaacagggtgaaaccccatctctactaaaaatacaaaaaattagccaggcgtggtggcgggtgcctgtagtcccagctactcgggagactgaggcaggagaatggcgtgaacctgggaggcgaagcttgcagtgagccaagatggtgccactgcactccagcctgggtgacagagtgagactccgtctcaaaaaaaaaaaaaaaaaaaaatctgcttaataagcggagaggtggctggcttggtggctcacacccgtaatcctagcactttgggaggtcaaggcaggcagatcacctgacatcaggagtttgagcccagcctggccaatatggtgaaaccctggctattaaaaatacaaaaattagctgggcttagtgacacgtgcctgtaatcccagctacctgggaagctgaggcaggagattcgctggaacccaggaggcagaggctgcagtgagctgagatcgtgccactgcactccagcctgggtgacagagtgagactccgtctaaaaaaaaaaaatatatatatatatatgtataacttatactttttgtctaactgtatgtctctacctgttaactcacctctcttcatcccagtgatacaggagtgaaaaagaaattatttaggcagttagcaagggtcagagagtcctcagtaaggtttcccttttaataaaaaccagcccccaaatcatttcttttctaataacgagcagcctgaaaattcgagctgcagacatagaaaagcaagctggaagcttgcacgggtgaatgccggcagctgtgccaataggaaaaggttacctgggggcccggcatgttcaacgtgggggctccctcttcctttatctttgtcaaccacgtgtacagtacagaagcaggcaacgtggagccagccaggtagagaatccatttgcataataaaagattaggctggggcagccagtttcttcatgctgtatgtaaatggctcacctgttcagaccaatctttaagccttatgtaaatcggacaccgcctacccaagctcatctataaaacttcgtgcatttcaccacgcaaccggaagacccacttgggagcccctgtctctctgcaggagagggagttattctctttttccttttttttttttttttttttgagacggagtcgtgctgtgtcccgcagactgcagtgcaggggcgcgatctcggctcactgcaagctccgcctcccggggtcacgccattctcctgcctcagcctccggagtagctgggactacaggcgcccaccaccatgcccagctaatttttttgtatttttagtagagacggggtttcaccgtgttatccaggttggtctcgatctcctgacctcgtgatcctcccgcctcagcctcccaaagtgctgggattacaggcgtgagccactgcgcccagccagagctattctttttttctttcgcctattaaatctccactcttaaactaacttcttatgtgtccacatcctcaatttccctggtgtgaaacagtgaaacttgggtatttacaccacttcactagtgagatgatacctcattgtggttttgatttgcccttccctgataactaatgatgtttaacatcttttcatgtgtttgctcaccatttgcatgtcatttttggagaaatgtctattcaaatcctttgcctatttttaattgtgctgtttgtcttttggttgtccagttgtaagcattctttaaacattctgatagtagatcatctgagatgaatgatttgcaaaatattttctcccgttctgtagattgtcttttcattttcttgtcttttcactttaatgaatagaagttttaaatcttgaagacatttattttatctaatttttcttttgttgcatgtgcaattggtgtcatatttaagaattcattgacagggggtggtggctcacgcctgtaatcccagcactttggaaggccaatgtgggcggatcacctgaggtcaggagtttgagaccagcctggccaacaaggcgaaaccctgtccttactaaaaataaaaataaaaataattaaccagatgtgttggcacatgactgtaatcctagctactcaggaggctgaggcaggagaattgcttgaacctgggacacggaggttgcagtgagctgagattgtgccactacactccagcctggatgacagagcaagactctgtcccaaaaataaaaataaaaaaagaattcattaccgcatccaagaccaggaagatttacccctgtttcctcctaagtgttctagttttagcttctaagcttaggtcactggcttattttgagttaatttttgtttgttgtgtgagggtagggttaaaacttccttattttcatgttactatccagtaatcccagcactatttgttgaagagattattctttcccccattgtatagtcttggcaccccttgttgagaatcaactgaccataagatggatgggtttattcctggactctcaattctattctgttgtgtccttatgccagtattactgtcagtttgtagtaagttttggaatcaggaagtgtgaattctccaaccttcttgttcttcttcaagattgtttttgggtatttggattccttacaacaccatatgaattttaagatgaacttttcttattctgcaaagtaataataggctaaaatattgatagggattgcattgagtctctagaccactttgggggagtattgttatcttaacaatagaaagtcttccaatccatgaacataggctgtctttccatttagagagggccttttatttctttcaaacacttttgtaggccagaagcagtggctcacgcccaatattgtcagaggccaccaaggtgggagaattgcttgagcccaggagttcaagcccagccttggaaatatactgaaacatgatctccacaaaaaatttaaaaattagctggctgtggtagtgagcacctgtagtgccagctacttgggaggctgaggtggaaggattggttgagcccaggagactgcagtgagctatgatcatgccactgcactctagcctgaccaacaggtgagaatttgtctcaaaaaaaaaaaaatactcaaaaaactttcctataagtcttgagtctccttcgtaaaatgtattcctaacatttttgctgaaaatttttgcatctatgtccataagaaatattggtctataattttattttcttgtgatgtcttcatctggttttgttatcagagcaatattagcctcataaaattacttaaatagtgtttcctcctcttccatatttttaaaaaggtaaaagattcatgttcattctttcttaagctattggtagaactcaccagtgaagtcatctggtctgggctgttagttttgagaggttttgattactgatttaatctgttataggtctgttcagatcttctatttcttcttgagttggtttcagtggtttgtgtgtcactaggaatgtgtccatttcatctaggttacctactttgtagatatacagttgctcacactattctcttccgatattttgtaacttcagactatatatgtatatagtatatatattaagtcatagtatatcaaccactgcaggcacgattcctaacctaactccccttatgtaattcccacaactcatagaattgtccctggaggtgcagaagcaagtagacaggagtgtcaccttgagacagaatcaggcagtgatgcagctcgactggaatcaggcacagaaatctggtgacccaggtaatggctgagatggggaggtggtcagtgaagcttcatggtgggaaaagatgcccaagaatgtgaaaaataagagatttaaagattaaagggaagtgtgggatgtttggagtggggctgtaagaggagagtccagctgaggaggaacggaccttgttggggaccctgagatattaaccgtggccttgtcctgcaggatgtgatacacatagaactaaagattgaaggaaagtgtgggaggggtgaagccaaaggaaggtagcccatctgagtagaaagttctgtgcagggcagaggaactctggtgtggacccagagattcaacctactccaagattcaaccttggcctcgccctgcaggcccttctgtggtgggccttgtctccattccagggatgggcaagttgctggctgaggcccctctggtcctggaacctgagaagcagatgcttctgcatgagacacaccagggcttgctgcaggacggctcccccatcctgctctcagatgtgatctctgcctttctgagcaacaacgacacccaaaacctcagctccccagttaccttcaccttctcccaccgtgtgagtgctggtggagttggttggtgggtgaatagtctgagtccgggcatagccttgctgctcagctcagccctggggctcaggggtctctgttatgggtacattatctccccaggaaagtcagtccttcccaagccggctttgggtaagcatttctgagcatccgacccaccagctcacacctgtgttcttttttttattgagacagagtctcgctgtgtcagccaggctggagtgcagtggcacgatctcagctcactgcagtctccgcctcccaggttcgagcgattctcctgcctcagcctccctaatagctgggactacaggtgtgtgctaccacgcccagctaatttttgtttttttgttttttttttttttttagtagagatggggtttcaccatgttggccaggctggtctcaaactcctgacctcaagtgatccacctgcttcagcctcccaaagtgctgggattacaggcgtgagccaccatgcccagcccacacctgtgttctgttcctgcagtcagtgatcccgagacagaaggtgctctgtgtcttctgggagcatggccagaatggatgtggtcactgggccaccacaggctgcagcacaataggcaccagagacaccagcaccatctgccgttgcacccacctgagcagctttgccgtcctcatggcccactacgatgtgcaggtgagacccttaggaggggatgcactctgcatttattgccgtgtaacaaatccccagagacatagcagccttttaaaaaaatatatgcattatctcacagctctgggtcagcaagctggcatagcaagatggcttttctgctcagggtcttacaagactgaaatcatcatgtcaccccacccccagggctgccatttcatctgagacttgaggtccttctccaagctccctggttgctggcagaattcagtttcttgtgattgtaggactgaagtctcactttcttagctgtcaggaaggcatcacattcagttcctagaggccactcatatcccttctcacatgaccctctggcaaacttctagcattcctatctggaggacaaggaaaaaaatttcctcacgcagaatccctcttaagctttgtattagtcgaggttctctagagggacagaactaatggaatagatagatagatagatagatagatagatagatagatagatagatagatagatagatagataatttctgcctgcttatattctagccacactggcagctgattagatggtgcccacccagattaagagtggatctgcctttcccaacccactgactcaaatatatacatatatagagatatatagagagagatctatatatatagatatatataaaggggagtttattaggtattaactcacatgatcacaaggtcccacgataggccgtctgcaggctgaggagcaaggagagccagtccgagtcccagaactgaagaacttggagtctgatgttcaagggcaggaagcatccagcacgggagaaagatgtaggctgggaggctaggccagtctctcttttcacatttttctgcctgcttatattctagccacgctggcagctgattagacagtgcccacccagattaagagtggatctgcctttcccagtccactgactcaaatgttaatttcctttggcaacaccctgatagacacacccaggatcaatactttgtatccttcaatccaatcaagttgacacccagtattaaccgtcacaagttttgaatctgattctccaggaagagcccagagcttataaagactcatctgattaggtctggcccacccagggtaaactctgccttttttttttttttagacagggtctctgtcacccaggctggagtgcagtggcacagtcatagctcactgcagccttgaccttctgggttcaagggatcctcctgcctcagcctcctgagtagctgggactacaggcatgcaccaccatgcccggctaatttttgtatttttactagagatggggtttcaccaagttggccaggctggtctcgaactccttacctcaagtaatccacccgcctcggcctcccaaagtgctggtattacaggcaggaaccaccacacctcgcccacctgactttcttatctcatcacttagagtagatccaagggacatcatcatcatatcctgcgggagaaagggccaaaccacccttttgttttccatgacaggaacatcttatcaatatcctcccaggcagcaagccataccgcccagcccctcccgcccagacctgtaattaccccagcctgtaagcggcagtgggttctggcacgaagctagctcccccctccacaagtctcgtgctggacataaacctgcattgctgtagagctgccaactctctgtctttctttaactctcactttcccttcaaaacctaacgggcccacacctggaatctctgtgctttgggaggctgaaacgggaggatcacttgagcccaggaattcgagaccagcctgtgcaacacagaaagaccctgtctctacaaaaataaaaaaaaaaattaggacgggtgtggtggctcacgactgtaatcccagcactttgggaggccgaggcgggtggatcatgaggtcaggagttcaagaccagcctggccaacatggtgtgaccctgtctctactaaaagtataaaaattagcctggcatggaggcacatgcctgtaatcccaactacttgggaggctgagacacgagaatcgcttgaaccgaggagacagaggctgcagtgagcagagatcgcaccactgcactccagcctgggcgacagagcaagactgtcaaaaaaaaaaaattagcagggcatggtgccatacatgactataatgcacacccgttgtcacctacatgactacgcctgtattcctagccacccatgaggctcgggtgacaccttcgcaaattaaattaaattggtgacatcttcacaaatttacctggctccctcattcttgaatgtgctatgccaaagtaaaaattttaaatggtggtggggtcattaccccagagcaggaaagcatcactgtgaactcttcttttccgggtcccaggaggaggatcccgtgctgactgtcatcacctacatggggctgagcgtctctctgctgtgcctcctcctggcggccctcacttttctcctgtgtaaagccatccagaacaccagcacctcactgcatctgcagctctcgctctgcctcttcctggcccacctcctcttcctcgtggcaattgatcaaaccggacacaaggtattgacagcggtgttccagagggctcccttccttgacgcaggacacgctggctcatggaatgatgcggcatttgattccttaatataatagcccggctgggcgtggtggctcatgcctgtaatcccagcactttgggagactgaggtgggcggatcacctcaggtcgggagtttgagaccagcctgaccaacatggagaaaccccgtctctactaaaaatacaaaattagccaggcatggtggcgcatacctgtaatcccagttactcaggaggctgaggcaagagaatctcttgaacccaggaggtggaggttgtggtaagccgagatcgcaccattgcatgccagcctgggcaacaagagtgaaattccgtctcaaaaaaaaaaaaaaatatatatatatatatgtgtgtgtgtgtgtgtgtgtgtatacgtatatatacatgtatatatatatataggcccttgagtcctggggaatattagaagagaacaccaccaatttcccattgcctgactcaactacacagcaaatattctctataatgccatcaaatatctcagaattctccccaacaacttggtacaggagaagccatgggccacactcaaatctgatcgccgctctgggcgtcttttacttctccgccaggtgctgtgctccatcatcgccggtaccttgcactatctctacctggccaccttcacctggatgctgctggaggccctgtacctcttcctcactgcacggaacctgacggtggtcaactactcaagcatcaacagattcatgaagaagctcatgttccctgtgggctacggagtcccagctgtgacagtggccatttctgcagcctccaggcctcacctttatggaacaccttcccggttagtgcaaattctcacaatccttatcttctccggcataaccatggccattgctagaacctagatagcatttttatgacacctgcttttaattagatcagtagggattttaggctctattggttggattacactgcagctccttattcttagctattgagtttatttcaattacatttcaagctaggcattgtagaagagggttttcggaaattttctgaatgaaataaagggcaagcctttggaaagcacgaataggacaaa

SEQ ID NO: 786 - protein, 722 aa, Homo sapiens
CARWCPQDSSCVNATACRCNPGFSSFSEIITTPMETCDDINECATLSKVSCGKFSDCWNTEGSYDCVCSPGYEPVSGAKTFKNESENTCQDASVPGNMADPQPRKLLTATGILHPLLPLADVDECQQNPRLCKSYGTCVNTLGSYTCQCLPGFKLKPEDPKLCTAPPTASTTWAAISAAAARAGNRFRGPPMAQTIPSVKVESSDPTFPETHKHLITCSTAPTQTKQNERWRRPTVVHLSKGGTNAGRNELGAQTGDRTLSRLGQDLTPFFLSSDVDECSSGQHQCDSSTVCFNTVGSYSCRCRPGWKPRHGIPNNQKDTVCEDMTFSTWTPPPGVHSQTLSRFFDKVQDLGRDYKPGLANNTIQSILQALDELLEAPGDLETLPRLQQHCVASHLLDGLEDVLRGLSKNLSNGLLNFSYPAGTGPSVVGLVSIPGMGKLLAEAPLVLEPEKQMLLHETHQGLLQDGSPILLSDVISAFLSNNDTQNLSSPVTFTFSHRSVIPRQKVLCVFWEHGQNGCGHWATTGCSTIGTRDTSTICRCTHLSSFAVLMAHYDVQEEDPVLTVITYMGLSVSLLCLLLAALTFLLCKAIQNTSTSLHLQLSLCLFLAHLLFLVAIDQTGHKVLCSIIAGTLHYLYLATFTWMLLEALYLFLTARNLTVVNYSSINRFMKKLMFPVGYGVPAVTVAISAASRPHLYGTPSRLVQILTILIFSGITMAIART

SEQ ID NO: 787 - DNA, 12919 bp, Homo sapiens
  source (1)..(12919)
  CDS (201)..(306)
  CDS (11836)..(12719)
ttaggcatatattcaaaagaggaattgctgggtcatatagtagttctgttgtagatttctttaagagcctgaatactgttttccacaaaggttgtaccagtctgcattcccaccaacaatgtactagggttcactttgcttgatgccctcgccaacattcatctctcatcttttttttcctttttttttttctttttgcaatggagtttcgttcttgtttcccaggctggggggcaatggtgagatctcagctaccgcaacctccgcctcccgggatcaagcgattctcctgcctcggcctcccgagtagctgggcttacaggcatgcaccaccacgcccaactaattttgtctttttagtagagacgggctttctccatgttggtcaggctggtctcgaactcccgacctcaggtgatccgcccgccacggcttcccaaagtgctgggattaccggcttgaaccaccgcgcccggcctctcctatctttttgatgatagttctccttaaggatgtgaggtgatatctcacagtggttttaatttgcatttccctgatgattagtgatgtagagcaccttctcatatacctgctggccttttttatgccttctttggaaaaacgtctgttcagaccctttgcccattttaaaatcaggttatttgtttttctgctattgatttataagagttctttataaattttggatattaaccccttatcagatatgtggtttgcaaatattttttcccagtccgtggatcgccgattcattctgttgattgtttcctttgctatgtagaagctttttaatttgatgtagtcccatttgtctactaatttttgcttttgtagtctgatcttttggtgtaatatcaaaaaaatatatatatatatatttggtcttttatccattttgagttgatttttgtgtatggcgtaagataagggtcaaatttccttcttttgcatgtggaaatctagttttcctggcagcatttacggaagaggctatccttttcccattttgtcctcttggtgcccttattgaaaattagttcatcatatatgtttggatttattcccaggctctctgttctgttcctttagtttctatttttatgccagtatcatgccttttttttttttttttttcttgagacaagtcttgctctgtcacccaggctgcagtgcacggctcactgcagcctcgatctcccgggctcaagtgatcctcctgcctcagccccccaagtatctgggactacaggtgcatgccacagcgcctgtctaatttttgtatttttcatagagacagggtttccctatgtttgcccaggctggtcttgaactcctgggctcaaacaatccacctgcctcatcctcccaaaatgctgggattgcaagcgtgagccaccacgctgggtccctttttttttgagacttagtttcacttttgtcgcccaggctggagtgcaatggtgcgatctcggctcactgcaacctccgcctcccggcttcaaacaattctcctgcctcagcctcccgagtagctgggattacaggtatgaagcctgtaattagccatcatggctggctaattttgtatttttagtagagacaggatttcaccatgttggtcaggctggtctcgaactcctgacctcaagtgatccacccgccttggcctcccaaagtgttgggattacaggcgtgagccacggcgccaggcacgtttttttttctttttttattattatactttaagttttagggtacatgtgcacattgtgcaggttagttacatacgtatacatgtgccatgctggtgtgctgcacccactaacttgtcatctagcattagatatatctcccaatgctatccctcccccctccccccaccctacaacagtccccagagtgtgatgtccttcctgtgtccatgtgatctcattgttcaattcccacctatgagtgaggcacgttttgattcttaacaaggacaattgtgccacctgtggagacgcctttggttttaccactacccgggatactactgacatctagtggttagagtatagaatgccctactccctctaacagaaataccaggtcctgaatgtcagtcgtgccaatgatgagaaacccttgcatagaaaagtaggagatggccgagcgcggtggctcacgcctgtaatcccagcactttggccggggcgggtggaccatgaggtcaggagttcgagatcagcctggccaacatggtgaaaccccgtctctactaaaaatacaaaaattagccgggcgtggtggtgcgtgcctgtagtcccagctactcaggaggctgaggccggagaatctcttggacccaagaggtagaggttgcagtgagcggagatcgtgccactgcactccagcctgggtgacagagactctgtatcaaagaaaaaaaaaaaaaaaagcaggagatactggctgtagataagaaggcagacatctcattgcttgcagagtgaaagaagaaagaactggtgatgttgttactggactactttcgcactagtgtcaagaaggtgagaaatctctcgaatctaggataagagaaaaaataaagaaggtgagaaatctttctcatggtcgttactatttctctctgcagtaagttgtaaaatcatttgttattaaacagggaagttgtggccgggcgcagtggctcatgcctgtaatcccagcactttgggaggccaaggcgggcggatcacgagatcaggaaatcaagaccatcctggccaacatggtgaaacctcgtctgtactaaaaaaatacaaaaattagctgagcgtggtggcgcgtgcctgtaatcccagctactcgggaggctgaggcaggagaatagcttgaaccagggagttggaggttgcagtgagccgagatggtgccactgaacgctagcctgggaacagagcaagactctgtctcaaaaaaaaaaaaaaaaaaaaaaaaaaaagagggaagttgagatggtgtgaattcaaaatcctgcagaaatcatgaaaagatctttgcccactggaaatttcctgaagtgtcgaaggcccctttagagtaggtgatctcaaattttttagcgcttcccatatcaccgcgtggcggcagaattatgtaggcaggagagacagatggttagcgttttccagggcaggtattatgataggacagagagtagggaatttgaggttttggaaaatatatgattgaatctcagttacctagttaaagaaatgaggttggccaggcgcggtggctcacggctgtaatcccataacattgggaggccaaggtgggtggatcacctgaggttgggagttcaagaccagcctgaccaacaaggagaaaccccgtctctactaaaaatacaaaatacctgggcatggtggcacatgcctgtaatcgcagctactcaggaggctgaagcaggagaatggcttgaacctggaagcagaggttgcagtgagccgagatcttgccattgcactccagcctgggcaacaagagcaaaactccatttcaaaataaataaatagaatacaaaaattagctgggcatggtggcgggcacctgtaataccagctactcagggaggctgaggcaggagaattgcttgaacccgggaggtgagggttgcagtgagctgagatcacgccattgcactccagccagggctacagagcaagattccatctcaaaataaataaaaataaataaatagcaacatggttgaagaatagatggcttggaggcctctatgcattaggagaggagatgcagtaaggccgaaagggtgaagaagttggggccgggtgcagtggctcatgcctgtaatcccagcatttagggaggcagacagatcacttgaggtcaggagttcaagttcagcctggctaacatggtgaaaccccgtctctactaaaacataaaaattagccaggcatggtggcacacacctgtaatcccagctactcagggaggctgaggcaggagaactgcttgaacccaggaggtagatgttgcagtgagctgagattgcactactgcactccagcctgggtgaaggagcaaaactctgtctcaaaaataaaagaaaataaattatcctgaatcatggcatagctgggtgtttaaagaacaggagtcaggtgccaatgacttgaatgcattaggtctctgtgttgatgccaattcagatgagaagccagagatgtgtcagggcagcatgggagttttgataaatggtgagcaatgcagttcaataatgtggatatacattagggatagagcaggtaaaaaaagttcaccatattgctttgaggttgtacatgccacacaaaatcaagacccaagatcaaaaacaccttgaatccagaaggagaagatactggatgggtcatgatggaactgcctttggtgcaacagagaaacagaaaacttgtgaattctcttgttcatatgtcttgattttaggctgggcatggtggcgaaacggtggctatcccagctacttaggatcctgaggtggaaagatcaagtgtttgagaccagcctgggcaacatagtgagttcccatttttgcacacacacaaaaatagctggatgtggtggtgcatatctgtagtcccagtcaattgggcggctgaggcaggaggattccttgagtccaggaattcaaggctgcagtgagctatgatggcatcgctgtactcttgcctggacgacagagcaagaccctgtctctaaaaaaaaaatagaaaagaaaaaagaaaagcttaaggggaaagcagagaacatttactatgagtttcctcatatagcttcagctttccctatctttcactttttacctatcatttcctacttaggatcttaaagacctgtcttctttctgacacccaggcttgagtgtggtggcacgatctctgttcactgtaacctccacctcccaggttcaagtgattctcctgcctcagccccccaagtagctgggattacaggcacccaccaccacacctggctaatttttgtatttttagtagagacggggtttcaccatgttggccaggctggtctcaaactcctgacctcaaatgatctgcctcttcggcctcccaaagtgctgggattacaggcgtgagccaccacgcttggccttttttttgaaagaactgtcttcttaaagacctgttctccttaatatttacgttggaagccattgtctaattctttctcatttttcatacataatagcttttgcctgtcaatgtaatttccaatcgtaatagaatcattccttagtaaactacataaaatatcaaacgatggaagtatcattcctttgattatgaatgcagacatttttccccttgtcttcccaagtttagggtcaatatttaaagagaaacccacacaggccccattttttgtcaccatcactgcaccatttcataccctatcaactttaggttttgttcttcatttgtttcagactgggtttgggctttatctgcattttgtcaacattatgtcaccatttcttttccaaaaacttactgtactaggccattattgtgttggtataaagaaatacctgatgccaggtgcggtggctcgtgcctatagttccagcactttgggaggccgaggtgtgtggatcacttgaagtcaggagtttgagaccagcatggccaacatggtgaaacctcgtctctactgaaaatataaaaatttgccaggtgtcgtgtgtgcctgtaatcctagctactctactcaggaggctgaggcaggagaatcgcttgaacctgggaggcggaggttgcagtgagctgagatcacgccactgcactccagccagggcgcagagtgagacttggtttgaaaaaaaaaaaaaaaaaaaaaagcaatttctgactcagagaaagctgggattctgtctaaggaggattccaccagctccctaggggtccgatcctaggatccaagaatgagataccctcgggataagaggaaatgtggttggaagagaatgacatacagcttgtcccttggggtcagaaagtcaaccatccaggaattccccctttgtgctcacgtctgacctgtgctcattaaggatttgagctgccttaggggaagaaatgacagtactgtacacatctagctaatgagcagctttgaaaattgagctcctaggggccacagagactgcaaataatctaccggtgaccactccactcaacagccccgctcatgttaggaaacatcacacctgagtcttgctccagagatgatccctcttgcccaagagtgggttgccttacttggttcatctgcccttcttggggatagatcttccatttcatcttacaattctccaagaaaaaaaatggagaattccttactgatgccttcaaggtaatctgaaatgctcccaataaatgctgtgagaaactgaacaagttttttattttattttttctcccatcttatctggaggacaaccataaagtaagagacaattcagcagaattgttataagtgagattccaaactaatcggtgacccttttcatgatatatttacttcccctgttttcttacaatttataatcagatttcattattttcagctctcattctgtcttctaaatcctagggactccttccctacctaagtatgaattagtcccttcaaaaaggaatctggccaagtgcggtggctcacgcatgtagtcccagcactttgggaaccaaggcggatcaatcacctgaggtcaggagttcaagaccagcctggccaacatggtgaaaccccatctctactaaaaatacaaaaatttagccgggcatggtggcatgcacctgtaatcccagctactcaggaggctgaggcaggagaatcgcttgaacccgggaggcagaggttgcagtgagctgagatggcaccactgcattccagcctggtgacagagcaagactctgtctcataaaacaaacaaataaacaaaaggaatctacagttctctggttttccacattcttttttttattttttgagaaggagtctcgctctgtcaccaggctggagtgcagtggctccatctcagttcactgcaacctccgcctcctgggttccagcgattctcctgcctcagccttttgagtagctgggattacaggcgcccaccaccatgcctggctaacttttgtatttttagtagagatggggtttcaccaagttggccaggatggtcttgatctcttgacctcgtgatccgcccactttggcctcccaaagtgctggaattacagacatgagccaccatgcctggccccatggttttcctcattcttttgactgcagatggggctttgatgagatgtgtctggcttttcaatcttcaccatgtctgttgccagatttcacccttaaataacttgactcttgtccccatctcttgacagtgagaaactccagaagaggaagttgagacccactcacttacatttccagtctttcggtttctcttttaaaaccccaaaacaggccagatgtggtggttcatgcctgtaatcctagcactttgggcttacaggcatgggcaacatagcaacatagcctgggcaacatagcaagagctcatctctgcaaaaaaaaaaaattttttttaattttaaaaatagatttaaaatactaaatataataataataacaataaagtataacacttaaacatgaagtcctcttgatttgtttttattcctctccttcccttcctggggaccaccactctctgaaattggtgggcattcactatgcttagtttaacactattattacatgtaataatagtgccataatttgtgtatctatccccatactgatgtttgtttagcttctttctttcttactttattttgagacaggatctcactctgtcacccagactggagtacagtggctcaatcacggctcacaacaacctcgacctcctgagctcaggtgatcctcctacctcagcctcctgagtagctaggactataggtgcatgccaccatgcctgactagtttttgtattttttgtagagatggggtttcaccatgttgcccaggctggtctctaactcctgggctgaagtgatctgcctgcctctacctcccaaaatgctaggattacaggcgcgagccactgcgcctggctttttcttttttctttttcttttctctgagacagcatcttgctctgtcacccaggctagatagagtacagacacacaacccaggctggtctcaaactcctgggctcaagtgatcctcccacctcggccttccaaagtgctgggattacaggcttgagccactgtgtcaagcccagttctttcttttctgtaccttattacactaggagaaccctcagtgggattttgagcacatgccttctttgctcagccctaagacattcttcttctttttttttttttttttttttttgagatggagtctcactctatcacccaagctggagtgaagtggcgtgatctcagctcactgcaacctgcacctcccaggttcaagcaatcctcttgccttagtctccaagtagctgggattacaggcatgcatcaccacacctggctaatttttaaatttttttagtagagacggggtttcaccatgtcagccaggctggtctcaaactcctgacctcaggtcatctgcccgcctcggcctcccaaagtgctgggattacaggtgtgagccaccgcacccggcctgacattattcttgggatatcttccctgcttcttccttttgcaccccatctcacccccatgtccctgaggcatcaagcattgtccacagctagaaacaaaaatgataggaaaggtcattgcaggccaggcgtggtggctcacgcctgtaatcccagaactttgggaggccaaggtgggcagatcacctggggtcaggagtttgagaccagcctggtcaacatggtgaaatcacgtctctaccaaaaatacaaaaagtagctgggcatggtggtgcacacctataatcccagctactcaggaggctgaggcaggagaatcgcttgaacccgggaggcagaggttgcagtgagccaagatcgtgccactgcactccagcctgagccacagagcgagactccatctcaaaataaataaataaaaggttattgcaggacccctgagcactgtgctaggatacacctatcctaacatctattcatttttcatccctgcaacaccccatgcacatttttataccagttcccatcggagaagtgagaaacttgagtctgctcagagaggttcagggaccttctcatgtcacggatccatgtcacaattgaggcatacatgacggaactgacaactgtctgagtccaagttttatgcaccaatggttgaagcttttataatcatttgtctttctccagtaaaagccagctcccggttgggggcctgaattttgtttttgtttgtgtatttggttttttgtttgtttgtttgagacagagtttcgctctgtcgcccaggctggagtgcagtggcaggatctcggatcactgcaagctccacctcccgggttcacgccattctcctgcctcagcctcctgagtagctggggctacaggcacccaccaccacgtccggctaattttttgtatttttagtagagacggggtttcaccatgttagccaggatggttttgatctcctgacctcgtgaaccgcctgcctcagccttccaaagttctgggattacaggcttgagccgccgcgcccagcttgtttgtgtatttgttttaagaggcagagtcttgctctgttgcccaggctggcatgcagtgaccctatgaaagctcactgcagcttccaactcctgggttcaagtgatcctcccaactcagcctcccaagttgctgggactacagacacgtaccaccgtgcctggctaatttttaatttaatttaatttttaaaaaatgtttactatagatgggtcttgctactttgttcaggctggtctcaaactcctggcctcaagcgacccttctgcctcagcctcccaaagtgctgggattataggtgtgagccgctgtgtctggccaggaactcaatttgtgaagcaaagggctgagatgggctcactgcaccattcaactgttcacatgctgtgattctataatatgtttgccccaactcctgagtcatcattacagaatttccttaacttatgggtttatgagaacagcaggctgatgttttgacattgccggcatacatcaattctttacttcctgctttgggggccccagaatcaatttctcaagaatctggataagccagaaggaacaggaaaggtttggcgctgactcacacaggactcctccaggaatcagtgccaaggctcaggggttgcctgaaccaggggctgcaccagtaataataggaagagtgggtgcagtggctcaagcctgtaatcccagcactttaggaggctgaggcgggtggatcacttcaagtcaggagttcaagaccagcctggccaacatggtgaaaccctatctctgttaaaagtataaaaatcagccaggtgtgttggcacacacctgtagttccagctacttgggaggctgaggcaggaggatcactcaaaccctggaggaagaggttgcagtgagctgagatcccaccactgcactccagcctgggtagcagagcgagactccatctcaaaaaaaaaaagaaaagaaaaaaataatggaaagagggtctgatgcatggcttactgttaaaattttctttattaacattatctgtgatacaaatgaaagacagatgaaggcaaataaaaatagtgggaggggcttatgctgctagataaagagggcttaatttttattttcacaaactgtaatgagaaagggaaattggtgggtgagaaagacactgatagggtacctaggaaggaagtaaagaacaggctgggcatgggggttcatgcctgtcatcccagctatttgggaggctgagagaggaggattgcttgagcccagggggatgaggctacagtgagctatgatcatgccactgcactccagcatggatgacagagagagagagaccctgcaaagaagaaagaaggaaagaaagaaggagggaaggaagggaggaaggaaggaaggaaggaaagaaagagagagagagagagaaaggaaggaaggaaggaaaagagagagaaagaaagagaggggggaaggagggaaggaaggaaggagaaaaagaggagggagagagggagggaaggagggagggagagagagaaagaaagagaaagaaaggaaaggaagaaagaaagaaaaaggagaaagaaagaaagaaggaaagagaaaagaaagaaagagaaagagaaaaagaaagaggagggagagagggagggagggaaagaaaaagaaagtaagaagaaagaaagaaagagaaagaaagaaagacggagggagagagagaaagaaagaaagagagagaaagagaaagagagagagggagagagagaaagaaagaaagaaagaaagaaagaaaaagaaaggaaggaaggaaggaagaaagaaagaaagaaggaaggaaggaaggaaaaaaggtctataacttataactggtttggttttgataatattgacaagatcaagactcatcaacaacatgaaagcaggaaacttctcagacactccagaattctttctcttgggattgtcaggggatccggagctgcagcccatcctcttcatgctgttcctgtccatgtacctggccacaatgctggggaacctgctcatcatcctggccgtcaactctgactcccacctccacacccccatgtacttcctcctctctatcctgtccttggtcgacatctgtttcacctccaccacgatgcccaagatgctggtgaacatccaggcacaggctcaatccatcaattacacaggctgcctcacccaaatctgctttgtcctggtttttgttggattggaaaatggaattctggtcatgatggcctatgatcgatttgtggccatctgtcacccactgaggtacaatgtcatcatgaaccccaaactctgtgggctgctgcttctgctgtccttcatcgttagtgtcctggatgctctgctgcacacgttgatggtgctacagctgaccttctgcatagacctggaaattccccactttttctgtgaactagctcatattctcaagctcgcctgttctgatgtcctcatcaataacatcctggtgtatttggtgaccagcctgttaggtgttgttcctctctctgggatcattttctcttacacacgaattgtctcctctgtcatgaaaattccatcagctggtggaaagtataaagctttttccatctgcgggtcacatttaatcgttgtttccttgttttatggaacagggtttggggtgtaccttagttctggggctacccactcctccaggaagggtgcaatagcatcagtgatgtataccgtggtcacccccatgctgaacccactcatttacagcctgagaaacaaggacatgttgaaggctttgaggaaactaatatctaggataccatctttccattgatgtctcagcttcttgggcttacactgctgggatatgtcagggagaaagaagtaatgagaagtcttgaaagcctgactaatgtctttggggttttctgtttttgtttttgtttttgtttgtttgtttgttttttgagatggagtctcgctctgttgaccagactggagtgtagtgacgcaatcttggctcactgcaacctc

SEQ ID NO: 788 - protein, 329 aa, Homo sapiens
MEFRSCFPGWGAMVRSQLPQPPPPGIKRFSCLGLPRDPELQPILFMLFLSMYLATMLGNLLIILAVNSDSHLHTPMYFLLSILSLVDICFTSTTMPKMLVNIQAQAQSINYTGCLTQICFVLVFVGLENGILVMMAYDRFVAICHPLRYNVIMNPKLCGLLLLLSFIVSVLDALLHTLMVLQLTFCIDLEIPHFFCELAHILKLACSDVLINNILVYLVTSLLGVVPLSGIIFSYTRIVSSVMKIPSAGGKYKAFSICGSHLIVVSLFYGTGFGVYLSSGATHSSRKGAIASVMYTVVTPMLNPLIYSLRNKDMLKALRKLISRIPSFH

SEQ ID NO: 789 - DNA, 1076 bp, Homo sapiens
  source (1)..(1076)
  CDS (201)..(804)
  CDS (851)..(876)
  modified_base (1)..(85): a, t, c, g, unknown or other
  modified_base (120): a, t, c, g, unknown or other
  modified_base (123): a, t, c, g, unknown or other
  modified_base (785): a, t, c, g, unknown or other
  modified_base (848): a, t, c, g, unknown or other
  modified_base (882)..(982): a, t, c, g, unknown or other
  modified_base (994): a, t, c, g, unknown or other
  modified_base (1018): a, t, c, g, unknown or other
nnnnnnnnnnnnnnnnnnnnnnnnnnnnnnnnnnnnnnnnnnnnnnnnnnnnnnnnnnnnnnnnnnnnnnnnnnnnnnnnnnnnngccactttcttgcagaccccgcagtctttctctanagnatcccccctcttaactggcattgtgggcaatggattggtcatcctggtcatgggttaccaggaagaaactgagaagcatgacggacaagtacaggctgcacctgtcagtggccgacctcctctttgtcatcacgcttcccttctgggcagttgatgccgtggcaaactggtactttgggaacttcctatgcaaggcagtccatgtcatctacacagtcaacctctacagcagtgtcctcatcctggccttcatcagtctggaccgctacctggccatcgtccacgccaccaacagtcagaggccaaggaagctgttggctgaaaaggtggtctatgttggcgtctggatccctgccctcctgctgactattcccgacttcatctttgccaacgtcagtgaggcagatgacagatatatctgtgaccgcttctaccccaatgacttgtgggtggttgtgttccagtttcagcacatcatggttggccttatcctgcctggtattgtcatcctgtcctgctattgcattatcatctccaagctgtcacactccaagggccaccagaagcgcaaggccctcaagaccacagtcatcctcatcctggctatcttcgcctgttggctgccttactacattgggatcagcatcgactccttcatcctnctggaaatcatcagcgagggtgtgagcttgagacactgtgcacaagtggatttccatcaccgnagccctagctttcttcactgttgtctgaacccannnnnnnnnnnnnnnnnnnnnnnnnnnnnnnnnnnnnnnnnnnnnnnnnnnnnnnnnnnnnnnnnnnnnnnnnnnnnnnnnnnnnnnnnnnnnnnnnnnnngccacttcttgncatgaccgcaggttttatctctanagnatccccccgtagtggtaatgtggactgccgtaaagctcagcttcagagtccatct

SEQ ID NO: 790 - protein, 209 aa, Homo sapiens
  MOD_RES (195): Variable amino acid
MTDKYRLHLSVADLLFVITLPFWAVDAVANWYFGNFLCKAVHVIYTVNLYSSVLILAFISLDRYLAIVHATNSQRPRKLLAEKVVYVGVWIPALLLTIPDFIFANVSEADDRYICDRFYPNDLWVVVFQFQHIMVGLILPGIVILSCYCIIISKLSHSKGHQKRKALKTTVILILAIFACWLPYYIGISIDSFIXLEIISEALAFFTVV

SEQ ID NO: 791 - DNA, 1030 bp, Homo sapiens
  source (1)..(1030)
  CDS (201)..(830)
  modified_base (30)..(129): a, t, c, g, unknown or other
  modified_base (164): a, t, c, g, unknown or other
  modified_base (167): a, t, c, g, unknown or other
  modified_base (801): a, t, c, g, unknown or other
  modified_base (835): a, t, c, g, unknown or other
  modified_base (888): a, t, c, g, unknown or other
  modified_base (895): a, t, c, g, unknown or other
  modified_base (919): a, t, c, g, unknown or other
  modified_base (952)..(1030): a, t, c, g, unknown or other
caaacctcattcttttatgagaaataaatnnnnnnnnnnnnnnnnnnnnnnnnnnnnnnnnnnnnnnnnnnnnnnnnnnnnnnnnnnnnnnnnnnnnnnnnnnnnnnnnnnnnnnnnnnnnnnnnnnnngcactgggttgcagacccgcacgtctagctgtagnagnataccccctctgatagccccctccaccaggaatatgaagagaatctgggtgacggcgtgggtgggtacaaggaaaaagtccaagttccaggatactcataacaacgctcattattacgtcttctttgaagaacaagaggatgagatcattggttttggccaggagctcaaaaacccccaggaagagactctacaagcttttgacagccattgtggctacaccatatgtggggacagtgaagacatggtgtgtacccccaagtccgatgagttcaacccgtgtgaagacataatgggctacaagttcctgagaattgtggtgtggttcgttagtctgctggctctcctgggcaatgtctttgtcctgcttattctcctcaccagccactacaaactgaacgtcccccgctttctcatgtgcaacctggcctttgcggatttctgcatggggatgtacctgctcctcatcgcctctgtagacctctacactcactctgagtactacaaccatgccatcgactggcagacaggccctgtgtgcaacacgggctgtttcttcactgtctttgcaagcgagttatcggtgtatacgctgacggtcatcaccctggagcgctggtatgccatcaccttcnccatgcgcctggacgggaagatcccctcaagacncaatgtccatcatgggtgggagctggggttgctggcttcttctcgcctgcttnctttggnggggatagtagctttgcaaagtantatctgcctggcatggaacggaaccctttgctnnnnnnnnnnnnnnnnnnnnnnnnnnnnnnnnnnnnnnnnnnnnnnnnnnnnnnnnnnnnnnnnnnnnnnnnnnnnnnn

SEQ ID NO: 792 - protein, 210 aa, Homo sapiens
  MOD_RES (201): Variable amino acid
MKRIWVTAWVGTRKKSKFQDTHNNAHYYVFFEEQEDEIIGFGQELKNPQEETLQAFDSHCGYTICGDSEDMVCTPKSDEFNPCEDIMGYKFLRIVVWFVSLLALLGNVFVLLILLTSHYKLNVPRFLMCNLAFADFCMGMYLLLIASVDLYTHSEYYNHAIDWQTGPVCNTGCFFTVFASELSVYTLTVITLERWYAITFXMRLDGKIPS

SEQ ID NO: 793 - DNA, 1017 bp, Homo sapiens
  source (1)..(1017)
  CDS (201)..(534)
  CDS (561)..(817)
  modified_base (9)..(10): a, t, c, g, unknown or other
  modified_base (12)..(14): a, t, c, g, unknown or other
  modified_base (16): a, t, c, g, unknown or other
  modified_base (20): a, t, c, g, unknown or other
  modified_base (31): a, t, c, g, unknown or other
  modified_base (275): a, t, c, g, unknown or other
  modified_base (356): a, t, c, g, unknown or other
  modified_base (375): a, t, c, g, unknown or other
  modified_base (400): a, t, c, g, unknown or other
  modified_base (417)..(418): a, t, c, g, unknown or other
  modified_base (433): a, t, c, g, unknown or other
  modified_base (502): a, t, c, g, unknown or other
  modified_base (506)..(508): a, t, c, g, unknown or other
  modified_base (510)..(511): a, t, c, g, unknown or other
  modified_base (547): a, t, c, g, unknown or other
  modified_base (550): a, t, c, g, unknown or other
  modified_base (552): a, t, c, g, unknown or other
  modified_base (554)..(555): a, t, c, g, unknown or other
  modified_base (603): a, t, c, g, unknown or other
  modified_base (607): a, t, c, g, unknown or other
  modified_base (627): a, t, c, g, unknown or other
  modified_base (665): a, t, c, g, unknown or other
  modified_base (722)..(723): a, t, c, g, unknown or other
  modified_base (740): a, t, c, g, unknown or other
  modified_base (761)..(762): a, t, c, g, unknown or other
  modified_base (833): a, t, c, g, unknown or other
  modified_base (837)..(936): a, t, c, g, unknown or other
  modified_base (970): a, t, c, g, unknown or other
  modified_base (972): a, t, c, g, unknown or other
  modified_base (975): a, t, c, g, unknown or other
  modified_base (995): a, t, c, g, unknown or other
  modified_base (1007): a, t, c, g, unknown or other
cgttgtagnntnnncnccgnctcggctctgnagaacacttctggcctttgggacctgtggtgtgtgacctttggcttgccctgggctctgtggtcagcactgcctcagttctgaatctgctcatcatcagctttgacaggtacttctgtgtcacaaaacctctgacctacccagtcaagcggcccacaaaaatggcaggtatgatgattgcagctgcctgggtcctctctttcatcctctgggctccagccattctcttctggcagttcattgtnggggtgagaactgtggaggatggggagtgctacattcagtttttttccaatgctgctgtcacctttggtgcggctcttgcngccttctctttgccagtgntcatcatgactgtgctctattggcncatatcccgagccagcnngagccggctgaaganggacaagaaggagcctgttgccaaccaagaccccgtttctccaagtctggtgcccggaagggtggtgangccnnncnntgccaccatgcccagcagtgacggtggcctggggcncancnanntccagatggcaaagcccccaggggtcctgtgactgaaaactgtgttcngggngaggagaaggggagctccantgactccacctcagtcagtgctgctgcctctggtgtgngaggtggtgaactgcccccgggtggaagcacaggttgcactttcctgggccgttccnnggtggggactcctagcnacctgcgtctgagtggccccnngacccgaaagtgcctcatgtccccactgctcccccgtggtgtgggggggtcctaaggaatataagggtatngctnnnnnnnnnnnnnnnnnnnnnnnnnnnnnnnnnnnnnnnnnnnnnnnnnnnnnnnnnnnnnnnnnnnnnnnnnnnnnnnnnnnnnnnnnnnnnnnnnnnnagcgtagacttagcatgactagcacttccgactncnagnagcatccccgtctttccaanattatcttccanagtctctata

SEQ ID NO: 794 - protein, 196 aa, Homo sapiens
  MOD_RES (25): Variable amino acid
  MOD_RES (52): Variable amino acid
  MOD_RES (59): Variable amino acid
  MOD_RES (67): Variable amino acid
  MOD_RES (73): Variable amino acid
  MOD_RES (78): Variable amino acid
  MOD_RES (101)..(104): Variable amino acid
  MOD_RES (126)..(127): Variable amino acid
  MOD_RES (134): Variable amino acid
  MOD_RES (147): Variable amino acid
  MOD_RES (166): Variable amino acid
  MOD_RES (172): Variable amino acid
  MOD_RES (179): Variable amino acid
MMIAAAWVLSFILWAPAILFWQFIXGVRTVEDGECYIQFFSNAAVTFGAALXAFSLPVXIMTVLYWXISRASXSRLKXDKKEPVANQDPVSPSLVPGRVVXXXXATMPSSDDGKAPRGPVTENCVXXEEKGSSXDSTSVSAAASGVXGGELPPGGSTGCTFLGRSXVGTPSXLRLSGPXTRKCLMSPLLPRGVGGS

SEQ ID NO: 795 - DNA, 840 bp, Homo sapiens
  source (1)..(840)
  CDS (203)..(640)
  modified_base (1)..(70): a, t, c, g, unknown or other
  modified_base (85)..(87): a, t, c, g, unknown or other
  modified_base (99): a, t, c, g, unknown or other
  modified_base (101): a, t, c, g, unknown or other
  modified_base (119): a, t, c, g, unknown or other
  modified_base (123): a, t, c, g, unknown or other
  modified_base (126)..(127): a, t, c, g, unknown or other
  modified_base (130)..(131): a, t, c, g, unknown or other
  modified_base (142): a, t, c, g, unknown or other
  modified_base (664): a, t, c, g, unknown or other
  modified_base (801)..(840): a, t, c, g, unknown or other
nnnnnnnnnnnnnnnnnnnnnnnnnnnnnnnnnnnnnnnnnnnnnnnnnnnnnnnnnnnnnnnnnnnnnnggatttgtttttggnnnggcgaactccgnangctaaaaatccgtgccgngggnggnnatnncttccccttanctgctccacgctttgactctggcgccgctgccggcgccgctggcggtggctgtaccagttgtctacgcggtgatctgcgccgtgggtctggcgggcaactccgccgtgctgtacgtgttgctgcgggcgccccgcatgaagaccgtcaccaacctgttcatccttttcctggccatcgccgacgagctcttcacgctggtgctgcccatcaacatcgccgacttcctgctgcggcagtggcccttcggggagctcatgtgcaagctcatcgtggctatcgaccagtacaacaccttctccagcctctacttcctcaccgtcatgagcgccgaccgctacctggtggtgttggccactgcggagtcacgccgggtggccggccgcacctacaacgccgcacgcgcggtgagcctgaccgtgtgggggatcgacgcactgcaaaggctggccttgaagaacttcgcccgggtgaacaacaaacatgaacggcacctatagcaactttgttttatcatatccatngcctaatggtgaaacacataacatgtgtcacactaaaactggaataggtcgtgcgcctagacgccgtagtagaaacaaatatacagagctaatagaacgaataagtaaagtaaaatataaaaaaaaataaaaaaaannnnnnnnnnnnnnnnnnnnnnnnnnnnnnnnnnnnnnnn

SEQ ID NO: 796 - protein, 145 aa, Homo sapiens
VYAVICAVGLAGNSAVLYVLLRAPRMKTVTNLFILFLAIADELFTLVLPINIADFLLRQWPFGELMCKLIVAIDQYNTFSSLYFLTVMSADRYLVVLATAESRRVAGRTYNAARAVSLTVWGIDALQRLALKNFARVNNKHERHL

SEQ ID NO: 797 - DNA, 2596 bp, Homo sapiens
  source (1)..(2596)
  CDS (201)..(218)
  CDS (1732)..(2153)
  CDS (2186)..(2396)
  modified_base (6): a, t, c, g, unknown or other
  modified_base (163): a, t, c, g, unknown or other
  modified_base (800): a, t, c, g, unknown or other
  modified_base (1578): a, t, c, g, unknown or other
  modified_base (1628): a, t, c, g, unknown or other
  modified_base (1722): a, t, c, g, unknown or other
  modified_base (1729): a, t, c, g, unknown or other
  modified_base (2370): a, t, c, g, unknown or other
  modified_base (2402): a, t, c, g, unknown or other
  modified_base (2440): a, t, c, g, unknown or other
attctnctagagtcgaaacgtgcgggtttgcaagtcaaaggcacatctaaagtatagcttttttaatgtttccaggtaaattgttttataacaagttgtgataagtcatgtataaccaacaataatatttttcataaaatacttgtcaaagtaagtttcacanagacaaaatagagtagagctaagctaattcattggttatggacagtaaggtgcaagtgagtggtacaagagtgcagactcacagtttaaattattctcttaccattagacgcaggcatatagggtctgcacatgttacaatcaaaaccaatgtctgctacattttccacttcttcctcagtatttaagttctgacgaactgcatgcatccatctaaaaagaccatatttgtacatttttttaaaaaaatggaatatactgagaactgctaccttttaaaacctgtaacactgagtcatcaaacttaaaagccctaagcctcacatgctcctcctaccttgcccttttctcctaactatccctattaacagaaaaactttcatagagctaaggaggaaataaaaaggaatgagaacaactattagagaggaagcaaagcacattacataaggaagctaattattttatcatcatatattaaatatttcaaagacagcaaggaagctagttagggcaaacacaaaggtattcagaaaacggcaaatggcagtgctagcatatatgggctccaggcaatgcatctaacttgaagtagacatatatcatggaaagcgatgtgaaggtaatggggggatctntagagtcaacgtgggggcatgcaagctaagcaagactattttctagtaatgaatcattttaaagaataccctttttatcccacctgctaactgttaagagaatgttttataatcactctggtcatggcctgtaagtttcttttctaaacttcttttcaggatacatatttactaacttgctttcaaatgaatatggtcatgtctatgcagcaagtttcttttctttcttcttttcttcttctcttttttctttttcttttctttcttttttaaggcaagatttcgctctgtagcccaggttgaagtgcagttgtagaaacatgactcactgtagcctcaacctctctggctcaagtgatctgcccacttcagcctcccagccaagtagctgggactgcaggtgtgcaccaccctgctccactaagttatttagttttttgtagacatggattctcagtgtgttgcccaggctagtcttgaactcctgggctcaagccatcttcctgccttgacctcccaaagtgataagattacaggcttgagacattatgcccaacctctttttctttttctttctttctttcttttttttttttttttttttgagacagtcttgctcttgttgcccaggctggagtgcagtggcatgatcttggctcaccgcaacctccacttcccgggttcatgcgattctcctgcctcagcctcccgagtagctgggattacaggcatgcaccaccacacccagctgattttgtttttttagtagagggggatnctctagagtcgagcggcgggcatgcaagttaggccttgtccagcctcatntccttcattccggtccagctcaactggcacagggaccagccggtctcttgaggtgggctgaacctgcccaaacaacctggccaactggacgccntgggagnaggccgtttgggagcccgacgtgaggccagagaactgtgactccagcctgaatcgaacctacgccatctcttcctcgctcatcagcttctacatccccatggccatcatgatcgtgacctacacgcgcatctaccgcatcgcccaggtgcagatccgcaggatttcctccctggagagggccgcagagcacgtgcagagctgccggagcagcgcaggctgcgcgcccgacaccagcctgcggttttccatcaagaaggagaccgaggttctcaagaccctgtcggtgatcatgggggtcttcgtgtgttgctggctgcccttcttcatccttaactgcatggtccctttctgcagtggacaccccaaaggccctccggccggcttcccctgcgtcagtgagaccacattcgacgtcttcatctggttctgctgggccaactcctcactcaacccagtcactatgccttcaacgccgacttccggaaggtgtttgcccagctgctggggtgcagccacgtctgctcccgcacgccggtggagacgatgaacatcagcaatgagctcatctcctacaaccaagacacggtcttccacaaggaaatcgcagctgcctacatccacatgagccgcggggatcctntagagtcaccgggaggcagcaagtaagcaaanaaacctgtcttttccagtcaatgaagtattttaacttnttagttaaactttttcaaaataatttttttcttttcagaatgcatcacattacttaactcacttcaaggattggcccagccatcaaccagtgtcatgggggacaaagccgtgtcattttaaggtattaaacagacaatgaaatctgccacaatttt

SEQ ID NO: 798 - protein, 216 aa, Homo sapiens
  MOD_RES (209): Variable amino acid
MDSKVQAVWEPDVRPENCDSSLNRTYAISSSLISFYIPMAIMIVTYTRIYRIAQVQIRRISSLERAAEHVQSCRSSAGCAPDTSLRFSIKKETEVLKTLSVIMGVFVCCWLPFFILNCMVPFCSGHPKGPPAGFPCVSETTFDVFICHYAFNADFRKVFAQLLGCSHVCSRTPVETMNISNELISYNQDTVFHKEIAAAYIHMSRGDPXESPGGSK

SEQ ID NO: 799 - DNA, 2270 bp, Homo sapiens
  source (1)..(2270)
  CDS (201)..(1288)
  CDS (1365)..(2070)
gaggcgtgtccctgggcgtgtcctcccggagccccgccccggtgctggttagcctcggccccgggaggttgcgccggctctggctcagcggcggctccggtggcagcggcggtggcggctaggcgggctcggcggctcctgtccctcgggcggctggcctcgctgcccagggcgcccggacacacgtgggcggctcagcgatggcccgcgccccgcgacgtggcgggcaggcaccgggtcgcggaccgctgagcccgagtgagccggggccgcgctcccgccttcggccgggccgcccgggatggccgtggcgcctctgcggggggcgctctgctgtggcagctgctggcggcgggcggcgcggcactggagatcggccgcttcgacccggagcgcgggcgcgggctgcgccgtgccaggcggtggagatccccatgtgccgcggcatcggctacaacctgacccgcatgcccaacctgctgggccacacgtcgcagggcgaggcggctgccgagctagcggagttcgcgccgctggtgcagtacggctgccacagccacctgcgcttcttcctgtgctcgctctacgcgcccatgtgcaccgaccaggtctcgacgcccattcccgcctgccggcccatgtgcgagcaggcgcgcctgcgctgcgcgcccatcatggagcagttcaacttcggctggccggactcgctcgactgcgcccggctgcccacgcgcaacgacccgcacgcgctgtgcatggaggcgcccgagaacgccacggccggccccgcggacgcccacaagggcctgggcatgctgcccgtggcgccgcggcccgcgcgccctcccggagacctgggcccgggcgcgggcggcagtggcacctgcgagaaccccgagaagttccagtacgtggagaagagccgctcgtgcgcaccgcgctgcgggcccggcgtcgaggtgttctggtcccggcgcgacaaggacttcgcgctggtctggatggccgtgtggtcggcgctgtgcttcttctccaccgccttcactgtgctcaccttcttgctggagccccaccgcttccagtaccccgagcgccccatcatcttcctctccatgtgctacaacgtctactcgctggccttcctgatccgtgcggtggccggagcgcagagcgtggcctgtgaccaggaggcgggcgcgctctacgtgatccaggagggcctggagaacacgggctgcacgctggtcttcctactgctctactacttcggcatggccagctcgctctggtgggtggtcctgacgctcacctggttcctggctgccgggaagaaatggggccacgaggcatcgaggccacggcagctatttccacatggctgcctggggcctgcccgcgctcaagaccatcgtcatcctgaccctgcgcaaggtggcgggtgatgagctgactgggctttgctacgtggccagcacggatgcagcagcgctcacgggcttcgtgctggtgcccctctctggctacctggtgctgggcagtagtttcctcctgaccggcttcgtggccctcttccacatccgcaagatcatgaagacgggcggcaccaacacagagaagctggagaagctcatggtcaagatcggggtcttctccatcctctacacggtgcccgccacctgcgtcatcgtttgctatgtctacgaacgcctcaacatggacttctggcgccttcgggccacagagcagccatgcgcagcgccgcggggccggaggccggagggactgctcgctgccagggggctcggtgcccaccgtggcggtcttcatgctcaaaattttcatgtcactggtggtggggatcaccagcggcgtctgggtgtggagctccaagactttccagacctggcagagcctgtgctaccgcaagatagcagctggccgggcccgggcaaggcctgccgcgcccccgggagctacggacgtggcacgcactgccactataaggctcccaccgtggtcttgcacatgactaagacggacccctctttggagaaccccacacacctctagccacacaggcctggcgcggggtggctgctgccccctccttgccctccacgccctgccccctgcaccccctagagacagctgactagcagctgcccagctgtcaaggtcaggcaagtgagcaccggggactgaggatcagggcgggaccccgtgaggctcattaggggagatgggggtctcctctaatgcgggggctggac

SEQ ID NO: 800 - protein, 597 aa, Homo sapiens
MARAPRRGGQAPGRGPLSPSEPGPRSRLRPGRPGWPWRLCGGRSAVAAAGGGRRGTGDRPLRPGARARAAPCQAVEIPMCRGIGYNLTRMPNLLGHTSQGEAAAELAEFAPLVQYGCHSHLRFFLCSLYAPMCTDQVSTPIPACRPMCEQARLRCAPIMEQFNFGWPDSLDCARLPTRNDPHALCMEAPENATAGPADAHKGLGMLPVAPRPARPPGDLGPGAGGSGTCENPEKFQYVEKSRSCAPRCGPGVEVFWSRRDKDFALVWMAVWSALCFFSTAFTVLTFLLEPHRFQYPERPIIFLSMCYNVYSLAFLIRAVAGAQSVACDQEAGALYVIQEGLENTGCTLVFLLLYYFGMASSLCYFHMAAWGLPALKTIVILTLRKVAGDELTGLCYVASTDAAALTGFVLVPLSGYLVLGSSFLLTGFVALFHIRKIMKTGGTNTEKLEKLMVKIGVFSILYTVPATCVIVCYVYERLNMDFWRLRATEQPCAAPRGRRPEGLLAARGLGAHRGGLHAQNFHVTGGGDHQRRLGVELQDFPDLAEPVLPQDSSWPGPGKACRAPGSYGRGTHCHYKAPTVVLHMTKTDPSLENPTHL

SEQ ID NO: 801 - DNA, 1234 bp, Homo sapiens
  source (1)..(1234)
  CDS (201)..(1034)
ggaggccttggaatgcaacccctgcagataatggggaactactgtacttgacttacccttgtgtctcccttcaggaaggatcgtatgaatgccccatggaaaattacaatcaaacgtcaactgatttcatcttattggggctgttcccaccatcaaaaattggccttttcctcttcattctctttgttctcattttcctaatggctctaattggaaacctatccatgattcttctcatcttcttggacacccatctccacacacccatgtatttcctgcttagtcagctctccctcattgacctaaattacatctctacgattgttcctaagatggcttctgattttctgtatggaaacaagtctatctccttcattgggtgtgggattcagagtttcttcttcatgacttttgcaggtgcagaagcgctgctcctgacatcaatggcctatgatcgttatgtggccatttgctttcctctccactatcccatccgtatgagcaaaagaatgtatgtgctgatgataacaggatcttggatgataggctccatcaactcttgtgctcacacagtatatgcattccgtatcccatattgcaagtccagagccatcaatcattttttctgtgatgttccagctatgttgacattagcctgtacagacacctgggtctatgagtacacagtgtttttgagcagcaccatctttcttgtgtttcccttcactggcattgcgtgttcctatggctgggttctccttgctgtctaccgcatgcactctgcagaagggaggaaaaaggcctattcgacctgcagcacccacctcactgtagtaactttctactatgcaccctttgcttatacctatctatgtccaagatccctgcgatctctgacagaggacaaggttctggctgttttctacaccatcctcaccccaatgctcaaccccatcatctacagcctgagaaacaaggaggtgatgggggccctgacacgagtgattcagaatatcttctcggtgaaaatgtagacatacgttctgtgttagagtcaaagcgctaggttcatatcaactcagcagtgtacagcagtgaagaaaaacattattacatgcccagtatgtcaaacagagattaatccagaatgtttgtcttttaatttagtcttgacattatagttgcatattctaagacatctattttgtttctgtttgtgtttctttttatcaaa

SEQ ID NO: 802 - protein, 277 aa, Homo sapiens
MALIGNLSMILLIFLDTHLHTPMYFLLSQLSLIDLNYISTIVPKMASDFLYGNKSISFIGCGIQSFFFMTFAGAEALLLTSMAYDRYVAICFPLHYPIRMSKRMYVLMITGSWMIGSINSCAHTVYAFRIPYCKSRAINHFFCDVPAMLTLACTDTWVYEYTVFLSSTIFLVFPFTGIACSYGWVLLAVYRMHSAEGRKKAYSTCSTHLTVVTFYYAPFAYTYLCPRSLRSLTEDKVLAVFYTILTPMLNPIIYSLRNKEVMGALTRVIQNIFSVKM

SEQ ID NO: 803 - DNA, 1528 bp, Homo sapiens
  source (1)..(1528)
  CDS (201)..(1119)
  CDS (1216)..(1328)
ttttttccacactacaacttaagtcgtaagcaactatagaatatggaccatgtccttcttccttgtcttcctctctatccccattacagggctctattcagacgctggcttcttgtaagtgtattcctttatccaatagtagatgcctcctagaaggcttgagtgcactggaaattgaaactctcactttcaacttggagatggagagccccaatcgaaccaccattcaggagtttatcttctccgctttcccttattcctgggttaagtctgttgtctgctttgttccactgctcttcatctatgctttcattgttgttggaaacctggtcatcatcacagtggtccagttgaatactcacctccacactcccatgtatacttttatcagtgctctttctttcctggagatttggtataccacagccacaatcccaaagatgctgtctagcctgcttagtgagaggagcatttccttcaatggttgtctcctgcagatgtatttcttccattccaccggcatctgtgaggtgtgtctcttgacagttatggcctttgaccactacctggccatatgcagccctcttcattatccctctatcatgacccccaagctatgtacccaactgactttaagttgctgtgtttgtggctttatcacaccccttcctgagattgcctggatctctacactgccattttgtggttcgaatcaccttgaacatatcttctgtgacttcctcccagtgctgcgtctggcctgcacagacacacgagccatcgtcatgattcaggtagtggatgtcattcatgcagtggagattattacagctgtgatgctcatcttcatgtcctacgatggtattgtggctgtaattctacgtattcattcagctggaggccgccgcacagcattttccacgtgtgtctctcacttcattgtcttttcgctcttctttggcagtgtgactctcatgtacctacgcttctctgccacctactctttgttctgggatatagccattgctctggcctttgcagttttgtctcccttcttcaaccccattatctatagcctgaggaataaagaaataaaagaagctataaaaaagcacataggtcaagctaagatatttttttccgtaagaccagggacctcaagtaagatattttagttgagattctgtatagttgctggttcctcttcaccttcagctctcagcaatctgtcttttcctatcaaccttctattcaaactggtctcccaaagctcaccaaaccaaaccaaaccaaaccaaacaaaaggaaacaaattcagcaatagctaacgtcaataacttctatttaatcattactcaattagacatatttttcaatctgactttattaattacagtttctgccactcaagttattcaaagtaaattcattttgttgaaatgttctgcataaacatttactttaattttaaagcaattaaaatatttgtctgtaagacctggtaatttaaaaagtatccttcataaga

SEQ ID NO: 804 - protein, 343 aa, Homo sapiens
MESPNRTTIQEFIFSAFPYSWVKSVVCFVPLLFIYAFIVVGNLVIITVVQLNTHLHTPMYTFISALSFLEIWYTTATIPKMLSSLLSERSISFNGCLLQMYFFHSTGICEVCLLTVMAFDHYLAICSPLHYPSIMTPKLCTQLTLSCCVCGFITPLPEIAWISTLPFCGSNHLEHIFCDFLPVLRLACTDTRAIVMIQVVDVIHAVEIITAVMLIFMSYDGIVAVILRIHSAGGRRTAFSTCVSHFIVFSLFFGSVTLMYLRFSATYSLFWDIAIALAFAVLSPFFNPIIYSLRNKEIKEAIKKHIALSNLSFPINLLFKLVSQSSPNQTKPNQTKGNKFSNS

SEQ ID NO: 805 - DNA, 1330 bp, Homo sapiens
  source (1)..(1330)
  CDS (201)..(1130)
ttgctctccatcacatttccagaattccagtatgctaacaatcattatattagttaaataaattaataaataaatctaattaattaaactctttacaatacaataaatataaaaacaccacatataggatttacagtattaaaatatgacttagacttaactcttttctctacttccacatttagatggccagaaaagatatggctcacatcaattgcacccaggcgacagagtttattcttgtgggcctcacagaccatcaggagttgaagatgcccctctttgtgctattcttatccatctacctcttcacagtggtaggcaacttgggtttgatcctactcattagagcggatacaagtctcaacacaccaatgtacttctttcttagcaacctagcttttgtggatttctgttactcttctgtcattacacccaaaatgcttgggaatttcttgtacaaacaaaatgttatatcctttgatgcatgtgctactcaactgggctgctttctcaccttcatgatatcagaatccttgctactggcttccatggcctatgaccgatatgtggccatttgtaaccctctattgtatatggttgtaatgactccaggaatctgcattcaacttgtagcagttccttatagctatagcttcctaatggcactatttcacaccatcctcaccttccgcctctcctattgccactccaacattgtcaaccatttctattgtgatgacatgcctctcctcaggctaacttgctcagacactcgcttcaaacagctctggatctttgcctgtgctggtatcatgttcatttcctcccttctgattgtctttgtctcctacatgttcatcatttctgccatcctgaggatgcattcagctgagggaagacagaaggctttctcgacgtgtggctctcacatgctggcagtcaccatattctatgggaccctcatttttatgtacttacagcctagctctagccatgccctggacacagacaagatggcctctgtcttctacacagtgatcattcccatgttgaatcccttaatctatagcctccagaataaggaggtgaaagaagctctgaagaaaatcattatcaataaaaactagagttttgtgtttataaaattaagaaagtaacttgagtaaggaaaaatggacttctttcatggtatgatttttttcccagtataagttatcaggatccttgtttctcaatatgtgatgtatacatatattttcgctgtgtaatacaattttctagagaatttctcttagaacgttaggtataaaagtaactataagaattt

SEQ ID NO: 806 - protein, 309 aa, Homo sapiens
MAHINCTQATEFILVGLTDHQELKMPLFVLFLSIYLFTVVGNLGLILLIRADTSLNTPMYFFLSNLAFVDFCYSSVITPKMLGNFLYKQNVISFDACATQLGCFLTFMISESLLLASMAYDRYVAICNPLLYMVVMTPGICIQLVAVPYSYSFLMALFHTILTFRLSYCHSNIVNHFYCDDMPLLRLTCSDTRFKQLWIFACAGIMFISSLLIVFVSYMFIISAILRMHSAEGRQKAFSTCGSHMLAVTIFYGTLIFMYLQPSSSHALDTDKMASVFYTVIIPMLNPLIYSLQNKEVKEALKKIIINKN

SEQ ID NO: 807 - DNA, 8367 bp, Homo sapiens
  source (1)..(8367)
  CDS (201)..(1248)
  CDS (8037)..(8167)
ataagagccttgctggcttttttttttttttttttttttagagatttcgtagtttcctggtaaccattcagtcatctatttcaacaccctgacatgacataaaggcaggcgtggaaccacacgttcaccacacagacacacacctccttgctggagcattcactaggcgaggcgctccatcggactcactagccgcactcatgaatcggcaccatctgcaggatcactttctggaaatagacaagaagaactgctgtgtgttccgagatgacttcattgtcaaggtgttgccgccggtgttggggctggagtttatcttcgggcttctgggcaatggccttgccctgtggattttctgtttccacctcaagtcctggaaatccagccggattttcctgttcaacctggcagtggctgactttctactgatcatctgcctgcccttcctgatggacaactatgtgaggcgttgggactggaagtttggggacatcccttgccggctgatgctcttcatgttggctatgaaccgccagggcagcatcatcttcctcacggtggtggcggtagacaggtatttccgggtggtccatccccaccacgccctgaacaagatctccaatcggacagcagccatcatctcttgccttctgtggggcatcactattggcctgacagtccacctcctgaagaagaagatgccgatccagaatggcggtgcaaatttgtgcagcagcttcagcatctgccataccttccagtggcacgaagccatgttcctcctggagttcttcctgcccctgggcatcatcctgttctgctcagccagaattatctggagcctgcggcagagacaaatggaccggcatgccaagatcaagagagccatcaccttcatcatggtggtggccatcgtctttgtcatctgcttccttcccagcgtggttgtgcggatccgcatcttctggctcctgcacacttcgggcacgcagaattgtgaagtgtaccgctcggtggacctggcgttctttatcactctcagcttcacctacatgaacagcatgctggaccccgtggtgtactacttctccagcccatcctttcccaacttcttctccactttgatcaaccgctgcctccagaggaagatgacaggtgagccagataataaccgcagcacgagcgtcgagctcacaggggaccccaacaaaaccagaggcgctccagaggcgttaatggccaactccggtgagccatggagcccctcttatctgggcccaacctctccttaaataaccatgccaagaagggacattgtcaccaagaaccaggatctctggagaaacagttgggctgttgcatcgagtaatgtcactggactcggcctaaggtttcctggaacttccagattcagagaatgcgatttagggaaacggtggcagatgagtgggagactggttgcaaggtgtgaccgcaggaatcctggaggaatagagagtaaagcttctaggcatctgaaacttttgcttcatctctgacgctcgcaggactgaagatgggcaaattgtaggcatttctgctgagcagagttggagccagagatctacttgtgacttgttggccttcttcccacatctgcctcagactggagggggctcagctcctggggtgatatctagcctgcttgtgagctctagcagggataaggagagctgagattggagggaattgtgttgctcctggagggagcccaggcatcattaaacaagccagtaggtcacctggcttccgtggaccaattcatctttcagacaagctttagcagaaatggactcagggaagagactcacacgctttggttaatatctgtgtttccggtgggtgtaataggggattagccccagaagggactgagctaaacagtgttattatgggaaaggaaatggcattgctgctttcaaccagcgactaatgcaatccattcctctcttgtttatagtaatctaagggttgggcagttaaaacggcttcaggatagaaagctgtttcccacctctgtttgcttttaacattaaaagggaaatgtgcctctgccccacagttagaggggtgcacgttcctcctggttccttcgcttgtgtttctgtacttaccaaaaatctaccatttcaataaattttgataggagacagtctggcgttgctatatctgggttatggttcacagaaatggacttcttacttaagcagagacctttatgggttgttaactctgtcctggtagaaaactactccacactgcaaagtaagaaagagacacagacactgagctacatcatgaaacaactaagcagaaattacacctgtgtctaaacaaagatagaaagagctgggattaaaaataatttggaaggatagtacagataggatcgcaagagcacttacattttattagagtttggtgaatattgctcttagtatttgtgcattaaacagggaatcaaggccaggtgcaatggttcatgcctgtaatcccagcactttgaggggaccgaggtgggcagatcaccctgaggtcaggagtttgagaccagcctggacaacatggcgaaaccccacttctactaaaaatacaagaaaaattagccaggcatggtggcggccgcttgtagtcccagctactgggaaggctgggggaagaagaattgcttgaacccaggaggcggaggttgcagtgagccgaggtggtgtgcctgcactccagcctgggggacagagcaagacttcatctcaaataataataataaataatataaaaagggaatcaagccaggcagatatttttccataggagggggaagagcgagcttcctatggaatggtttcagttcccaattcagagaaggaaaggagatgtactggtttgagtctgtgatcagtccaagtttctgttacgctttcatttctaactctgtcagtccttgattatttggcaagacgaggcttgcttcaacctcctgacatgaacacagataaggaatttagagacaggctcccagctctgggtgaatgacagtaaatgaagaaaggtggatgctctggaattacctctgtgctttcagagcagttggcttgtctgtatcaccaagcaatgtacaggtaaaaagccaaaagcaaggatcaccttaaagaggaagagatgtcagggatgagctcagaggaaaatagggattccccagcctcggaggcatgagtcagtggggagcctcgttgtgaaacgcggattcgttcaagggatgaggtggtttggggtgtttggacctccacagctcacattcattcactgattcaggcattccatcagttctttgttttttttttttttttgagaccgagtctcactctgtcatctaggctggagtgcagtggtgtgatctgggttcactgcagcctctgcctcctgggttcaagtgattctcctacctcagcccccccagtagctgggattacaggtgtgcaccaccatgcctggctaatttttgtatttttagtagaggtggggtctcgccatgttgcccaggctggtcttgaactcctgacctcaggtgatccacctgcctcagcctcccaaagtgctgggattacaggtgtgagccactgtgcccagcctcattccatcagttttatgtattaagcaccaactgtgtgccaggcgctgttctgggtggtggagatagaacaagaaacaaggcagccacagtcctcttctcatcgagctgacttttggagtggggagacaggcaggaataaaaaggagccttggggtggctatgggtgtcatgactatggtggagtgggacaatggggataaaaagtaaccggggctggggtgactgggatggcttctatgaggcattgaccctgagctgagccatgaatgactaaacagaaaagcaatgcaaaagtctggggaaaagacacgccaagcagagggaatggtaagtgcaaaggccctgaggtgagaattaggttggtgactgcgtgttcatttcctgtggctgggtggcttggaacaatagaaatgtattctcccacagatctagaagctagaagtgcagaatcaaggtgttggcagggttggttccatctggaggctaagggaaaatgtttcatgcctcactccgagctttcggagactgctggcactcttggactttccttggcttgtagacgcttcactccaatctctgcccctgtcaccacatggtggtcccctctgtgtcctctcttcttacagacacctgtcttttcttctcttttttttttggtctgtatttgagacagagtctcgctctgtcacccaggctggaatgcagtggcttcatctcggctcactgcaactctgcctcccgggctcaagcggttctccttcctcagcctctcacacagctgggattataggcatgcacccccacacctgtctaatttttctatttttagtagagacagggttttgccatgttggctaggctggtcttgaactcctgacctcaggtgatccacctgcctcagcctcccaaagtgttgggattacaggtgtgatccagcaggcctggccataaatatgcctgtctttataacccaccctaatccaggatgctctcatcttgagatctttaccttagttatacctacaaagacccttattccaaataaggttgtattctaaggtttggggtgaacatagctgttgggaaccagaactcaaccgactatagtgaggaacaatgtggccagcatgatgagcgtggggcctgccatatagtgaggttgtgatcctctttcagacaaaagtaatgaaagacttgagatgaagatcatactatatttaaatgaaaaagtttctaaacagaatatgatatccattttcttttaaaatacgtgtatctgtgtacttgtgtgtggaacaacagactacaagaatatacaccaggccgggcacagtggctcacccctgtaacctcagcacttttggaggccaaagcgggtggatcatgtgagcccaggagttcaagaccagcctgggcaacatagcaagactccatctgtacaaaaaatgtaaatatttagccaggcatggtggcacacacatgcagtcctagctacttgggaggctgtggtgggaggatcacttgagcccaggagtttgaggctgccatgagctatgatcaggccactgcactccagccagggtgacagagtaagaacttgtctcaaaaaaaaaaaaaaagaagaaagaaagagagagagagagatgaaagaaagaaagaaagaaagaaagaaagaaagaaagaaagaaagaaagaaagaaagaaagaaagaaagaaaagaaagtaagaaagaaaggaagaaaagaagaaaaaagcaagcaagcaagcaagcaagcaagcaagcaagagacactctgatactcaggctgagccattggaaagtatcttctacatttcctgtgtgtgtgtttgtgtgtgtgtgtgaaacgagagagaggaagaggaagacagaatttatgtatgtagatctgtctatgtgtctatatattggaaaaggtggttataatcatatatgcatctattttgcattactgcctttaaacctgtcttgcagctgtttattttgggggcttagttcttagggtcacaagattcatgagttcactctctggtatgtagaccagaacttcctcacagctcttcccaacaatctctttccagcatcaagagattatctctaagtctagatccataaagtcaggggagcaagatcatgttcatttctgattctttgagctcccttccctttcgaggttcattctcttatttgccccacaatgccttacctgaagtgagtgcgaaatcgcctttgcaaaaattataactgagaaaattatgatggtgaaatagatctaacctcactccatctttcttctaacctccaagctgtcctcgttcagtactgggcataggccaaactaactttgggaggaacttgtttataggttaactttgaaacaaagacaataacagccctttcccaaaacgaacccccttcctgcctgagggctagactgcctttgcaggactaacaaattagctataagattagaaattacggtttacaagccacgcaacctctggctgcaagattctgaaccttcccaaattgctcctgggaataacatcactgttgcaaaacctaaaatcagtgcttgaggtattttgcagaaccctgcactctgatgcaccccctgacaccacccagtccagtaatctggctcaaccagttctgccatcccacccaggaacagaagacaataagaaaattcactttgacccctatgatttcatttctaacccagccaaccagcattccccacttcccaagcccctacccaccaaattagccttaaaaactctgatcctggattctctgatttgaataatgataaaactctggtctcttgtacagatggccctgcaggaattaaactttattgcaattcccctgtcttgttttttttttttttcttttgagacagagtttcacaggctggagtgcaatgtcgtgatctcagctcactgcaacctctacctccccggttcaagctattctcctgcctcaccctcccaagtagtagggattacaagcatgcaccaccatgtccggctaattttgtatttttagtagagacgggtgttcatcatgttggccaggctggtctcaaacttctgacctcaggtgatctgcctgccttggcttcccaaaatgttatgattacaggtgtgagccatcggcccggccccctgtcttgataaattggctttgtctaggcagtggacaaggagaactccactgggtggttgcaaatctggggagtcatccgggaccatccttgtggatacctgcctgacgtttgttagccctccaccagcgatggatctggaggcccgcccaagtggcaatttagttcttggactgggggctaactgtagcaccgtctctaccagcagggtgttgccaactcatggtgcatggattcaaatgcaataaacagtcctggggagatgtcccgctcctgtagccccatcatgggtgtctgatttggtgagtattctaggtgcttccaacaacctcatccttctgacctgctggcctctctgaagggggtgtctgctctaactggatcaagaataggggacttgtttggaggaacattcttggtttgtgatttggtctggagtctctgtctgcaagtccttctgcttgtctttttcacttgagtgtttgtgtatgtacaggaattgctgatggaagtccaacaggctctcctagtttgtctggtctgtcacatttgctgaaccctgaaggaactgttagcggaagcgcaacaggcctgactcgtggtgattttccattgttctggaagctgcagggaaagggaacccagaaatctggtatgccagcaaagagagtaagaacttctgacaagccaggcttctggtctctctctctctgtctctctctcactctctctctctgtgaatggtaaacatcattgtttgtctcctctgcaagggtttgattaattgaaaaaaggatttataactgggcacagtggctgtaattccagcactttgggaggtcgaggtgggcagatcacctgaggtcgggaagttcaagaccagcctggccaacatggtgaagccccgtttctactaaaaatacaaaaattagccaggcgtggtggcgggtgcctgtaatcccagctactcaggagcctgaggcaggagaatcgcttgaacccaggaggcagaggttgcagtgatccgagatcatgcccttgcactccagcctgtgcgacaagagtgagatgctatctcaaaaaaaaaaaaaaaaaaaaaagctcttcaagaaaactggccttgcctggccagccgccccgtccgggagggaggtggggggggtcggccccccgcccagccagccgccccgtcggggaggtgaggggcgcctctgcccggccgcccctcctgggaagtgaggagcccctctgcccggccaccaccccgtctgggaggtgtacccaaccgctcattgagaacgggccatgatgacaatggcggttttgtggaatagaaaggcgggaaaggtggggaaaagattgagaaatcggatgattgccgtgtctgtgtagaaagaggtagacatgggagacttttcattttgttctgtactaagaaaaattcttctgccttgggatcctgttgatctgtgaccttacccccaaccctgtgctctctgaaacatgtgc

SEQ ID NO: 808 - protein, 392 aa, Homo sapiens
MNRHHLQDHFLEIDKKNCCVFRDDFIVKVLPPVLGLEFIFGLLGNGLALWIFCFHLKSWKSSRIFLFNLAVADFLLIICLPFLMDNYVRRWDWKFGDIPCRLMLFMLAMNRQGSIIFLTVVAVDRYFRVVHPHHALNKISNRTAAIISCLLWGITIGLTVHLLKKKMPIQNGGANLCSSFSICHTFQWHEAMFLLEFFLPLGIILFCSARIIWSLRQRQMDRHAKIKRAITFIMVVAIVFVICFLPSVVVRIRIFWLLHTSGTQNCEVYRSVDLAFFITLSFTYMNSMLDPVVYYFSSPSFPNFFSTLINRCLQRKMTGEPDNNRSTSVELTGDPNKTRGAPEALMANSASRPVGEVRGASARPPLLGSEEPLCPATTPSGRCTQPLIENGP

SEQ ID NO: 809 - DNA, 1174 bp, Homo sapiens
  source (1)..(1174)
  CDS (201)..(974)
catttacaggtagctctactagaaatatggagagcagaaaccaatcaacagtgactgaatttatcttcactggattccctcagcttcaggatggtagtctcctgtacttctttcctttacttttcatctatacttttattatcattgataacttattaatcttctctgctgtaaggctggacacccatctccacaaccccatgtataattttatcagtatattttcctttctggagatctggtacaccacagccaccattcccaagatgctctccaacctcatcagtgaaaagaaggccatctcaatgactggctgcatcttgcagatgtatttcttccactcacttgaaaactcagaggggatcttgctgaccaccatggccattgacagatacgttgccatctgcaaccctcttcgctatcaaatgatcatgaccccccggctctgtgctcacctctctgcaggttcctgcctcttcggtttccttatcctgcttcccgagattgtgatgatttccacactgcctttctgtgggcccaaccaaatccatcagatcttctgtgacttggtccctgtgctaagcctggcctgtacagacacgtccatgattctgattgaggatgtgattcatgctgtgaccatcatcattaccttcctaatcattgccctgtcctatgtaagaattgtcactgtgatattgaggattccctcttctgaagggaggcaaaaggctttttctacctgtgcaggccacctcatggtcttcctgatattctttggcagtgtatcactcatgtacttgcgtttcagcaacacttatccaccagttttggacacagccattgcactgatgtttactgtacttgctccattcttcaatcccatcatttatagcctgagaaacaaggacatgaacaatgcaattaaaaaactgttctgtcttcaaaaagtgttgaacaagcctggaggttaatacagagccacaggttcccttccgttgcttttgttttgttttgttttttgagatggagtttcactcttgttgcctgggctggagtgcaatggcatgatcttagctcactgcaacctccacctcctggttttgaacaattctcctgcctcagcctccctagtagccgcgattacaggcatgcaccaccacacccagctaat

SEQ ID NO: 810 - protein, 257 aa, Homo sapiens
MYNFISIFSFLEIWYTTATIPKMLSNLISEKKAISMTGCILQMYFFHSLENSEGILLTTMAIDRYVAICNPLRYQMIMTPRLCAHLSAGSCLFGFLILLPEIVMISTLPFCGPNQIHQIFCDLVPVLSLACTDTSMILIEDVIHAVTIIITFLIIALSYVRIVTVILRIPSSEGRQKAFSTCAGHLMVFLIFFGSVSLMYLRFSNTYPPVLDTAIALMFTVLAPFFNPIIYSLRNKDMNNAIKKLFCLQKVLNKPGG

SEQ ID NO: 811 - DNA, 1336 bp, Homo sapiens
  source (1)..(1336)
  CDS (201)..(1136)
aatattatcatatagaataccagttactagaaaataaagattactacatgctaaattgggataaattatgattcagttaattgaaccggagttaaatgatcatatataaacaagggatcactttcctacaaaaggagaataacaatacaattcacctaaataccatgttttttctctcccctgcagaaactcatcaaagaatggcagcagaaaaccattcttttgtgactaagtttattctggttgggctaacagagaagtcagagctacagctgcccctcttcctcgtcttcctgggaatctatgtagtcacagtgctggggaacctgggcatgatcacactgattgggctcagttctcacctgcacacacctatgtactgtttcctcagcagtctgtccttcattgacttctgccattccactgtcattacccctaagatgctggtgaactttgtgacagagaagaacatcatctcctaccctgaatgcatgactcagctctacttcttcctcgtttttgctattgcagagtgtcacatgttggctgcaatggcatatgacggctacgtggccatctgtagccccttgctgtacagcatcatcatatccaataaggcttgcttttctctgattttagtggtgtatgtaataggcctgatttgtgcgtcagctcatataggctgtatgtttagggttcaattctgcaaatttgatgtgatcaaccattatttctgtgatcttatttctatcttgaagctctcctgttctagtacttacattaatgagttactgattttaatctttagtggaattaacatccttgtccccagcctgaccatcctcagctcttacatcttcatcattgccagcatcctccgcattcgctacactgagggcaggtccaaagccttcagcacttgcagctcccacatctcggctgtttctgttttctttgggtctgcagcattcatgtacctgcagccatcatctgtcagctccatggaccaggggaaagtgtcctctgtgttttatactattgttgtgcccatgctgaaccccctgatctacagcctgaggaataaagatgtccacgttgccctgaagaaaacgctagggaaaagaacattcttatgaacagaagtacaatgaaaaagattgcattagatctaagtttttggctatgatattgtatgaaatgatgtctttcactttagtgcatctgtcaacattctttctaatttggggggattttactgacgttatgtcttatgcacatggtctatttcatgccatttccctctcattttttctctcataaggattacgaagacatg

SEQ ID NO: 812 - protein, 311 aa, Homo sapiens
MAAENHSFVTKFILVGLTEKSELQLPLFLVFLGIYVVTVLGNLGMITLIGLSSHLHTPMYCFLSSLSFIDFCHSTVITPKMLVNFVTEKNIISYPECMTQLYFFLVFAIAECHMLAAMAYDGYVAICSPLLYSIIISNKACFSLILVVYVIGLICASAHIGCMFRVQFCKFDVINHYFCDLISILKLSCSSTYINELLILIFSGINILVPSLTILSSYIFIIASILRIRYTEGRSKAFSTCSSHISAVSVFFGSAAFMYLQPSSVSSMDQGKVSSVFYTIVVPMLNPLIYSLRNKDVHVALKKTLGKRTFL

SEQ ID NO: 813 - DNA, 1339 bp, Homo sapiens
  source (1)..(1339)
  CDS (201)..(1139)
cagaagttttctactttaaaactcagaagatcagcagatcactgctctctcctggtgctctggggagccacgtggcctctctttgcaccaaaactccccatccaagtccagctccactctctctctgcctcagctgccctgcagccctttcctcttgctctttgatgttttgtaggcctgcagctcccaagcacagaggcatgagtggggagaatgtcaccaaggtcagcaccttcatcctggtgggcctccccacggccccagggctgcagtacctgctcttcctcctcttcctgctcacctacctctttgtcctggtggagaacctggccatcatcctcatcgtctggagcagcacctccctccacaggcccatgtactactttctgagctccatgtctttcctggagatctggtacgtgtctgacatcacccccaagatgctggagggcttcctcctccagcagaaacgcatctctttcgtcgggtgcatgacgcagctctacttcttcagctccctggtgtgcaccgagtgtgtgcttctggcctccatggcctacgaccgctacgtggccatctgccacccgctgcgctaccacgtccttgtgaccccggggctgtgcctccagctggtgggcttctcctttgtgagtggcttcaccatctccatgatcaaggtctgttttatctccagcgtcacgttctgtggctccaacgtcttgaaccacttcttctgtgacatttcccccatcctcaagctggcctgcacggacttctccactgcagagctggtggatttcatcctggccttcatcatcctggtgtttccgctcctggccaccatactgtcatattggcacatcaccctggctgtcctgcgcatcccctcggccaccggctgctggagagccttctctacctgcgcctctcacctcaccgtggtcaccgtcttctatacagccttgcttttcatgtatgtccggccccaagccattgattcccagagctccaacaagctcatctctgccgtgtacactgttgtcacgccaataattaaccctttgatttactgcctgaggaacaaggaatttaaggacgccttgaaaaaggccttgggcttgggtcaaacttcacactaagacaactaaatgtcctagagtaaaatctgtagtgatgaaacaacattgtatgtggcactttgtgctctttaaattaatttttaagttaaatttaacaaacctacagaactaagtgaaatttaacaaacctacacaactgtgcacaagtaacaagccttcgtctgcatatgttttcacaaaaggactgtgctcatggaacc

SEQ ID NO: 814 - protein, 312 aa, Homo sapiens
MSGENVTKVSTFILVGLPTAPGLQYLLFLLFLLTYLFVLVENLAIILIVWSSTSLHRPMYYFLSSMSFLEIWYVSDITPKMLEGFLLQQKRISFVGCMTQLYFFSSLVCTECVLLASMAYDRYVAICHPLRYHVLVTPGLCLQLVGFSFVSGFTISMIKVCFISSVTFCGSNVLNHFFCDISPILKLACTDFSTAELVDFILAFIILVFPLLATILSYWHITLAVLRIPSATGCWRAFSTCASHLTVVTVFYTALLFMYVRPQAIDSQSSNKLISAVYTVVTPIINPLIYCLRNKEFKDALKKALGLGQTSH

SEQ ID NO: 815 - DNA, 1282 bp, Homo sapiens
  source (1)..(1282)
  CDS (201)..(1082)
acctgggataacatatccagtacatatgtccagaaactgtgcagtcaaacagttattcagaccataaaagcctcttctttctctatttttccatttgcaccatcacaccaggggaaattatggagatgagaaatactaccccagattttattctcctaggactctttaaccacaccagagcccaccaagtcctcttcatgatgcttctggccaccgttttgacctccctgtttagcaatgccctcatgattctcctgattcactgggaccaccggctccacaggcccatgtacttcctcctgagccaactttccctcatggacatgatgctggtttccaccactgtgcccaaaatggcggctgactacttgaccggaaataaggccatctcccgcgctggctgtggtgtgcagatcttcttcctccccacactgggtggtggagagtgcttcctcttagcagccatggcctatgaccgctatgcggctgtctgccacccactccgatatcccactctcatgagctggcagctgtgcctgaggatgaccatgtcgtcctggctcctgggtgcagctgacggcctcctgcaggctgttgctaccctgagcttcccatattgcggtgcacacgagatcgatcacttcttctgcgaggcccccgtgttggtgcgtttggcttgtgctgacacttcagtcttcgaaaacgccatgtacatctgctgtgtgttaatgctcctggtccccttttccctcatcctgtcctcctatggtctcatcctcgctgctgttctgctcatgcgctctacagaagcccgcaagaaggcctttgccacctgctcttcacatgtggctgtggtgggactcttttatggagctggcatttttacctatatgagacccaaatcccacaggtccactaaccacgataaggttgtgtcagccttctatactatgttcacccctttactaaatcccctcatctacagtgtgaggaacagtgaggtcaaggaagccctgaaacggtggctggggacgtgtgtaaacctaaaacaccagcaaaatgaggcccacaggtcaagatgatctagtgtcagatgagtctaagttcctgaatttattaacattttaacactatgtaattctctccctttagtaattcatgaagagaaaattaagtttgtgtattgatataataagatatttttaagaatgaagtgagccaattgtattgacagataccatttttgagcatttatgtacttttcttcaagtgaagtaatacc

SEQ ID NO: 816 - protein, 293 aa, Homo sapiens
MLLATVLTSLFSNALMILLIHWDHRLHRPMYFLLSQLSLMDMMLVSTTVPKMAADYLTGNKAISRAGCGVQIFFLPTLGGGECFLLAAMAYDRYAAVCHPLRYPTLMSWQLCLRMTMSSWLLGAADGLLQAVATLSFPYCGAHEIDHFFCEAPVLVRLACADTSVFENAMYICCVLMLLVPFSLILSSYGLILAAVLLMRSTEARKKAFATCSSHVAVVGLFYGAGIFTYMRPKSHRSTNHDKVVSAFYTMFTPLLNPLIYSVRNSEVKEALKRWLGTCVNLKHQQNEAHRSR

SEQ ID NO: 817 - DNA, 1282 bp, Homo sapiens
  source (1)..(1282)
  CDS (201)..(1082)
acctgggataacatacccagtacgtatgtccggaaactgtgcagtcaaacagttattcagaccataaaagcctcttccttctctatttttccatttgcaccatcacaccaggggaaattatggagatgagaaatactaccccagattttattctcctaggactctttaaccacaccagagcccaccaagtcctcttcatgatggttctgagtatcgttttgacctccctgtttggcaattccctcatgattctcctgattcactgggaccaccggctccacacgcccatgtacttcctcctgagccaactttccctcatggacatgatgctggtttccaccactgtgcccaaaatggcggctgactacttgaccggaagtaaggccatctcccgcgctggctgtggtgtgcagatcttcttcctccccacactgggtggtggagagtgcttcctcttagcagccatggcctatgaccgctatgcggctgtctgccacccactccgatatcccactctcatgagctggcagctgtgcctgaggatgaccatgtcgtgttggctcctgggtgcagctgacgggctcctgcaggctgttgttaccctgagcttcccatattgtggtgcacacgagatcgatcacttcttctgcgagacccccgtgctggtgcgtttggcttgtgctgacacttcagtcttcgaaaacgccatgtacatctgctgtgtgttaatgctcctggtccccttttccctcatcctgtcctcctatggtctcatcctcgctgctgttctgcacatgcgctctacagaagcccgcaagaaggcctttgccacctgctcttcacatgtggctgtggtgggactcttttatggagctgccatttttacctatatgagacccaaatcccataggtccactaaccatgacaaggttgtgtcagccttctatactatgttcacccctttactaaaccccctcatctacagtgtgaagaacagtgaggtgaagggagccctgaaacggtggctggggacgtgtgtaaacataaaacaccagcaaaatgaggcccacaggtcaagatgatctaatgtcaaatgagtctaagttcctgaatttattaatattttaacacattgttattctctccctttagcaattcatgcagagaaaattaagtttttgcattgatataataggatatttttaagaattaagtgagctaattgtattgagagataccatttttagcatttatgtacttttcttcaagtgaagtagtatct

SEQ ID NO: 818 - protein, 293 aa, Homo sapiens
MVLSIVLTSLFGNSLMILLIHWDHRLHTPMYFLLSQLSLMDMMLVSTTVPKMAADYLTGSKAISRAGCGVQIFFLPTLGGGECFLLAAMAYDRYAAVCHPLRYPTLMSWQLCLRMTMSCWLLGAADGLLQAVVTLSFPYCGAHEIDHFFCETPVLVRLACADTSVFENAMYICCVLMLLVPFSLILSSYGLILAAVLHMRSTEARKKAFATCSSHVAVVGLFYGAAIFTYMRPKSHRSTNHDKVVSAFYTMFTPLLNPLIYSVKNSEVKGALKRWLGTCVNIKHQQNEAHRSR

SEQ ID NO: 819 - DNA, 1099 bp, Homo sapiens
  source (1)..(1099)
  CDS (201)..(899)
tgggcctatcatcttcttgggagctgcagctatttctcttcttactatttttgtttttttacattgctattgtcctgggaaacctcttgatagtggtaacagtgcaagcccatgctcacctgctccaatctcctatgtattattttttaggtcatctctctttcattgacctatgcctgagctgtgttactgtgccaaagatgttaggggatttcctacagcagggcaagagcatctctttttcaggatgcctggcccagatctacttcctccactttctaggagccagtgagatgtttttgctgacagtcatggcctatgacaggtatgttgccatctgtaaccctttgcgctaccttacagtcatgaacccccagctatgcctttggttggttcttgcctgctggtgtgggggttttatccactctatcatgcaggtcatactagtcatccagctgcctttctgtgggcccaatgaactggacaacttctactgtgatgtcccacaagtcatcaagctggcctgcatggacacctatgtggtagaggtgctggtgatagccaacagtggtctgctgtctcttgtctgcttcttggtcttactattctcttatgctatcatcctgatcaccctgagaacacacttctgccagggccagaacaaggtcttctctacctgtgcttctcacctgacagtggtcagcctgatcttcgtgccatgcgtattcatctatttgaggcctttctgcagcttctctgtggataagatattctccttgttttacacagtgattacacctatgttgaaccccctcatctacacactcagaaatactgatatgaagacagctatgaagaagctgaggataaaaccatgtggcattccattgccttgttaaggaatgagcagaagaggtgatttgaaaaacacactctttcttggaagactcttaactcatcttgtacatgggtaaaaaccactttgatgacgttggtataaaagaggagatagcataaagattataatggatcactcttgattacaatttaaaagcataggtggcactctagaaagccacctatgccttttgaccataat

SEQ ID NO: 820 - protein, 232 aa, Homo sapiens
MLGDFLQQGKSISFSGCLAQIYFLHFLGASEMFLLTVMAYDRYVAICNPLRYLTVMNPQLCLWLVLACWCGGFIHSIMQVILVIQLPFCGPNELDNFYCDVPQVIKLACMDTYVVEVLVIANSGLLSLVCFLVLLFSYAIILITLRTHFCQGQNKVFSTCASHLTVVSLIFVPCVFIYLRPFCSFSVDKIFSLFYTVITPMLNPLIYTLRNTDMKTAMKKLRIKPCGIPLPC

SEQ ID NO: 821 - DNA, 4342 bp, Homo sapiens
  source (1)..(4342)
  CDS (201)..(361)
  CDS (504)..(764)
  CDS (865)..(1033)
  CDS (1712)..(1813)
  CDS (2660)..(2758)
  CDS (3561)..(4142)
ggcccccgctccagacccgcccaccctccggctgtggtcccgcccactctcgggacctggcaggcgactggctctggcgccgcatgcccctccccgcgctgacgtcgctccgcccctccgtccccgccccgcaggtggggctgcgctgccgcctggtggccgggctgctgcactactgtttcctggccgccttctgctggatgagcctcgaaggcctggagctctactttcttgtggtgcgcgtgttccaaggccagggcctgagtacgcgctggctctgcctgatcggctatggcgtgcccctgctcatcgtgggcgtctcggctgccatctacagcaagggctacggccgccccagatagtgagtgcagcgagatggggcaggaggaaggcggggtgctgggcctggggctcacaggcagtgccacacacaatgtccggccgccctccgttccgctcctggcttcctggggcactgatgggacccctcccttccctcctagctgctggttggactttgagcagggcttcctctggagcttcttgggacctgtgaccttcatcattttggtaagtacccactctccctccaccgaagcccgagcgccacaggcccaggcccggctggaccatcgctctcgccctctaacccacaatctgctccctgcccagtgcaatgctgtcattttcgtgactaccgtctggaagctcactcagaagttttctgaaatcaatccagacatgaagaaattaaagaaggcgaggtgagaggagaggctggaaggacttggaggcggggccggggtgaggggcatgaagctggaggtgaggtgggggcccacgctgcaaccccgctcctcgcagggcgctgaccatcacggccatcgcgcagctcttcctgttgggctgcacctgggtctttggcctgttcatcttcgacgatcggagcttggtgctgacctatgtgtttaccatcctcaactgcctgcagggcgccttcctctacctgctgcactgcctgctcaacaagaaggtgggggcctgggcacagtggcgcacgcctgtcatcctcccacctatttgggaggctgaggtgggaggattgcttgagcccagaagttggagaccagcctgggcaacataaccagatgctgtctttacaaaaaaattcaaagatagccagggtgaggcgcctgtaatcccaacagtttgggaggccgaggtgggcagatcacctgaggtcagtaattcaagaccagcctggccaacatggtgaaaccctgtctctactaaaaatacaaaaattagccaggcatggtggcacacgcctgtagtcccagctacttgggaggctgaggcaggagaatcatttgaaccaggagtgcagtgggccaagatggcaccattgcactccagcctgggtgacagtgagacttgtctccaaaaaaaaaaaaaaaagccgggtgtgctgaatacccatctcagcttctcaggaggctggggcaagaggatcacttgggcccaggagttcaaggttgcagtaagctatgatggtgccactacactccagcctgggtgacagggggacccgatctcaaaaaaaagacaaacacaaaaacaccaagaaggtggggctgagggcagagcatggggaggagcgtgcatggtcccagggcctgctcctgccctgacttggtgtctgggccggcaggttcgggaagaataccggaagtgggcctgcctagttgctggggggagcaagtactcagaattcacctccaccacgtctggcactggccacaatcagacccgggtaaggggctgcgcctggggcgggtgtgggcaggaaggcaccagggctagcggggctcaggcctctgggctctcctctccaggccctcagggcatcagagtccggcatatgaaggcgcatggttctggacggcccagcagctcctgtggccacagcagctttgtacacgaagaccatccatcctcccttcgtccaccactctactccctccaccctccctccctgatcccgtgtgccaccaggagggagtggcagctatagtctggcaccaaagtccaggacacccagtggggtggagtcggagccactggtcctgctgctggctgcctctctgctccaccttgtgacccagggtggggacaggggctggcccagggctgcaatgcagcatgttgccctggcacctgtggccagtactcgggacagactaagggcgcttgtcccatcctggacttttcctctcatgtctttgctgcagaactgaagagactaggcgctggggctcagcttccctcttaagctaagactgatgtcagaggccccatggcgaggccccttggggccactgcctgaggctcacggtacagaggcctgccctgcctggccgggcaggaggttctcactgttgtgaaggttgtagacgttgtgtaatgtgtttttatctgttaaaatttttcagtgttgacacttaaaattaaacacatgcatacagaagatggccttgcctgctggtggtgattcagaggccgggcccagggtgtccgtgaaaggccaagatgaccaagaaatagatggggtgggagccaggcttccataataacaagtttattctcatacaatctctagcttctcaacagtggcgcctggaaaggggaggtgaagctgcatgcgggcggctccgggtgggcggctctggcacgtggtggttaccggctctgctcgactgtaagacatgagatgcagtgaactgaagggccgggggaggaaccctctgccccagacccctggccctgcccaaggcacttactgtatgtggagatgtcgatttcctctggaagttctgccacattaacttcaaaccggtcctggacgtcattgaggattttggcatcattctcgtcagacacaaaagtgatggctaggcctttggtgccaaagcgacccgcccgggccacctgcaggcagacaggatcagggtcaggccacagatactacctcaggacttgaggaaaagcagggctggggccccaccccaccgccaggggaaagcaacatgcccgtgaggctgctcacccggtgcaggtaggtgtccgagtcctcaggcatgtcgtagttaaagacgatgttgactcgctcgatgtccatcccccggccaaacagattggtggccaccaggatccgccgctggaaatccttgaactgctgatagcgtgacaggctggggtgcaggagaaacaagtggaggccgtcagacactgggctcctggtggtgctccctgcagccttggcgggcggctcgcactcaccgctcctcctgggccatgccccggtggatggcgatggccgggaagttctgctccacgaggagctgggccagggccatgcagcgctgcactgacttgacgaagattatcacctgagggaaggagtggcagtcagggccacacagtccctgtggcccagtgacctcccgaaggtcctgagccccaggacaggctgatggaagtatcacctggttaaactccagcacatccaagagatcaaagagcttgcggttcttctcactgtctttgagtttgacgtagtactgctgcaggccgtgcagcgtgagcttggtctcgtcgtccacaaacacctccatgggctgtgtgggaagggaggtgggaggggcgggcagggatcacctctgggcatctcgcctgcccagaaccttccagtgggcgactcctttgtgcgacacttcccagaggacctgctgcaccagacctcagtaaacatcgctcaaaagctggatgtaagctctggcccgactcaggtgtggaccaagcttgactcccagtttgacaagaccgaggggaggaaaggaggctccgccggctcccagcatcccagcatcctccgtgccatgtgggccgtgcgggtgtcctggggccccaggctccaggcccctggggaaggccaaagctgccactctcgccctactcacatcctgcatgaacttcctgcacacaggccggatgtccttgctcagggtggcgctgaacatcatgcactgcttctcgtgtggtgtcaggcggaagatctcctgcacatcccgccgcatgtctaggacacggcccaaggccccaacctgcacggcccagcacctgcgaacaggaggcctcaggggaccaaggcaggcctgagagcctcccggggctccactcaaaggcagccccaggctgggacctgcgcaggcccctgggagccatgcataattcatcaggcttttaaggagcaaaaaccaccgcaaacctcaaaggcagctgc

SEQ ID NO: 822 - protein, 457 aa, Homo sapiens
MSLEGLELYFLVVRVFQGQGLSTRWLCLIGYGVPLLIVGVSAAIYSKGYGRPRYCWLDFEQGFLWSFLGPVTFIILVSTHSPSTEARAPQAQARLDHRSRPLTHNLLPAQCNAVIFVTTVWKLTQKFSEINPDMKKLKKARALTITAIAQLFLLGCTWVFGLFIFDDRSLVLTYVFTILNCLQGAFLYLLHCLLNKKVREEYRKWACLVAGGSKYSEFTSTTSGTGHNQTRLLNSGAWKGEVKLHAGGSGWAALARGGYRLCSTHIQEIKELAVLLTVFEFDVVLLQAVQRELGLVVHKHLHGLCGKGGGRGGQGSPLGISPAQNLPVGDSFVRHFPEDLLHQTSVNIAQKLDVSSGPTQVWTKLDSQFDKTEGRKGGSAGSQHPSILRAMWAVRVSWGPRLQAPGEGQSCHSRPTHILHELPAHRPDVLAQGGAEHHALLLVWCQAEDLLHIPPHV

SEQ ID NO: 823 - DNA, 32526 bp, Homo sapiens
  source (1)..(32526)
  CDS (201)..(403)
  CDS (1176)..(1325)
  CDS (1510)..(1652)
  CDS (1962)..(2022)
  CDS (4220)..(4382)
  CDS (4534)..(4619)
  CDS (4691)..(4931)
  CDS (5706)..(5807)
  CDS (15976)..(18006)
  CDS (20030)..(20335)
  CDS (32177)..(32326)
gtgcttgtgcatgcaggggcggggggtccatgtggagtggggaatcccacgtgatgtggagattcagttcgacacaacacggagcagtgaacacagcatgggattcagggacaagcagagcctcaaactggacggcgttgctctgcagcgaggcctgaccctcagcagatgctcaggaagggggagtggcccttgagatcatgacccgctccatcccagccacccctaggcgatgtcctcacagagcagctcccatccagcagaaggctcacctctgcccctctctcctgctccagaaaaaaagcaaggtgcactaccatgtcgcagtcatcatcaactacctgggccactgtatctccctggtggccctcctggtggcctttgtcctctttctgcggctcaggtgagaagaccccagcactgcctcctcctgtccccaggacctagagcagaagcagggtggagaagtgagaggagcagctctaggttggggtgggggttgctgggagagggtggcaggggctggcttatctgagagtctcaggtctctgggaacctctggcagagccgctctgccctctccccagtagctgctggaatggtggggagggacaaaacttgtcttatgtcacccatacccaggccaggctgcacccattggggtgaccaggcagatggagccctggaggtgggggctccatggagtggtgccccatttcaggttcgaaggtacctgggccccagcactaccgccaaggatgcaggtggcagagccggggatggggatggttgggatcaggagccgagcatcagggctggaggctgggagcagggctgacccctgtgactgtccatcctggaatggcagggagtagaaggcacccccaggggaagcgggcatcgccaggaatccagctgccctggtccatggagcacaggctccatggagtgccaggctctgcctggggcttatgtctgggtgggctgcaggcaggaagggctccatggggcattaggagagcctggctgtcacctccctgtgtgacttggccagtcagccccaccctgtgcctcagtttcctcatctacacatctgggctggggtgatggaggtggcctacccctcatcctctctctcctatcgctcccatcatccacccgccctgctgcaccaggagcatccggtgcctgcgaaacatcatccactggaacctcatctccgccttcatcctgcgcaacgccacctggttcgtggtccagctaaccatgagccccgaggtccaccagagcaacgtggtacgtcctggcaggggagcggggagcaggtcaggccaaacccaggtcagaggaggggcccgcctgccctgcagaggaggagcccacagaacaggagtgggatcccagggtatgccctgtcctgccctggggaggcccaggcccagggtttggtgcctcccctgccccccatcatcatctctggttgggggtggggtggcagggctggtgcaggttggtgacagccgcctacaactacttccatgtgaccaacttcttctggatgttcggcgagggctgctacctgcacacagccatcgtgctcacctactccactgaccggctgcgcaaatggatgttcatctgcattggctggggtgagctgggcagccacctccgcagcctgggcagtggcggccgccgggctgccctctcctccagactcaggccagcgggctggggggcctgagggatggaggtcgggttggggcggtaaggtgtgcacgatagccctctgctcctcttgggggtgggcggcagtagaagcaccttgaaggaggtgtgtgagtttgagatccaccctgagtaaccccagaccccctggagcctgggctgcactggggttctccaggcccacatcctccagcccccgctgagggctctgtgacagcccatctctcccccaggtgtgcccttccccatcattgtggcctgggccattgggaagctgtactacgacaatgagaagtaagtcatctcctttcccttcctgaccccaaggtttaggctcccagcccagcttggtgacactccccacgggcattggccatgctggctttttcccctcaggaccatggtttctgcatctataaagggagagatctgggggctggactcattcagagggtccctgcctgtgctctgcctgggtggggctggacaagcaggacccagcctcctttatctgccttgagcttacacaggaagcagcctggagccagactgcccaggttcaaatagctgtgtgaccttggacagattactgcagtgtgcctcagtttcctcatctgtaaaatggacatgctactgcctcaaagggctgttgtggggtgatatgagtccatctatattaagcatttacaatagctcctggcacatagagtaaatgctatataaatgtgttctattaatattaagacatcttaataaaagagtccatgaatttaatagaagtggacctagatgatctcagaggcttcttccagctctgaagttctttggttccttatgaaatggactcagatgtttccaatcgtgcctggaaacttgatttctgctgcagtggagctcaactttggctcacattagaatcacctggaatgcttggaaaagtaccaatgcccaggcttcaccctcagagaatcaggcgcaattggtctggggtgtggcctggcacccagaagtcttgaaaactgcccaggtgattctaatgtgcagctcagattgagaaccactgagagagagcggggcagaaaaggtggacatggatggcaggggagccccaggaccttctttgccaaacaagtgttcccgggaacctatctgactgacggacctggcgtccaagtggcctccaccacagtgacaagccctctcctcccccatggaggggagggggcctgcacggcttcattgggctgaaagaggagcctggaagattatcttgcgtgtttatgtggttgactccctcctgactccctcctgactcaggctggctgaggccttgggaagccgaggcaggcggatcacttgaggtcaggagtttgagaccagcctggctaacatggtgaaatcccgtatctactaaaaaaaaaacaaaaaaacaaaaattagctgggtgtggtggtgcgcacctgtagtccagctactcgggaaggctgaggcaggagaatctcttgaacccaggaggcagaggttgcagtgagccaagatcgtgccactgcactccagcctgggcaacagagtgagactccatgagtctcaaaaaacaaagcaaaacaaaaactgtttgggctaaaggagaaagtgagtctgagcggctctgaagctccacctggtggtgagaattcaacactgcaacagagaggatctgggtgtgagaaaccagaaacgaacttgcagaccagaggcccgaggactggacccggccctcagaagctgtgtgtggccagcatggtgttttctgaaaactcgattttgtagccaacctttaaaaaatccaaaggtttcatttacaaatctcaatttctggcttatgagatctagccactgggggtcttcatacccacgaggacataagggcttccagtttgtctggtccccacccactccccaggcctccctggagcttgctggagggacactcgggaaaatgcaaagcaattacctcctgcagcaggtagaacctgtgcaagtattcctctcaaggttgttcaggctgtgactggacagattcaggctgagattgcgaactgctgggtgcccactgggtgacaggtgtggtgccactcccaccagcagccccccagagggcatgctgggcctcagccactgccaggggactgtgaggaggagccgaggatgcagcctcgtgttgggcccatgcccgttcccagccactcagtctttcccactgtctacctcctgccccggtgcttgcttccaactttgcatctcatcacagaggatgctgtccgttctgcagatgggacaattgaggcatggcagtgggatcaagtgacttgaccttctgccagggttggaattgggacatctacctcttggcctccagccccagtcctgtcctggccaagcactgtccctccccatgccatcaaggtggacgcagatgacccttcctcccctttcctctgtggccttctaggtgctggtttggcaaaaggcctggggtgtacaccgactacatctaccagggccccatgatcctggtcctgctggtaagaacctgggtaggggcaggagacagggcccagtggggaggggcaatcagtgccaaccgtggacagaaaggacccctctacctagaggtgggggccacccaaagagggggcatgggtcagagatgtgcaggtgctcatgaggaggagggagaacagcaggggcactgaggccagagctgagaagcctgggtcccaagcctcttgcacactccggcccgctggtgtgctcaaattgcagatcaatttcatcttccttttcaacatcgtccgcatcctcatgaccaagctccgggcatccaccacgtctgagaccattcagtacaggtaaccgggtaccaccttcctcaggcctccccctgatgaaacccctgctccccatgcctctcacgtgccagagacctgccactccctcccccgacctggccctctttgccgagccagcgggcagcccgtcctggggtgggctgtgactccgagcctccccacccgccccaccccaggaaggctgtgaaagccactctggtgctgctgcccctcctgggcatcacctacatgctgttcttcgtcaatcccggggaggatgaggtctcccgggtcgtcttcatctacttcaactccttcctggaatccttccaggtacagccctggagggacacatcagcacctccttgggtggggattctgccaagcagaggcctggagggcaggaggccagggagaagcaaggggcagcccagaggctgggtgggcaacacctgcagccgacctttgacgcctcctctctcctccccagggcttctttgtgtctgtgttctactgtttcctcaatagtgaggtgaggacccgggggccctgcagcggggttcagggctgtgaggcctgttgggactggcgattgtctagagccttctcctcccctcccagggctgcctctctccctccctgctcctaggtccctaggggtatgctgctgggagccccagggtggcccctcccacctgtccactcccacagtgacagccccctcctttgctctcagaggccgctggcaccaggctggaagccagagctccagtatctttgatgagcctgtgaaaaccaggaagggctgagccctgggcaggggatacatgtggtttgagggcagggagccttcatggcaaagggcatatggtgccttcgtgtgggttagaaaagggtgccccttccccaggacatttgagaaacctgttccgacaaatatgcaaagcagtcgtgttaaggctgtgagtgtcatcccctactgaggacttccatgtactcagctgacctgcacagccgcttacctgcacagctgctcgtggcggcccaggggagggagggggtcctgagccacaggctcagatgtcgtgctcctccctgtgcccacaggtccgttctgccatccggaagaggtggcaccggtggcaggacaagcactcgatccgtgcccgagtggcccgtgccatgtccatccccacctccccaacccgtgtcagctttcacagcatcaagcagtccacagcagtctgagctggcaggtcatggagcagcccccaaagagctgtggctggggggatgacggccaggctccctgaccaccctgcctgtggaggtgacctgttaggtctcatgcccactcccccaggagcagctggcactgacagcctgggggggccgctctccccctgcagccgtgcaggactctagctcatgagtggaaagtcacctacaggactgggccgggcccagggcctctggcttccctgcccaatcctccctggagaagggacatgggaatgaattgaaatggggcgctggacacctacagcagcacgcatgtccctccaaggctgtcttctcccagagcacaagaaggccagcccactgggccctggggctgccctcggcaaccgtggggaggccatttgctgccctggggcatcatgggcaactcgtgacagcctctgactcaccacgatgacgcctctggacctcggtgatgccttccgacaccactgggaaccaagggccctcactcaggaaccctggagacagaagtcaggtgtcatcatcagacttgcggccacagcactagagtcacccccccaggcctccagaaccttactggcactgtggcactgccaccagcaatgccctgccttgctgccttcaccctgaacatttagtaccctgcaggccaggccagcttcccctcacttaaccaccccataccagtcacctcctgctccttttcctcttttgtgagaagatgggggctggagggggcagagtggcctgtgagcaagagccaggggtgtcccagtcccagcctctggggcagagcttgtagccctggatggcctctggggcaggaccactagctaagcaagccaggagaagacccctgcccaagtggctcttgggacaacgtgctgcttacactccaggtgtggaccggccgcagcccccactgacctgcccatgtccagagggactggacagccagggcagggctttggggggcactagaagatgagggtgtcggctgtgaggcgggtggctggtataaataatatttatcttttcaaccagcatttgtgaaggcctggactccacagggggctggatggagagggtgtctcacagaggtgggggctgcttcccagctttcaggggctgctgtgttgctgagaaacctgaccccactctcaccccggcaaggatggtgccaggagagcccctgagggccgggagaggggtgagggcaggagggagggcttcgaggaacaggtgggtctggccagggcccccttagttagggacagcttgttgtgaggaggtgaattagagggagaggagggccacggttagggatgcagaggagggacaccatgggtcaggggaaggaacaaaggagacgggagtgtgtcccagccccaggcatgagctgtgctgattggtgggaagcagaattaggatgctgggccactggacaggctgtgaatgcagctgtctccactagggccgccacaagaagccatccctgagaccctgaggtttcttgtgcaaactcgagggaaggggagtacagagagggcaacagggagtgaagccaggcaaggaaggcaggggaaaggtgggggctagagggggacacggtagcctgtgagcaagagacaggtatgccccagccctggccagtgccgctctgaggtgggtggcacactcaggctcccctggcttgctggcttcagtgcccccaactccgggccagagcttgtatagccctgggtggcctctggggcaggactgacactccaacactgttgtgggcgcctggagctcccttccgctggggaagccctccctcatcccacccaacaggtgagggagctggggtatttatccaccatctcccatcagctgcgggttgagggctgctcccagggggacatgaactcttctgcattcccacatcaggctacagagggccagagagagttctccggcacagtgatgtgcgggtgggtggaagccagtgtgtgctgcattggaggggcagggggtgtgggtggaacaccagaactggacacagggccccactgcagcccgggccttgtctctgggtctctctaaccagggaggagagccccgtgggtgggacgtgtgtatacacatgtgcacttgtgcacccaggcgcacacaagagcttgcagtgtcaggacaccaggaacagacaaaggtgacacagtgccgaaagccccgcagctcctgctgagggagggcacgtttcgttggggagggcctgggcccgggtgtagctaaggatatccttgaaggccctatggggtactctgctctgccaattctccaagctctgtgccctgaagtagagagatggggtgggggacccagggagcaccgtgacagaggtaggctggaggcttccagagcaacgtgggggatattgtggggagtgggaagaagcccagtaaagggtcctggctgcctggagagactagaagtgacctgagtctctaatggccacaacggagacagctttcccaactctgcctctcacccagtgaaggtggagaagtgagaaggcgaggctttcccgagacaatgccagtggggatgggatgagggtcgcaccgcaggggtggaggagccgagagggtgggggtgaggggaagacagggaagggacggtacagaccaggaagtgtggataagcccagccaggccgcaccccgctttcctgagtgggcttcctggctgctctcactgccaggcaccttctgggcacctactgtgtgctcagcactgtgctaggtcttgggtgagagatgagcagccacccaggggggaccccagggaccccccaaaaaacacaaagctcagagcctctggctctggaaggccaccaagaggacagctccaagacaagtctgagggtcatcggagaagctggaggcggaatccctgggcaggcagatggagcctggggctcccctcccattgagagaatctgagggcggaggggctgcttcagggaacagccaggaacatctgagcctcagaacctgcagcccagaggcccagagttctatcatctcccatggcagacatgcgctctgggcttcgtcgcagagaaggcagccctgagaccaggcatctgggccattctgctcaggttcagcttggggtggcgaggcccctgtgggagtgagtggggtgtgatgagccgaaaaacacacatgcgactacacaaagttgggggagccactggggaccctccaagctgcagtggtgggggaaggtcgctggaggccctcccagacccggaagacctcatgcctggaagaatttctctccacaccatgcctaaaggctgcggtcccctaatgctacccccacctgagcccatttctccttgacgtcctccttcatgggcacagaacagtagtggaggaaaagccccactgtttttccagttcaggccaccccctccccgtcccttagtgtgacagcacagcccctgcccagaggtcctcagcctcccctccaggcctccttctctagccccctgctactgatggctcagctctcctgggaccaggactgggtggagagtcagatggggaaaaccatgtgttagcagatgaggtgggtttggaatccatagaataataccttcattgtgggtattgtagattactttgccatccacaaacatccttataacatttgtctttttttttttttttttttttttactacgtgggtaaatctctgttcggggctctcagctctgaaggctgtgagacccctgatttcccacttcacatctctatatttgtgtgtgtgtgtctttatttgtttatttttattatactttaagttctagggtaatcctcaactagcccacagaggtagtaacccacctgttttgcagccagggaaactgaggcctggcagctcccctaagattgaaggtctggttccaagtctaaggcttttttcacccctcagtgaactgaaggggcttgggttctgggaggccagaaccaatgaagagctctgtggcaagagggcagcaaggaggcctcagggtctccgtgatctgggacgtgccccacgtgaagatgggacttccccaaagatggccccaccagtgtccagccgccgagcaatgagagttctgtggatccagcatctccttccccagcttcctgacatcctccaccccccagctccttaaaatgatgcttaatttcaaacaatgcagccggggccaccatcagccacagtgggcccccctacaccccagccaaggagtgtgctgctggcctccagcccaggggtacctcagagccagctcatccaaactgccaactgacttccaactcagctgcccacacttgcttcaaaccgaggagaatgctttctacaatttgctaacagcaacactgatcattattgattgtttaccgggcatcaggtgctgcttagcccctcacatgtttatctcattgactctttatactgccctatgaggcggggctgttatccccatttaacagataaggcaaataaaacccagagaggttaagatacctgcctgatggcacccacggatggatgaaaagccagggaggccacactaggcatccgtgaagcttaacccctatgcagtgggagttcttagtaaggctgtcctcccagccccactgccccttccaatcccctccccagggaaatccttccatccccagtctgtggtcaaacagcattcagagatgagctagctgaaggaattggagcctgcggagcgtgggcctcgggcagcccactccccaaatctggcctccaagccagctccacctgccagtctcccgtccccagccccatcccagctctacctcagagcatcacctcccacccctgccctcagctcaccaacacctgcaggtcctgctggcagaccaggctcaagagaggcctgggccatatatatttatcaaagctctcaatggcttgggaacaccaatgagactattatttggagataaggccagagaccacccttggctgccagatagcagccctaccggcttctgtccctccaaggggtccttgactgatccctgctgcccagcctcattgcccattgggccaaggcaggtggagcagaagaaggggtggtggcctcttaggtgcctaaggagcccaggttgggggcacggcaggcatcagctagggtgagggggcatgggggcagcagctggtgggcctgcctggctcatcctcatcacaggggaagggggagggagtggatggcaatccactctagaacatgcagcggggaagctgctgggcagggcagcaagggcaggtgaggggccaggtgaactaggccccttccccacccttcctgagacctgctgcctggggcctgctggccctgctgccctgtgtgttgaagataaatgttccaggtgcacctaggtcctcaagtagaaggcagagacactaccccagcctgctctgggcagccaccccgagagcccaggccatagctgagggggcagtagggtggggggagggagggggagttgtggggagcaaagtcacagatacagggggtgccctccaggaaaggagttgaatctggagtgggggtggggagggtggcgggactgaagtcttggagcgggatttcagcctggcagtgggccatggccccaaggggcatcagccactcatgtgagggcactgaccagtgctccgagtggccaccagaggaatgattccagggctgatggatgggggtgggcacagggatgggggacctggggaagcagtgatcaaacatacccacgaaagccttctgtgagtggggtcccaggcagagtctcggagggaatgagccttctgcgaattatctgggccctgggcaaccagtccacgggtagatctgggagaaggggcaggagcaagctctgcttgaggtgtctgtgcagacccccaaattggggcatgtgctggtgtgatggagtccagaagaactaaaatgagacctgtcctgaggagagagcagctggaggggactggagttgctccatttcgtctgggcgctgtggctcacacctgtaatcccagcactttgggaggccaaggtgggtgaatcacttgaggccaggagttcgagaccagcctggccaacatggtgaaaccctgtctctcctaaaaatacgaaaattagctgggcatggtggtggtgcatgcctgtaatcccagctactcgggaggctaaggcaggagaatcacttgaacccgggaggtggaggttgcagtgagctgagattgtaccactgcactccagcctgagggacaagagcgaaattccatctcaaaaaaaagtcccatttcaaccatgttagtgcacaattcagtgactttaaatacacaatgtcgtgcaactgaaaccactgagatagaaaaagttctggaacttcttcatcaccccagatggaaatcccatacccaccagtcactcctcattctcccctcccccagcccctgcccgccacgaatctgctctctgcctctgtagatctgcctgttttggctgtttcacgtaagtggaattaatcgtacaatatgtgtccttttgtgtctggcgtcttcatttagcataatgtgtttccacttagcataatgtgtttcggcttagcataatgttttcaaggtccatccacatggtagcaggtatcaaaacgtcattccttcttatggctgaatgctattcccttgtgtggagagaccgcagtttctccattcatcagtggatggacatatgggttctctccacctattccaagttatcatgaatagtcctgctatgagcatgcatgtacacgcttttgtttgaaggcctgatttcaattctttgggatatatagctgggagtataagtgctgggtcatatgataactctgcttaacttatctaggaaccaccaagctgtttcctgcagcggctgcacaattttccattcccaccagcagtgtatgagggtcccaacttccctatatcctcgacaaagcttgtgattgtctgggttttgtgacaaagtgggtgtgctggttcttgttttttaaaagatccacgactccctgcgtggagaacagggcctggagtgagggtctaggttgcccattcgttgctggggggccagaaagggttttactgtcacagccctcctgtggcctacaggcgagcctccctctcctaaccaccctcctgccaacctcccctttgaaatgggagcactcggaagggacagctggcagcctcctcccctgggctctgcctgcttctcctcacaccggctggtggtttgtttgccagtcacttgtatttgttcctgaacatgtttctgacagttcacttgtcattgtaattactgtcgtaatctaactaaatgttatattactgatgaatcagaagtgcactaacaaggagagatgtttcttatgaaaattcagtctaatgctttgaaggatactttacaaatgagtcaccaaaaatattggcaaattaggtgtgggtgagatgagtgtaaataactgggtgagagagaattgtcagaatctcagatgggttccacttgctgaccacttcacatggccctttaaactcaccctccacttcaaagaatccacagctgatgttggagatgatgtttcatccctgtggatttcccaaggaaagcagtttgggactgcaagagatggacccgtaatagaaggagaggccttgacaggcacggtggctcacgcctgtaatcccagcactttgggggaccaaggtggctggatcacctgaggccaggagtttgagaccagcctggctaacatggtgaaaccccatgtctactaaaaatacaaaaattagccaggtatggtggtgggcgcctataatctcagctacttgggaggctgaggcaggagaatcgcttgaacttgggaggtggaggttgcagtgagccaagattgtgccactgcactccagcctgcctaggggacagagtgagactccatctcaaagagaaaagaaggagagtccttgagaaagatcagtgattggccaggcacagtggcttgtgcctgtaatctcagcacctcgggaggctgaggtgggcgattcacttaaggccaggagttcgagaccagcctgggcaaaatggtgagacaccatctgtactaaaatcacaaaaattagctgggcatggtggcacacacctgtaatcccagctactcgggaggctgggtcgggggagaattgcttgaaaccaggaggtggagtttgcagtgagctgagatcgtgccactgcactccagccgagcaacagagcaagaccctgtctcaaaaaaaaaaaaaaaaaaaaatcagcatgcttactccttagaggttaaaattacatgtgtgttgtggggctgcccacaattgtgcccccaaataggcatgttgaagtcctaaaccccagtacctgttaatgcgaccttatttggaagtagggtgtttgcagacataatcaagttaagatggtgtcattagggtgggccctaatccattataactatgtctttataaagaagagaagagacacagagacacacagggagaatgccatgtgacaacctatgcagagactggagtgacaggccaggccagtggggagaacatgaggacaatggaacctggactgccaagctccagcccccaaatccctcccttctggttccggaggccccagggttactctcccgcacactaactgctttgaaaacctcattcctcaaatctactccatcatgggtggcctgaagaagcctggacaggaggtcctgggtgacctgtgagggcatacaccacagagctgggtgcaaacctgcagagccaaaacctggggctcctggcttcaaatccacctctcaccagtatttgagttctctttccagcggaaagtctgcccggcctcagagttgcagccaggagagtggctcagaatccagcatgaaaacatttggaagacatcaaggtccatttaaccagcacaagagccccagccttctttgctgtgtcaatgtgggcttctccaagcctcagttttacttatccatgaagtgggtgtattaaggtaacgttaagtggctataacaaagagactcatgacaaatcaatgccttaaggaagatcatgtctctctcttgtaacagtccatagtgcacatcctgggctactgttccacatggaatccagggacctggttcccttcactttcttcctctccattccttaggacattgtcctcctcgtcatagacagacacatcacaggcccgtccttgttctgactcctgagaaagggaaagagagggtaaaccaggagccccacggtctgtcagcctaagcccctgatgtaaagagttcacatcatttttgcttaatttctcctggtcacctgtccgttcccaactgtaaatggagttggaggtgaattctggtcatgtgcctggtagaaatggggaccaactttgagggacagcctcaggctgtgcagatataatgacacctccttgcaactgtgcaataggtacagctagggtacctggcgcctagtaagccctcggtaaaagtgctcaatgttactgagctcagagctccaagggaccttagaaactctctggcccaacgtcctcatttctttacagctaaagaaacaggcctagagaggagtgacattggcctgtgttccccatgggtaaggagaaaagttggttcagaatcctatctggcctgcaaaccccatgctcacaccttttatttcaaagtacctggtctaaacccactagggtctgggcagagagcagggtccatatgacctctcccctggtctcccagggttggggggcatcattctagagggaccctgtgccccacagcagcgccctcggctggggaccacacagctttatgactaggtaggtgtggccctggtttccaggacaggtggccagactgctctgtgacaaagggccacgcctgcccctgggaggggtattgggctgccgcccgcagatgttgcagtaggaactgaagaagatggcgtgcctgggcttcctcctccccgtgggcttcctcctcctcatcagcaccgtggccgggggaaagtacggcgtggcccacgtggtgtcggagaattggagcaaggactactgtatcctgttcagctccgactacatcaccctcccccgggacctgcaccacgccccactcctgcccctgtatgatggcaccaaggcaccctggtgcccgggtgaggattccccccaccaggcccagctccgctcccccagccagcggcccctccgccagaccactgccatggtcatgaggggtaactgcagcttccacacgaaaggctggctggctcagggccaaggtgcccacgggctgctcatcgtgagccgggtcagtgaccaacagtgctcagacaccaccctggcaccccaggatccccgccagcccctggcagacctcaccatccctgtggctatgctccactatgctgacatgctggacatcctcagccacactcgtggggaggccgtcgtccgcgtggccatgtacgcacccccagagcccatcatcgactacaacatgctggtcatcttcatcctggctgtgggcacagtggctgcaggcggctactgggccggcctgaccgaagccaaccggctacagcggcgccgtgcccgaagaggaggggggtctggtggtcaccatcagctgcaggaagctgcagcagctgagggagcccagaaggaagataatgaggacatcccagtggacttcacgccggccatgacaggcgtggtggtcaccctgtcctgctcgctcatgctgctgctctacttcttctatgaccactttgtctatgtcaccattgggatctttggcctgggtgctggcattggcctctacagctgcctgtcacccctggtgtgccacctgtccctgcggcaataccagaggcctccgcacagcctctgggcctctctgccgctgcctctgctgctgctggcgagcctgtgcgcaaccgtgatcatcttctgggtggcctaccgcaatgaggaccgctgggcgtggctcctgcaggacacactgggcatttcctactgcctgttcgtcctgcaccgtgtgcggctgcccactctcaagaactgctcctccttcctgctggccctgctggcctttgatgtcttctttgtcttcgtcacccccttcttcaccaaaaccggtgagagcatcatggcgcaggttgccttgggccctgcagagtcttcaagccatgagaggctgcccatggtactcaaagtgccccggctaagagtctccgccttgaccctgtgcagccagcccttctccatccttggcttcggtgacattgtggtccccggcttcctggttgcttactgttgccgctttgatgtgcaagtctgctcccgtcagatctacttcgtggcctgcaccgtggcctatgctgtgggcctgctggtcacattcatggccatggtcctcatgcagatgggccaacctgccttgctctacctagtgtccagcaccctgctcaccagcctggctgtggctgcctgccgccaagagctcagcctcttctggactggccagggcagagctaagatgtgtgggctcggctgtgccccttcggctggctctaggcagaagcaggagggcgcagcagatgcccacacagccagcacacttgagagaggcaccagccgaggagcaggggacttagacagcaaccctggagaagacaccactgagattgtcaccatatctgagaatgaagccaccaatccagaggaccgcagtgatagctccgagggctggagtgacgcccacttggatcctaatgagctgcccttcatcccccctggggcctcggaggagctgatgccactgatgccaatggccatgctgatcccactcatgcccctgatgcccccgccctcagagctgggccatgtccatgcccaggcccaggcccacgagactggcctgccctgggcgggactccacaagaggaagggtttgaaagtaagaaagagcatgtcgacccaggctcccttgtgaactggaggcactgggacacacgcctctcaaagggctggtggaacattgcagagcaaagccatgcatggcaacaagaaatcagggcatcaaagagatttcatatctacccaaggagtctctctgtttgtcgggagtgcaagagagcagcaaccacataataagagtgtgcagggctcgaagggtccttaggagtgggcaccacccccaaataatgaaggggggaaactgaggctccaagagggcctatgacttgcacaagttcaagcggcaaggtcgggatttgcatccagggctcactgggcagctactcccctctgcctgcttgcccaaccccttcccaatccagagtggcagcttcttagcctggcacacagcccccatcccatccctgccacccaccctaggctcattgcccatcttctctccatgctcaggtcaaacagaactccttgtcctccccacccgctctctctgcatatgctgttccctccagctgggatgcccttccctctccagacagaaacactccagcctggctccctgactcactagaagattccgaagcatcctttactcctcagctcacatccattctgcaaaacgtctctgttcaagaatcccaggcagcagcaccaagcccagcaagttcctgtatgcaccacccattccatcttcaggcattgagtatgcccctactatgtgcatcgccatgtggtgggcacagggaaggcctctgtctagctgggggagggggaggggtgggcagacaagaaacaaacttagaattgtctcaaagaggtcgggaggggttggagaggttgggcccagggtggaagaattccggagaccaaggcctccctcactgactctaagtaatgttcaagcctcgttgggtctctgtagtctcatctgcaaaatgagacttataataccatttccatctggaggcaggggcatggacgagatgacctcctaaggactctacaggcttttaggccatgtagggtgctgatgtgttgcttaatcagagcagacaaactctggggtgagaaggcttcctggaggaggtgtttttggaggggaggaaagtgtatcccaagaggcggtgtggttcagtggttagggttctacagccaggctgcctaccacaaatcccagccctaccactgacttggagtatctcactgagcaaatgacttatccattcagtgcctctgttttcttgtgtgtgaaatgggataataggacctaccatctggttcttaggaagtttgaacgagttggcctatgtcaggtgattggcacaatgccctgcctgtccgaagagccccctgcacgtgagctatgtttatattgctcccctagtgaaagcctcacagactcaaacccagctcctacaagaccttgaggtcccagcccaacggccctcttccacccctccaaacccctaccgccacaagcacacgccagacccaccacaccccccatgctttttcctcttcttggaactctctttctgccccttccttaccacgccccgtgaacttggcctggctggctgctcctcttcgcagcctttcctaaagcatccctgtctcaatcacacgaccaggcacctttagttttccgatcttccccggtagagggccagctttggaagggcaggggccttgcccatcttgttcatctgtgtaatttcagggctcagaacagcccctggagtgttacaggtgcttgatgtatttgctggaggaatgaacggatggatgaatgaatgaatgaatgaatgaggagttgaccagcctgaactgcagaggagggaatgctatgagggaaggccccactgcccaggccacctcacaggcttcctgcaggaccttggtcagtgttgacgtgagacttggcaggcctggctgggccctggagtggggagagagtcccagggaggcagtgcaggtggtgggcctctcaaagccccgcttgccagggaagaagtgcagcctctcggtacacagcagctgaaggcccgctagacaagggaagcttggagaacccggccaggccactgcggaggtgttggcagcccctcccaccggagcagtggccatctggcctggacagagggccctccgcaggccctggctcagccccagcctgggcagcctccctgctgctggcctgcgtcacggggcctgccgagggcagctgcaccctctgccaggcccgatgggaagggctggacagagccgaggcctcctgggctccctggcccccacatcccccaaagcaggaggtcaggataaaggaacttctctttcccagaaatccagtctgagggctctgaggatgcaggcctggagctccgcaggcctgcagggaggccaatgcctacctccaaggagaggggattcagggagggtctgggtcaggaggcctcccccttcccggcatccagacctgatggggaggtgagggcccacacggcctggatctgctgcctccatccctcttccccaacccccagcttgctgcactgtgcttgggcagcagaactgaggtgctcacagggtcccaaggccaggcctggggtggacagcagcccagggtgcagtggcatcacagtgcccaggtagctctcagctctgcttctcactgggaattcgtcctagtcacctaagtttcaccaccccctccccctgctggttccctagtgtggccacagccaggactgaccaatgtcggggacctctatgaaggacaccccagctccagagctcccgagggctcactggggccccagccaaccggccccgaggcccagcttcatcctcaccttcctgcagacctcactccctcgcaagcatctcccctgagaccactgcccagcacctcccacccagcatgctcctgaggttcattcccagggagcccaagctaagacacagggacagctgccttctacgtgtgaactggaaaaactatgtgagtccccccacacacccctacatcctccaagctcttctgccctgctcaggaaacaagtgtggagacggggctggaggcaggtgatgggcaggacctttcttcttcctcccaagaatactctgcagcaactctgcccatttcacagatggggctgggcaaggactctgggtctagaggcagcttgagggtttagaaagaggcacccaagcacggctgcaggtcagaatcattggggcacctgccaaaaatctggattcctggccccaccgattctgagttgacaggtctggggtgggaccaggcatcaaccattttgagggacccccacccccaccccagggtgaacacctttagagtttggcttcagcctcttgtcttggctgggccaggaggagatggggaggagggagaccaaggcttcaaggtgccgggggcccaaggcaggtcctgccttccatcctgacatacacattcagctgggggccctgcaggctcccctccctgagccctgggtacacctgaccacacccggaggctcaacctccaccttgctcccctggccaatcccggtctggggcaggagaaattgaagcaactttaccaaccaacaatcttcacttaaccgccacatttctcaacccccaccccactctctagcatgtcctctgaggcagactttgtcctgttttgttcatcatgcactggacctggcacatagtaggtgctcaataaaacatctgttgaatgaattcactggctggatgaatgtcccccttactagctgtgtgactttgaggatgcaaaagtctccttaccataaagtgggcgtaataacacctcctgccccaggggttgtggtaagtaataagccatatgggtgaggagctgagcccagtgcccggcacagagtcaagtctcctagatcttgccctgctgcccctgctgtgccctctgatggcccaatgtccctactcctgcccagaggcctcctcttactctgccagtcctcttcccagaggacagggccaactccaggtgtccagaccacgctgccacctgccagcggtgcccaaagctggaagcccctgcctgaatgccagagggacacaagatactgcgcatgggcatatacacacacgcatgcacacacatttgcatacatacatatacacatgggcacatacccatgctgcacacttcacacacccccacaccccacacctgcacacatatacacccatgcgcacatccacacacatatacctgtactgaacacatgcacatgccccgtgcacacctgttcacacccaacacgtgcacacacacacacacacctctgggctctgacctgctgcgtgtggttccctacagatccagcctttccccaccaggcctttcctgggcttacaggagtgggggtgctgatccctggatttcccatcccaaaggacagggtggtcaaggtccctccctgcaggcctacccctttcctggtggaacagatcccccttcaagacagaactcgctgcccagctgctctgaggagtgtggttcgaggacagcctcctgggggcacctcagctttctagcccggctcactcgtgctcttcaggggagggggcacaaagggccggttactggctgagcaagacaggggcccaggccctggctgtctccacccagagtggtctttgctttgatcccatgggctggcagaggcagcacagggctgcatcccaggctgccggctccccgtgctgcaagctgcttcctcctggctccaccactaaccaccacagcacctgcttcctggacagcctcacctgtgataggtgaaccctcagatgagaccagggcaggaatagcctcctcaaggccacccccagggccccaggtggcccagcctcagggtcgagctgttttacacaggccaactggcatttctgtctgtgaccttggtaatcccagcaccagctttatgagcatgggcttggttttcttttgttcatgagagggtttagtactggagcttctggatttctgggacagtggggaccagcaaggacctgtgagatgatctcatccacagatgaggaaaggaaagcccagagagggccaggacctgcccaaggtcacacagcaatgggacagcagaaacgaaatgcaagtctggtctcctgcctcccagcccagcagctgggaccagctctcatcctcaacagcccctccctccacacaccctggtctctgattttgttcctctgaaatcacacctcccccaggaaaactctgggtctacccactcctgtgccctgggaggtatagccccacattctccttgagaagtatctgtgtgtgttgcttgataaaggttcagcatcaatccgcttgccagctagaaggagaacacagctggactttgagacctgggttcaaagccccacattgctttctcttgtcatgtgatgctggacaacagaagccagccctctgagcttcaattttctcatctgtaaaatgggctgctaagactcacctaatggttcgttgtaaggattaaatgaagtgaagtatgtgtatgaacagctaacactggctaagcacttacagcagggcagataaatgcattatctcattacgtgtgacccaggtttggggaaaaactttccaggacagcacctgacatacccccaaatgccgtcttccccaaatgagctcccggaagtggagtcatcctcttcccttggtctcccctgcccacgctcactgggatgtggtgtgtgggtgggtgcctggtggtaagcagggcaccaccgcagagccaagaaaaggtttcccaaattcccccacgtactgggtcctgcagtttaactgaaccaccaacgttttgcgccttttttcctgcaaccctgaaccttgaatgctcctgtgctgccacctactggccaggaagataagagcaagcaggggctcatggaatttggggataattataatcagtaatgatatttaaaatatgtttaataaactagcaatcagcagagttctgaagcccctattgggctcaaggttaacgctttagaatctgggttgttagaagggtgaggtgccctggaggaggttattttgatattttattgaatgaaatagcccaaaacagcatcactgaatgtccttaatgcctaaagacggtccatgccctgacacttaccccaccccatagaatcagaccaccatgaataagtgtcctcaggccccccggttcctggactatttgtacgcaagatgaggagactccccatatggcccctccccacccccacccccaggtccagacccagtccttgcccctggaacgggacctggaagggaagcagacagctggggctgctgctgagagaaccttgggctgctaaaatctgagacgttctgagtttttgtttttgttttggtttggcttggtttggtttgttttttgagacaggatcttgctctgtcaccaaggctggtgtgcagtggcatgatcacagcccactgcagcctcaaccttccaggctcaggtgatcctcccacctcagcctccccagtagctggaactacaggcatgcgccaccatgccctgctaatctttgtgtattttttgtagagatcgggttttgccatgttgcccagactggtctcctaggctcaaacaatcctcccgccttggcctcccaaagtgttgggattacaggtgtgagccactgagcctgacctgagaccttgttctgagaaatgcctttaagtagtattccccaggctcccaaagacttgaatggcagcaaagattggtggggtttgggggattgcagtgaggtctgaataatggtgttggcagagcctccagtgatcatccagaactgaggacagagagggaaagcagcctgcccaaggtcagacagcagacccagtgacaagcccaaggcaaccgagaacctggaaactaatgcagaaacccttcgtaaacaggagacgctttctggtttgcctttcagaggctgcttcatgaagcccccaaattcccccacatactgggtcttcttaaagcaggaggcccctgggtccagagagaaaagaactctgagcaaaaccctcagtccctcgtccagcctggacccaggcttggccctgcctgcagttcctgacttgacccagacactgtagtgaactcaggcaggaggggccacacctgagaaccctcacccatcacagcccaggttctcttcccggctatcccccgggacagccccagagcatgagccaagggagtctggtctccacctaccttgcttaatccttaaagccagttgtgacacattgaataatgtcctcccccaaaaatttggaacctgtgatcattaccttccatgaaagggagcaaaggagaaaggactttgcggaagtgactaagcgaaggatcctgagatggggagataatcctctatcgtcctagcgggccctaaacgcaagcacatgggcccttatgagagagagagggagagagagagagacagagacagaggagaagctgggcgcagtggctcacgcctgtaatcccagcactttggagcccaaggcaggtggatcaattgaggtcaggagtttgagaccagactggccaacacagcgaaaccctgtctctattaaaaacacaaaaattagccaggcatggtggcacatgtctgtaatcccagctacttgggaggctgaggcaggagagaaagcttgaatcccagaggcggaggttgcagtgaggggagattgcaccaccgcactccggccttggtgacggagtgagactccatctcaataaaaaaaaaaaagagagagagaggactgggtgcagtggcttatgcttgtaatcccagcactttggaaagccgaggcaagtggatcacctgaggtcaggagttcgagaccagcttggacaacatggtgtaaccctgtctctactaaaaatacaaaaattaaccgagcatggtggtgggtgcctgtaatcccagctgcttgggaggctgaggtaggagaactgcttgaacccgggaggtggaggttgcagcgagccgagattgcgccactgcactccagcctgggcaacagagcgaagctctgtctcaaaaaaaaaaaaaaaaaaaaaaaaagagctagagagagagacagaggagacagcaggattacacacatggaagtggagaaggcaatgtggtgatggagacagattggagtgatgtggccacaagccaaggactgccagcagccagcacgagctggaaggggtaaggaatgaattccccctagagcttccagagggaacacagccctgaccccttgatttcagcccaatgatcctgattccagacttctggcccccagagccgtgagagggtatatttctgtcgtttgaagccatcaggcgtgtgatcatctatacagcagccacagacgcgaatccagggttcaacagacatctgtggcacaggctgcccttgcgcccagagctgtgcctgagaagtaaatggctcacagagcagacaagatgaagacataacccaaccacaaaagccccctggcccgccgggtatactttcctgcaggggaaaggtgggcacaggggagtcagggaaagagaggcgagaactggagtcttggctgcaacagccagtgagtgcattctcagttcaagccactgcactgggctccagggacttctttccactgttattgattgcactctagaggaaaattggaaagcacaggaaagtagaaaaaaaaatccacattactataagcttttgttttatttccatccagtcatttgttttccccacgcataagggtttggttttgtttttatttttttaattgtggtaaaatacacataacaaaatttatcaaagtgtacagctcagcaatattattgaatacacttacaatgttgtgcaactagcaccaccatccatttccagaactcttcatcttgtcaaacgaaattccatacccacaaacaataactctcatgccttcctcccccagcctctggcaaccaccattctacttcctgtctctatgattttgactaccctaagtgcctcatataagtggaatcacacagaatttgtctttttgtgactgactcatttcatttagcataatggccttaaggctcatccatgtggcagcatactgcaggattcctttcctttttaaggatgagtaacattcactgtgtgtatgcaccacattttgcctagccattcattcctctgttggtggaaacttgggttactataaacattggtgtgcaaatattagatagtgcaaaatttattgtggtttttgccattactttcaatatctctgaggccctgtttttagttctttgggttatatacccagaagtgcaatttctgaatcacatggtaattctatgttcaattttttgtttatgtatgtatgtatgtatttatttatgtatgtatgtatgtatgtatgtatttattgggaatggggtcttgctgcattgctcagggtggtctcgaactcctgggctcaagcaatcctccctcaacctcccaagtagcggggattacaggcatgagcccctggctttatggtgtttgtttgtttgtttgtttgagacagggtcttgctcagtaatccaggctggagtgcagtggcacgatcactgctcactgtagcctcgacttcctgggctcaagcaatcctcccacttcagtcccccaagtagctggaactacaggtgcacaccactatgcatggctaatttttttttttttttttttttagtggagatgcggtctcactatgttgctcaggctggttgtgagctcctgagctcaatcgatcctcctgcctcagcctctcaaagtgctgggattacaggtgtaagccacagtgcccagcctctgtttaattttttaagagattgccatactgtttccatagagactatagcattttacattcccaccaatagtgcacatgtgttccaatttctctacatcttcatcaatacctattttctggttttgggtttttgttgttgttgtttgtttgtttgtttgttttgagacagagtttcgctcttgtcgcccaggttagagtacagtggcacgatctcggctcatgcaacttccacctcctgggtccaagccattctcctgcctcagcctcccaagtagttgtggttacaggtgtgcaccaccacgcctggctaatttttgtgtttttagtagagacaaggtttcaccatgttggccaggctggtctcaaactcctgacctcaggtgatccatctccctcagcctccaaaactgctgggattataggcataagccaccatgtccagccaattttctggggtttttttgtattgtttttttgtttttttttttaatagcagtcttcttaatagatatgaggtaatatctcattatagttttgattggcatttttctaatgctcatttttccatgtgcttattggccatttgtctttttaaatggagaaatgtattttcaaaacctttgtccttttttgaatcaggttgtttgtcttttagttgttgagttttagaagttctctatatattctaaatattaatcctttatcagatatataatttgcaaatattttcctccatactgtgggttgcctttttactctgttgatagtgtcttaggattaacaaaatttttttaacttttatgaagtctagtttttcttttttatgaagtctgttgtctgtgcctttggtgtcatatctaagaaatcattgccaaattcgatgttggtaagcttttgcctgatgttttcttgtaagagttccatgcataggtttattatttgttcatttcagtcccaagatgtcatctgtcacccaggccatctgaatccttgttaaagaaaagggcacaactgttctttgtcatgtccatccagctgcaggacttctgatacctccctaccatttgtcaaaccaaccccaactcctcagcctggtgtttaaggccatctgcatccagccttccctcctgactggccttccctccactggcccctatacatcctgttcacatggctcttctcacacgctcacccttgctccgtgcctctgctcacctggaatgagcttcttccaccttcctctaattcctataaacaagaatccactgagacagtccacattccagggcccctgtgctgggccctgtccaaggtcctggagatgaacataaacaagatgtgagagtggcgggagagggtcacggatgcattctctttaagactctttcggctttgaagaataagaaactgctcaaagtagcttaagccaaaagagaagcatatttgaagggacacaggaatttctcagaacagaagggcaaacagcccagtcagggctcatgggaactgggaattagaaagctttctgcctcgccgagcttcataatctctgggcctccacttcctctcctcccctccctgggctggctgcctctgctcacccattttgcccttgtctcgtcatgccactggcccccaactccacgtcattgcctctcagcccaggggtcaccaacaacaggcaacggtgtctatgcagccacatttcagactctctcgagagaatctacctggcttccacactctctagggaccctatttgtttggcatcctgtcactgactgtgggtgagcccatgggtccctgactcaggtgcccaccccaggtccaatcagctgtggctggagagggagggtgaggaaggcaggggccactggatcacaaggttgttcttcctggagattgcttctcccggatcagagtctgaattttatcaggatccctgggtgaatcatgggcagattaaagtgtaagaagcaggccgggtgcagtggctcagccctgtaatcccagcactttgggccaaggcaggaggatcacttgaggtcaggagttcgagaccagcctggataacgtggcaaaaccctgtctctactaaaaatacaaaaattagccaggagtggtggtgcgtgcctgtaatcccagctactcaaaaggctgaggcaggagaatcacttgaacccaggaggcagaggttgtagtaagccgagattgtgccactgcactctaccctgggcgactgagactctgtctcaaaaaataaataaataagtgaaaacaaaaataataaagtgtaagaagtgcagctgtggagctgcggttctccgagagtggtccctgatccagcagcctctgcatcactgggcaacttgttagaaatgcagattatgggcccggtgcggcggcgcatgcctgtaaccccagcacttccggagggcgaggcgggtggatcacctgaggtcaggagttcaagaccagcctggccaacatggtgaaaccccgtctctactaaaaatacaaaaaatcagcctggcatggtggcgtgtgcctgtaatcccagctactcgggaggctgaggcaggagaatcacttgaacctgggcggcagaggttacagtgagccaagatcacaccactgcattccagccttggcaacagagtgacactctgtctcaaaaacaaaagaaacaaacaaacaaaaaaatgcagattatgaagccctatcttagacctgctgaatctgaaactctgggggtggggcccagtcctttgttttcacagccctccaggtgactcagatgggcaccaaagtttgagaactattgccctaaagcagggattggcaagcttttcctctaaagggctagatggtaaatactttagacttggtggcctcaactctgctgtcatagcacttaagcagccataacaatagataataaagaataggcacatgtggcaggcaggattctcaggcaagtctgggccctttttgatttttgctgccatgtcttggctgacctcagtttctggacttctggtttctgcttgacttgtcatcaaatgacctttgttctctcatggatctaacacttgctcttcttgtctttattgggagctcacctctccagtctgcccacagctcccacatggctgcctggtggccagcacagctcagaagcatgggtgacgggtaggaagtgttgtaggaacaacaggtttgtatgcccactgtgcgctaacagacccagtaactgagacagcagcgttgacagggagaaagagtttaatgatcgcagggcaccaagtgaggagatggagaccctcaaatccatctcccacagtagttttgggtgaggtctctaaggggattgtggagggtgagctagtgaagaactggggctgttgactggttggatcctttcaagaatcatgagtttcagtgccctggttggttcctacctgcgctcatgccccacggttggtataacaaatttccacaaaccaggtggcttaagacaacagacatttcttttctccccatctggagcacagaagtctgaagtttaggtgtgcccagcagggctgtactccccataaaggctctgggaggagtcctgtgtttcctctccccacctctggtgactttaggcactccttggcttgtggcaacatcgctccaatttccacctccactgatatgtgacctcctccgcacctttgcgcatttcaaatctccccctgcctttctctcatggtgcacttgtcactggatttagggcctgcctggagatccaggatgatctcattttgaagctcttcactaattacatctgcaagacccattttccaaataaggtcacatccacagcttcctgtggacatctatttggtggttgaggcacactattcaaacccttacaccaccctccccatcaaacacacaggaccagactagggacaattggtgtctccactccacctccatcctaatcagaactacaaaggacaaggtttctggtcatccccatactacagccagagccagaagaacatctgagaaataaggcatggcccctcttctccaggaacccatggctcaatggaagcagagctgccaagaggagtgccatatttctaccccactatggcagtgcctacccctgcccactagctcctttcaggttctggagctatgcccggaggatgagataacgcccacggggagccggagcatcctggagagcatcccatcctggatggatgggtcttgcagggcgcccagtgatcctgacacacacacaaactcccttctgcagcttccgttctcctagtgcaggagattttacagttgccaggatggcaattaggaagggaacgagcagccaaatggcgcattcttgggccccgcagccagcattctgtgctgcccgtctcagtgccaggaggatgagactttccagaaagcaagctatgtccagacaagatccatcctgaacattagctcagcaacaatgagggaaatgaagagtaa

SEQ ID NO: 824 - protein, 1211 aa, Homo sapiens
MTRSIPATPRRCPHRAAPIQQKAHLCPSLLLQKKSKVHYHVAVIINYLGHCISLVALLVAFVLFLRLRSIRCLRNIIHWNLISAFILRNATWFVVQLTMSPEVHQSNVVRPGRGAGSRLVTAAYNYFHVTNFFWMFGEGCYLHTAIVLTYSTDRLRKWMFICIGWGVPFPIIVAWAIGKLYYDNEKCWFGKRPGVYTDYIYQGPMILVLLVRTWVGAGDRAQWGGAISANRGQKGPLYLEINFIFLFNIVRILMTKLRASTTSETIQYRDLPLPPPTWPSLPSQRAARPGVGCDSEPPHPPHPRKAVKATLVLLPLLGITYMLFFVNPGEDEVSRVVFIYFNSFLESFQVRSAIRKRWHRWQDKHSIRARVARAMSIPTSPTRELKKMACLGFLLPVGFLLLISTVAGGKYGVAHVVSENWSKDYCILFSSDYITLPRDLHHAPLLPLYDGTKAPWCPGEDSPHQAQLRSPSQRPLRQTTAMVMRGNCSFHTKGWLAQGQGAHGLLIVSRVSDQQCSDTTLAPQDPRQPLADLTIPVAMLHYADMLDILSHTRGEAVVRVAMYAPPEPIIDYNMLVIFILAVGTVAAGGYWAGLTEANRLQRRRARRGGGSGGHHQLQEAAAAEGAQKEDNEDIPVDFTPAMTGVVVTLSCSLMLLLYFFYDHFVYVTIGIFGLGAGIGLYSCLSPLVCHLSLRQYQRPPHSLWASLPLPLLLLASLCATVIIFWVAYRNEDRWAWLLQDTLGISYCLFVLHRVRLPTLKNCSSFLLALLAFDVFFVFVTPFFTKTGESIMAQVALGPAESSSHERLPMVLKVPRLRVSALTLCSQPFSILGFGDIVVPGFLVAYCCRFDVQVCSRQIYFVACTVAYAVGLLVTFMAMVLMQMGQPALLYLVSSTLLTSLAVAACRQELSLFWTGQGRAKMCGLGCAPSAGSRQKQEGAADAHTASTLERGTSRGAGDLDSNPGEDTTEIVTISENEATNPEDRSDSSEGWSDAHLDPNELPFIPPGASEELMPLMPMAMLIPLMPLMPPPSELGHVHAQAQAHETGLPWAGLHKRKGLKGRSAASRYTAAEGPLDKGSLENPARPLRRCWQPLPPEQWPSGLDRGPSAGPGSAPAWAASLLLACVTGPAEGSCTLCQARWEGLDRAEASWAPWPPHPPKQEVLELCPEDEITPTGSRSILESIPSWMDGSCRAPSDPDTHTNSLLQLPFS

SEQ ID NO: 825 - DNA, 1632 bp, Homo sapiens
  source (1)..(1632)
  CDS (201)..(245)
  CDS (491)..(1432)
cctagttactaattacgtttttgttggctgcttctgattggttgagcttaagttctgtgtttctttaacataggcatttacaagaaataccacaaataaagtttcagacatgcttgcaaatcaagcaaggttaaggtcacttaggaggcccaactggctctgtctgctcaaggattcttctggcctcgtctccattttacatgaactgttgcataaataaacacagagtacctgaaacaacggaggtgatcattctgcctaccgagtgttggccacgccaagcttggagtgttgctcttattcttagggagtttatttttaagtaatctcatctgtaaatgggattacaatccacaaactgaccttgtatatgattccattccttctcccagcccagccccacactccaaggttttccctttgcttataaggggtagtcacccttttttatttcgaccttccaaacattctgggagttttcctcctttaggccaactacagcgcagaggagcgctttctcctgctgggtttctccgactggccttccctgcagccggtcctcttcgcccttgtcctcctgtgctacctcctgaccttgacgggcaactcggcgctggtgctgctggcggtgcgcgacccgcgcctgcacacgcccatgtactacttcctctgccacctggccttggtagacgcgggcttcactactagcgtggtgccgccgctgctggccaacctgcgcggaccagcgctctggctgccgcgcagccactgcacggcccagctgtgcgcatcgctggctctgggttcggccgaatgcgtcctcctggcggtgatggctctggaccgcgcggccgcagtgtgccgcccgctgcgctatgcggggctcgtctccccgcgcctatgtcgcacgctggccagcgcctcctggctaagcggcctcaccaactcggttgcgcaaaccgcgctcctggctgagcggccgctgtgcgcgccccgcctgctggaccacttcatctgtgagctgccggcgttgctcaagctggcctgcggaggcgacggagacactaccgagaaccagatgttcgccgcccgcgtggtcatcctgctgctgccgtttgccgtcatcctggcctcctacggtgccgtggcccgagctgtctgttgcatgcggttcagcggaggccggaggagggcggtgggcacgtgtgggtcccacctgacagccgtctgcctgttctacggctcggccatctacacctacctgcagcccgcgcagcgctacaaccaggcacggggcaagttcgtatcgctcttctacaccgtggtcacacctgctctcaacccgctcatctacaccctcaggaataagaaagtgaagggggcagcgaggaggctgctgcggagtctggggagaggccaggctgggcagtgagtagttggggaggggagaaagtattaagccagaacccaaggatggaaataccccttagtgagtcagtttagacttcaggctgttcatttttgtatgataatctgcaagatttgtcctaaggagtccaatgggggatatgttttcctcccgtgaggaaatgtttagttcttgagggaaaatccctaaatcctctatatact

SEQ ID NO: 826 - protein, 328 aa, Homo sapiens; identical to SEQ ID NO: 578

SEQ ID NO: 827 - DNA, 1168 bp, Homo sapiens
  source (1)..(1168)
  CDS (201)..(968)
  modified_base (12)..(111): a, t, c, g, unknown or other
agatttgcctgnnnnnnnnnnnnnnnnnnnnnnnnnnnnnnnnnnnnnnnnnnnnnnnnnnnnnnnnnnnnnnnnnnnnnnnnnnnnnnnnnnnnnnnnnnnnnnnnnnnnggctgtttctgctgatttatctggcagtgctggtggggaacctgctcatcattgcagtcatcactctcgatcagcatcttcacacacccatgtacttcttcctgaagaacctctccgttttggatctgtgctacatctcagtcactgtgcctaaatccatccgtaactccctgactcgcagaagctccatctcttatcttggctgtgtggctcaagtctattttttctctgcctttgcatctgctgagctggccttccttactgtcatgtcttatgaccgctatgttgccatttgccaccccctccaatacagagccgtgatgacatcaggagggtgctatcagatggcagtcaccacctggctaagctgcttttcctacgcagccgtccacactggcaacatgtttcgggagcacgtttgcagatccagtgtgatccaccagttcttccgtgacatccctcatgtgttggccctggtttcctgtgaggttttctttgtagagtttttgaccctggccctgagctcatgcttggttctgggatgctttattctcatgatgatctcctatttccaaatcttctcaacggtgctcagaatcccttcaggacagagtcgagcaaaagccttctccacctgctccccccagctcattgtcatcatgctctttcttaccacagggctctttgctgccttaggaccaattgcaaaagctctgtccattcaggatttagtgattgctctgacatacacagttttgcctcccttcctcaatcccatcatatatagtcttaggaataaggagattaaaacagccatgtggagactctttgtgaagatatattttctgcaaaagtagaacatcctggtctttactatagaagatctgcaacaaaaccccaaaaaagcataaatactttatgacaaaaaaagatgaaaaaattgttgatgaaatgatgaaaaatcctgaaaaaaaaaacctgttgaatgggagaaagacaatatttgcactactatatgtagatagaaatgcaaatgtttcttcaaaaactaaaagta

SEQ ID NO: 828 - protein, 255 aa, Homo sapiens
MYFFLKNLSVLDLCYISVTVPKSIRNSLTRRSSISYLGCVAQVYFFSAFASAELAFLTVMSYDRYVAICHPLQYRAVMTSGGCYQMAVTTWLSCFSYAAVHTGNMFREHVCRSSVIHQFFRDIPHVLALVSCEVFFVEFLTLALSSCLVLGCFILMMISYFQIFSTVLRIPSGQSRAKAFSTCSPQLIVIMLFLTTGLFAALGPIAKALSIQDLVIALTYTVLPPFLNPIIYSLRNKEIKTAMWRLFVKIYFLQK

SEQ ID NO: 829 - DNA, 1120 bp, Homo sapiens
  source (1)..(1120)
  CDS (201)..(920)
taactggactcagagttttatccttgctggtttcaccaccactgggaccctacaacctcttgccttcttggggaccctatgcatctatctcctcacacttgcagggaacattctcatcattgtcctggtacagttagattctggactgttcacgcccatgtacttatttatcagtgtcctctcctttgtagaggtgtggtatgtcagcaccacagtgcccatgctgctgcacaccttgctccaagggtgttcacccgtctcatcagctgtatgctttattcagctatgtctttcattccttagggatgactgagtgctacctgctgggtgtcatggcactggatagctaccttatcatctgccacccactccactaccacgcactcatgagcagacaggtacagttacgactagctggggccagttgggtggctggcttctcagctgcacttgtgccagccaccctcactgccactctgcccttctgcttgaaagaggtggcccattacttttgtgacttggcaccactaatgcggttggcatgtgtggacacaagctggcatgctagggcccatggcacagtgattggtgtggccactggttgcaactttgtgctcattttgggactctatggaggtatcctgaatgctgtgctgaagctaccctcagctgccagtagtgccaaggccttctctacctgttcctcccacgtaactgtggtggcactattctatgcttctgccttcacagtatatgtgggctcacctgggagtcgacctgagagcacagacaagcttgttgccttggtttatgcccttattacccctttcctcaatcctatcatctatagccttcgcaacaaggaggtgaagaaggctttaaggagagtcatggctgggcgcggtggctcacgcctgtaatcccagcactctgggaggccgaggcgggtggatcacgaggtcaggagatcgagaccacggtgaaaccccatctctactaaaaatacaaaaaaaattagccaggctcggtggcgggtgcctgtagtcccagctactcgggaggctgaggcaggagaatggcgtgaacccgggaggcggagcttgcagtgagtcgagatcgc

SEQ ID NO: 830 - protein, 239 aa, Homo sapiens [sequence omitted]

SEQ ID NO: 831 - DNA, 2084 bp, Homo sapiens
  source (1)..(2084)
  CDS (201)..(897)
  CDS (1796)..(1884)
aaagtttgatgaacgcttgcctgattttagcaacatcatgtcttggaaaaacaagagggaggagaaaagatgagttcagaattcaaaatctgagaacgcatgctgatgatcaattttctgtgaatctacttattttcagggatttcttttggtgctgactcctcttctctccctaattgtctcctgatgatgtatgctccatggagcgggtcaatgagactgtggtgagagaggtcatcttcctcggcttctcatccctggccaggctgcagcagctgctctttgttatcttcctgctcctctacctgttcactctgggcaccaatgcaatcatcatttccaccattgtcctggacagggcccttcatatccccatgtacttcttccttgccatcctctcttgctctgagatttgctacaccttcatcattgtacccaagatgctggttgacctgctgtcccagaagaagaccatttctttcctgggctgtgccatccaaatgttttccttcctcttccttggctgctctcactcctttctgctggcagtcatgggttatgatcgttacatagccatctgtaacccactgcgctactcagtgctaatgggacatggggtgtgtatgggactagtggctgctgcctgtgcctgtggcttcactgttgcacagatcatcacatccttggtatttcacctgcctttttattcctccaatcaactacatcacttcttctgtgacattgctcctgtcctcaagctggcatctcaccataaccactttagtcagattgtcatcttcatgctctgtacattggtcctggctatccccttattgttgatcttggtgtcctatgttcacatcctctctgccatacttcagtttccttccacactgggtaggtgcaaagctttttctacctgtgtatctcacctcattattgtcactgtccactatggctgtgcctcctttatctacttaaggcctcagtccaactactcctcaagccaggatgctctaatatcagtatcctacactattataactccattgttcaacccaatgatttatagcttgagaaataaagagttcaaatcagctctttgtaaaattgtgagaagaacaatttccctgttgtaaaattaatcttgattctggccaggtgcagtttctcacgactgtaatcccagcattttggaaggctgagacaggtggatcacctgaggtcaggacttcaagaccagcctggccaacatagtgaaatcctatctctaccaaaaaatatacaaattaaccggatgctgtggtgggctcctgtaatctcagctactcaggagcctgagacaggagaatcacttgaacccaggaggcagaaggttgcagtgagattgtgtcactgcactccagcctgggcgacagagtaagactctgtctcaaaaaaaaaaaaaaaaaaaaatcttgattctgctctttccaaaccgtaaaccacaagttatacaggaaaaaattcccagaacacaaatgatcaagcaattgagcattatgttcaggaacatagatcatttcccgtcatctccaaatataaaatttagaaaaacacaactgcttgccacactcacatgaattattgcctattgaaggttttttttcaattgattaaaaaataacagatggctattatggggaagcatatgtatgttcagaattttaggctgtagtaaatactgtcacccaatctcagccaggctgaaaactaaccctgcaaaatgtggcacaaccctaactctctgttctagggactcaggaagcttctatctctaggatttttctagatgttttctggacctcagtcttccaaaatcatcagatcacaattgttaaatgagatacttgttaagcgtcattacaatgtttgatgcataagatatatccaaataatgttcaagttagaaaattatgaaaagttatccatttccatgcttctagtgtattaatgaaatacgatcatttctaattttgtatgcagaggcatacatctaaatttggtcagcataccctgaagatattcacaggggaatggattaa

SEQ ID NO: 832 - protein, 261 aa, Homo sapiens
MERVNETVVREVIFLGFSSLARLQQLLFVIFLLLYLFTLGTNAIIISTIVLDRALHIPMYFFLAILSCSEICYTFIIVPKMLVDLLSQKKTISFLGCAIQMFSFLFLGCSHSFLLAVMGYDRYIAICNPLRYSVLMGHGVCMGLVAAACACGFTVAQIITSLVFHLPFYSSNQLHHFFCDIAPVLKLASHHNHFSQIVIFMLCTLVLAIPLLLILVSYVHILSAILQFPSTLGTQEASISRIFLDVFWTSVFQNHQITIVK

SEQ ID NO: 833 - DNA, 1084 bp, Homo sapiens
  source (1)..(1084)
  CDS (201)..(884)
tccttcgtttgacccagtttcgagatatttagctcctggtctttgtgctagttttaatattctacttcttcatcctccctggaaattttctcattattttcaccataaggtcagaccctgggctcacagcccccctctatttatttctgggcaacttggccttcctggatgcatcctactccttcattgtggctcccaggatgttggtggacttcctctctgagaagaaggtaatctcctacagaggctgcatcactcagctctttttcttgcacttccttggaggaggggagggattactccttgttgtgatggcctttgactgctacatcaccatctgcctgcctctgcagtattcaactgtcatgaactctagagcctgctatgcaatgatgttggctctgtggcttgggggttttgtccactccattatccaggtggtcctcatcatccgcttgcctttttgtggcccaaaccagctggacaacttcttctgtgatgtccgacaggtcatcaagctggcttgcaccgacatgtttgtggtggagcttctgatggtcttcaatagtggcctgatgacactcatgtgctttctgggacttctggcctcctatgcagtcattctttgtcgcatacgagcgtcttcttctgaggcaaaaaacaaggccatgtccacatgcaccacccatatcattgttatattcttcatgtttggacctggcatcttcatctacacgtgccccttcagggctttcccagccgacaaggtggtttctctcttccacacagtgattcttcctttgttgaatcctgtcatttatacccttcataaccaggaagtgaaagcttccatgaaaaaggtgtttaataaacacatagcctgaaaaagggcaaaaaaaaaaaaaagaataaaaatagactgtagaattttatctgaaattgatttgtttatttccaagtactgcaatcattgaatacctcccatttgtcaggactattctaggaactgaagaaagaaagtattgaggcagataaggtctatctgctctccaagagatacaacctagtaaaaatagaccgccgt

SEQ ID NO: 834 - protein, 227 aa, Homo sapiens
MLVDFLSEKKVISYRGCITQLFFLHFLGGGEGLLLVVMAFDCYITICLPLQYSTVMNSRACYAMMLALWLGGFVHSIIQVVLIIRLPFCGPNQLDNFFCDVRQVIKLACTDMFVVELLMVFNSGLMTLMCFLGLLASYAVILCRIRASSSEAKNKAMSTCTTHIIVIFFMFGPGIFIYTCPFRAFPADKVVSLFHTVILPLLNPVIYTLHNQEVKASMKKVFNKHIA

SEQ ID NO: 835 - DNA, 1337 bp, Homo sapiens
  source (1)..(1337)
  CDS (201)..(735)
  CDS (923)..(1137)
aaaaattaaaaaattaaatattgatctcagtgccttttttatcattagcaaaattaatagccctgctcttgctgattccagagcctgttctaagaataaaacaaaatgatgaatatgaaagttatttgataactctacatcaaaaattcaaattttcctgtctcatgttcttttctaaactctgcagatgacatgaacacatggagacaacaaatcactctgccgtgactgaattctttctggtggggctttcccaatatccagagctccagctttttctgttcctgctctgcctcatcatgtacatgataatcctcctgggaaatagcttcctcattatcatcaccatcttggattctcgcctccatacccccatgtatttctttcttggaaacctctcattcttgggcatctgttacacatcatcatccattcctccaatgcttattatatttgtatctgagagaaaatccatctccttcattggctgtgctctgcagatggttgtgtcccttggcttgggctccattgagtgtatcctcctggctgtgatggcctatgaccgctatgtggccatctgcaacccactgaggtactccatcatcatgaacagagtgctgtatgtgcaaatggctgcatggtcctggatcataggctgtctgacctccctattgcgaacagttctgacaatgatgttgcctttctgtgggaataatatcattgatcatcttacctgtgagatcctggctcttcttaaagtcatatgctcagatatctccataaatgtgtttataatgacagtgtcaagtattgttttattggtgattcctcttaatttttatctcctatgtgtttattctctcttccatcttgagaattaattctgctgagggaagaaagaaagccttttttacctgttcagcgcacttgactgtggtcatcttattctatggttcagttcttttcatgcacatgaagcccaaatcaaagttcacaacagcatctgatgaaatcattggattgtcttatgaagtgatcaccccaatgaaccccatcatctacagcctgaggaataaggagataaaagaagctgtgaagaaaatcctcagcagacacgtgcatctatggaaaatatgaaaggccttgaggcatgtgacgttctcaacaagggatcagatcaggtgttttgtattcacagataaagtcacagaatctggtatcaagagagtgtgtatgtttgtaaagacaactttgggattcccattcttctcatcacagaatgctcatgtacaccttctgaataatgtcttgtgtgcagagtttcaagctgtaggtat

SEQ ID NO: 836 - protein, 249 aa, Homo sapiens [sequence omitted]

SEQ ID NO: 837 - DNA, 1192 bp, Homo sapiens
  source (1)..(1192)
  CDS (201)..(992)
tggatatgcacaaatacagatgtgtagtccaattccagagctggcagaggtcctgtcacctgtgtcacaggaatacgagtgtcctcctgcatctctcagagcatacgctgttgaactgaagaatttggagcacaatagagacatgtcactcaatcttataatttctcttatgttctcaggtgacagtgaacaactaagccatgggaagatgggtgaaccagtcctacacagatggcttcttcctcttgggcatcttttcccacagccagactgaccttgtcctcttctctgcagttatggtggtcttcacagtggccctctgtgggaatgtcctcctcatcttcctcatctacctggacgctggacttcacacccccatgtacttcttcctcagccagctctccctcatggacctcatgttggtctgtaacattgtgccaaagatggcagccaacttcctgtctggcaggaagtccatctcctttgtgggctgtggcatacaaattggcttttttgtctctcttgtgggatctgaggggctcttgctgggactcatggcttatgaccgctacgtggccgttagccacccacttcactatcccatcctcatgaatcagagggtctgtctccagattactgggagctcctgggcctttgggataatagatggagtgattcagatggtggcagccatgggcttaccttactgtggctcaaggagcgtggatcactttttctgtgaggtacaagctttattgaagctggcctgtgcagacacttccctttttgacaccctcctctttgcttgctgtgtcttcatgcttctccttcccttctccatcatcatggcctcctatgcttgcatctctaggggctgtgctccgaatacgctctgctcaggcctggaaaaaagccctggccacctgctcctcccacctaacagctgtcaccctcttctatggggcagccatgttcatgtacctgaggcctaggcgctaccgggcccctagccatgacaaggtggcctctatcttctacacagtccttactcccatgctgaaccccctcatttacagcttgaggaatggggaggtgatgggggcactgaggaaggggctggaccgctgcaggattggcagccagcactgaaccccagagtctggtgcctgctgtgccccttcttgcctgtgtc

SEQ ID NO: 838 - protein, 263 aa, Homo sapiens [sequence omitted]

SEQ ID NO: 839 - DNA, 1147 bp, Homo sapiens
  source (1)..(1147)
  CDS (201)..(947)
  modified_base (888): a, t, c, g, unknown or other
gaaaagaaaagaaaagaaaaatcgcgcctgaccatatacagggaatagtagaagacaaatgcctaccattctagtcatgctgtgcagcctgtgagcaggagggggatttcagaacagtttctacttctgttgcgatgagaagccatattaactcttttttttttctctagatttcagaagggaaaagcactcagaagtaaatgttggggaattactctagcgccactgaattttttctcttaggcttccctggctcccaagaagtatgccgtatcctatttgcgaccttcttcctcttgtatgcagtgacagtgatgggaaacgtggtcatcatcatcactgtctgtgttgataaatgtctgcagtcccccatttattttttcctgggccacctctgtgtcctggagatcctgatcacatccaccgctgtcccttttatgctctgggggttgctgcttccaagcacccagatcatgtctttgacagcctgtgctgcacagctatatttatacctttctttgggtaccttggagttggcattaatgggagtgatggctgtggaccgttatgtggctgtgtgtaaccctttgaggtacaacatcattatgaacagcagcaccttcatttgggtgataattgtgtcatgggttttggggtttctttctgaaatctggccagtttatgccacttttcagcttactttctgcaaatcaagtgtgttagatcatttttattgtgaccgaggacaattgctcaaggtatcctgtgaggacactcttttcagagagtttattctttttctaatggctgttttcattatcattggttctttgatccctacgattgtctcctacacctacatcatctccaccaacctcaagattccgntccctctggctggaggaaatccttttccacctgtgcctcccacttcacctatgttgtgattggctatggcagctgcttgtttctctacgtgaaacccaagtaaacgcaggcagccgagtataacagggtagtgtcactgctggttttagtggtgaccccttttctgaacccttttatcttcaccctgaggaatgacaaattcatacaggcctttggagatggcatgaaacactgcttttaactccttaaaaattaagtc

SEQ ID NO: 840 - protein, 248 aa, Homo sapiens
  MOD_RES (230): Variable amino acid
MLGNYSSATEFFLLGFPGSQEVCRILFATFFLLYAVTVMGNVVIIITVCVDKCLQSPIYFFLGHLCVLEILITSTAVPFMLWGLLLPSTQIMSLTACAAQLYLYLSLGTLELALMGVMAVDRYVAVCNPLRYNIIMNSSTFIWVIIVSWVLGFLSEIWPVYATFQLTFCKSSVLDHFYCDRGQLLKVSCEDTLFREFILFLMAVFIIIGSLIPTIVSYTYIISTNLKIPXPLAGGNPFPPVPPTSPML

SEQ ID NO: 841 - DNA, 1172 bp, Homo sapiens
  source (1)..(1172)
  CDS (201)..(474)
  CDS (551)..(972)
  modified_base (104): a, t, c, g, unknown or other
ctctgtaggcacgtgggcaagcatcctatggaaccacagttcaccacccagggatcggtgtttgtcctgttagggtagtcacagacccaagagctccagaaaantcctgttcattctgttcctgttagtctatgttaccaccattgtgggaaacctccttatcatggtcacagtgacttttgactgccggctccacacccatgtattttctgctccgaaatctagctctcatagacgtctgctattccacagtcacctctccaaagatgctggtggacttcctccatgagaccaagacgatctcctaccagggctgcatggcccagatcttcttcttccaccttttgggaggtgggactgtcttttttctctcagtcatggcctatgaccgctacatagccatctcccagcccctccggtatgtcaccatcatgaacactcaattgtgtgtgggcctggtagtagccgcctggcgtggggggctttgtccactccattgtccaactggctctcacacttccactgacattctgtggccccaatatcctagataacttctactgtgatgttccccaagtactgagacttgcctgcactgatacctccctcctggagttcctcatgatctccaacagtgggctgctagttatcatctggttcctcctcagtctgatctcttatactgtcatcctggtgatgctgaggtcccactcgggaaaggcaaggaggaaggcagcttccacttgcaccacccacatcatcgtggtgtccatgatcttcattccatgtatctatatctatacctggcccgtcaccccattcatcatggacaaggctgtgtccatcagctacacagtcatgacccccatgctcaaccccatgatctacaccctgagaaaccaggacatgaaagcagccatgaggagattaggcaagtgcctagtaatttgcagggagttaaactttaagtaagttgactttaaatgacaaattgctctggatttttattttcccacatgaaaaatggaggaaagtctttataaagcataacaaatcagattacacttatatttcttgaggacctagtgctgtgtcaagtactgtgttaagcacttccacgctttttttcttttttttttttttgagacaagagtttcgctcttgttgtccac

SEQ ID NO: 842 - protein, 231 aa, Homo sapiens [sequence omitted]

SEQ ID NO: 843 - DNA, 1337 bp, Homo sapiens; identical to SEQ ID NO: 835
  source (1)..(1337)
  CDS (201)..(735)
  CDS (923)..(1137)

SEQ ID NO: 844 - protein, 249 aa, Homo sapiens [sequence omitted]

SEQ ID NO: 845 - DNA, 1126 bp, Homo sapiens
  source (1)..(1126)
  CDS (201)..(926)
gctcaatttcaccgatgtgacagagttcattcttttggggctaacgagccgtcgggaatggcaagttctcttcttcatcgtttttcttgtggtctacattatcaccgtggtgggcaatatcggcatgatgttgttaatcaaggtcagtcctcagcttaacagccccatgtactttttcctcagtcacttgtcatttgttgatgtgtggttttcttccaatgtcacccctaaaatgttggaaaatctgttatcagataaaaaaaaaaacaatttcttatgctggctgtttagcacagtgtttcttcttcattgctcttgtccatgtggaaatttttattcttgctgcgattgcctttgatagatacacagtgattggaaatcctttgctttatggcagcaaaatgtcaagggatgtctgtattcgactgattactttcccttacatttatggttttctgacgagtctgacagcaacattatggacttatggcttgtacttctgtggaaaaattgagatcaaccatttctactgtgcagatccacctctcatcaaaatggcctgtgccgggacctttgtaaaagaatatacaatgctcatacttgccggcatcaacttcacatattccctgactgtaattatcatctcttacttattcatcctcattgccattctgcgaatgcgctcagcagaaggaaggcagaaggccttttccacatgtgggtcccatctgacagctgtcatcatattctatggtactctgatcttcatgtatctcagacgtcccacagaggagtctgtggagcaggggaagatggtggctgtgttctataccacagtgatccccatgttgaatcccatgatctacagtctgaggaacaaggatgtgaaaaaggccatgatgaaagtgatcagcagatcatgttaaacaaaataaaatcaagtttgaattaattttgtcttctattatttgattggagaaaggttattgcccagtacttaggaacattaagataaagatattctgtgggttgaagaaaaataaaagtgatgcaaatggagaaaatataaggtagaatgtttcacttctgttcatgtgagtatggagattaattaaatatgaataaa

SEQ ID NO: 846 - protein, 241 aa, Homo sapiens [sequence omitted]

SEQ ID NO: 847 - DNA, 1327 bp, Homo sapiens
  source (1)..(1327)
  CDS (201)..(1127)
  modified_base (451)..(550): a, t, c, g, unknown or other
caggttgcagctcacatgttgtgataatattatgttgattttttgtttttaatatgtgaggaacagaataactgtatactatttattcatagtgacattgcaatattgattttagtacatattattatcttcataatcacaatttcctccccattttcttagttctcataattttagccacagcccagttggctggaccaatggatggagagaatcactcagtggtatctgagtttttgtttctgggactcactcattcatgggagatccagctcctcctcctagtgttttcctctgtgctctatgtggcaagcattactggaaacatcctcattgtgttttctgtgaccactgaccctcacttacactcccccatgtactttctactggccagtctctccttcattgacttaggagcctgctctgtcacttctcccaagatgatttatgnnnnnnnnnnnnnnnnnnnnnnnnnnnnnnnnnnnnnnnnnnnnnnnnnnnnnnnnnnnnnnnnnnnnnnnnnnnnnnnnnnnnnnnnnnnnnnnnnnnnacagttatgtgcgcctattaagccccgccactatctgaccattatgagcccaagaatgtgcctttcatttctggctgttgcctggacccttggtgtcagtcactccctgttccaactggcatttcttgttaatttacccttctgtggccctaatgtgttggacagcttctactgtgaccttcctcggcttctcagactagcctgtaccgacacctacagattgcagttcatggtcactgttaacagtgggtttatctgtgtgggtactttcttcatacttctaatctcctacatcttcatcctgtttactgtttggaaacattcctcaggtggttcatccaaggccctttccactctttcagctcacagcacagcggtccttttgttctttggtccacccatgtttgtgtatacatggccacaccctaattcacagatggacaagtttctggctatttttgatgcagttctcactccttttctgaatccagttgtctatacattcaggaataaggagatgaaggcagcaataaagagagtatgcaaacagctagtgatttacaagaagatctcataaatgatacaataagcccttctcgttaaacatgatatggctttatgtttctttctttgatattttagattcaggaactatgagacattatgtattgatttgaatgttattagacctgtaacataattcttatctgatgaatatatgatgaatatattccttgttcaaaatgagtcataaattcaacacatctctacatctat

SEQ ID NO: 848 - protein, 308 aa, Homo sapiens
  MOD_RES (84)..(117): Variable amino acid
MDGENHSVVSEFLFLGLTHSWEIQLLLLVFSSVLYVASITGNILIVFSVTTDPHLHSPMYFLLASLSFIDLGACSVTSPKMIYXXXXXXXXXXXXXXXXXXXXXXXXXXXXXXXXXXQLCAPIKPRHYLTIMSPRMCLSFLAVAWTLGVSHSLFQLAFLVNLPFCGPNVLDSFYCDLPRLLRLACTDTYRLQFMVTVNSGFICVGTFFILLISYIFILFTVWKHSSGGSSKALSTLSAHSTAVLLFFGPPMFVYTWPHPNSQMDKFLAIFDAVLTPFLNPVVYTFRNKEMKAAIKRVCKQLVIYKKIS

SEQ ID NO: 849 - DNA, 1075 bp, Homo sapiens
  source (1)..(1075)
  CDS (201)..(875)
gactgactctaaaataggcatttccttattatctgatttttttttacatggatctctctcttgcctttcataagaaggcaggttgttccttgttaaaaacatagccaaagcactcatcagcaaaaagcttgagaacttgacattggtgtttagactttggtgtcttgggtaccttttcaaggttggatgttttcacagccatgaggaatttctcggtggtgtccgaattcatcctgctgggcatccctcacacggagggtctggagactattctgttggtcctgtttttgtccttctacatcttcacccttatggggaacctgctcatcttgctggctattgtctcctctgctcggcttcacacgcccatgtacttcttcctgtgcaagctgtctgtttttgacctatttttcccttctgtgagttcccctaagatgctgtgctatctttcagggaacagccgagccatctcctatgcaggctgtgcatcccagctcttcttctaccatttcctgggctgcactgagtgtttcctgtacacggtgatggcctacgaccgctttgttgccatttgtcaccctctacgctacaccataatcatgagccacagagcatgtatcatcctagccatggggacctcattctttggctgcattcaggccacctttctgaccactctcaccttccaattgccttactgtgtccccaatgaggtggactattatttctgtgatatcccagtcatgctgaagctggcttgtgcagatacctcagccctggagatggtggggttcatcagtgtgggcctcatgcccctcagctgtttccttctcatcctcacctcctacagtggcatcgtcttctccatcttgtagatctgctctgccgagggccgacgccgtgccttctccacctgcagcgcccacctcaccgccatcctgcttttttacatgccagtggtcctcatttacctgaggcctacccacagcctgtggttggatgcaactgttcaaattctgaataacctggtcacccccatgctgaaccccttaatctacagtctcaggaataagga

SEQ ID NO: 850 - protein, 224 aa, Homo sapiens
MRNFSVVSEFILLGIPHTEGLETILLVLFLSFYIFTLMGNLLILLAIVSSARLHTPMYFFLCKLSVFDLFFPSVSSPKMLCYLSGNSRAISYAGCASQLFFYHFLGCTECFLYTVMAYDRFVAICHPLRYTIIMSHRACIILAMGTSFFGCIQATFLTTLTFQLPYCVPNEVDYYFCDIPVMLKLACADTSALEMVGFISVGLMPLSCFLLILTSYSGIVFSIL

SEQ ID NO: 851 - DNA, 1363 bp, Homo sapiens
  source (1)..(1363)
  CDS (201)..(1163)
agctagaattgcgaccttaattatccatccaaacccccctaaccaaaagttataaacctgtgatcctcccagccctgcactactcctacacgtatgccatggatgggtttgtgccactgtgagacccccaaaatctctccccttatcttccctgtcaggagtcatgcccccatgagccctcaagttgtgcccaccacagaatggcagaaactctacaactcaattccaccttcctacacccaaacttcttcatactgactggctttccagggctaggaagtgcccagacttggctgacactggtctttgggcccatttatctgctggccctgctgggcaatggagcactgccggcagtggtgtggatagactccacactgcaccagcccatgtttctactgttggccatcctggcagccacagacctgggcttagccacatctatagccccagggttgctggctgtgctgtggcttgggccccgatctgtgccatatgctgtgtgcctggtccagatgttctttgtacatgcactgactgccatggaatcaggtgtgcttttggccatggcctgtgatcgtgctgcggcaatagggcgtccactgcactaccctgtcctggtcaccaaagcctgtgtgggttatgcagccttggccctggcactgaaagctgtggctattgttgtacctttcccactgctggtggcaaagtttgagcacttccaagccaagaccataggccatacctattgtgcacacatggcagtggtagaactggtggtgggtaacacacaggccaccaacttatatggtctggcactttcactggccatctcaggtatggatattctgggtatcactggctcctatggactcattgcccatgctgtgctgcagctacctacccgggaggcccatgccaaggcctttggtacatgtagttctcacatctgtgtcattctggccttctacatacctggtctcttctcctacctcacacaccgctttggtcatcacactgtcccaaagcctgtgcacatccttctctccaacatctacttgctgctgccacctgccctcaaccccctcatctatggggcccgcaccaagcagatcagagaccgactcctggaaaccttcacattcagaaaaagcccgttgtaatgtccagtggtaacaatggagcctaagagtggaggtgaggggacaatcggaggggagtctgggggtgtggatcatgttattttcatcccactgcatatgactgttatcatcatttaacaggtacttgctgtggagtccctatgtgcaacactggcatctgtagactttgacttaaacatgtattctgcttgggaggaggc

SEQ ID NO: 852 - protein, 320 aa, Homo sapiens
MAETLQLNSTFLHPNFFILTGFPGLGSAQTWLTLVFGPIYLLALLGNGALPAVVWIDSTLHQPMFLLLAILAATDLGLATSIAPGLLAVLWLGPRSVPYAVCLVQMFFVHALTAMESGVLLAMACDRAAAIGRPLHYPVLVTKACVGYAALALALKAVAIVVPFPLLVAKFEHFQAKTIGHTYCAHMAVVELVVGNTQATNLYGLALSLAISGMDILGITGSYGLIAHAVLQLPTREAHAKAFGTCSSHICVILAFYIPGLFSYLTHRFGHHTVPKPVHILLSNIYLLLPPALNPLIYGARTKQIRDRLLETFTFRKSPL

SEQ ID NO: 853 - DNA, 1372 bp, Homo sapiens
  source (1)..(1372)
  CDS (201)..(1172)
ggaagcactatgggccagaagccattcctataccaagtgaacattctctgggagtacttgctgctggagagtccagcaatttagaaatccatgctgtcttttatgatatttatacatattcgggagtgctttctgtttctatcactttcagtagactcatcagcttctaagtcattatagagaggaccataaagtgcatcatgagtcacaccaatgttaccatcttccatcctgcagtttttgtccttcctggcatccctgggttggaggcttatcacatttggctgtcaatacctctttgcctcatttacatcactgcagtcctgggaaacagcatcctgatagtggttattgtcatggaacgtaaccttcatgtgcccatgtatttcttcctctcaatgctggccgtcatggacatcctgctgtctaccaccactgtgcccaaggccctagccatcttttggcttcaagcacataacattgcttttgatgcctgtgtcacccaaggcttctttgtccatatgatgtttgtgggggagtcagctatcctgttagccatggcctttgatcgctttgtggccatttgtgccccactgagatatacaacagtgctaacatggcctgttgtggggaggattgctctggccgtcatcacccgaagcttctgcatcatcttcccagtcatattcttgctgaagcggctgcccttctgcctaaccaacattgttcctcactcctactgtgagcatattggagtggctcgtttagcctgtgctgacatcactgttaacatttggtatggcttctcagtgcccattgtcatggtcatcttggatgttatcctcatcgctgtgtcttactcactgatcctccgagcagtgtttcgtttgccctcccaggatgctcggcacaaggccctcagcacttgtggctcccacctctgtgtcatccttatgttttatgttccatccttctttaccttattgacccatcattttgggcgtaatattcctcaacatgtccatatcttgctggccaatctttatgtggcagtgccaccaatgctgaaccccattgtctatggtgtgaagactaagcagatacgtgagggtgtagcccaccggttctttgacatcaagacttggtgctgtacctcccctctgggctcatgaatcttcatgtccagctccttcaaggaagctagatgtgaaatacagagatttcctggactgagaaggcttttcttcctcttctttctatttcatcttccgcccccaacttttctttcttttctcataattcttcctccttctcttgtttgttttctctaacctctttacatattcctccctacaacccagaaataataact

SEQ ID NO: 854 - protein, 323 aa, Homo sapiens
MSHTNVTIFHPAVFVLPGIPGLEAYHIWLSIPLCLIYITAVLGNSILIVVIVMERNLHVPMYFFLSMLAVMDILLSTTTVPKALAIFWLQAHNIAFDACVTQGFFVHMMFVGESAILLAMAFDRFVAICAPLRYTTVLTWPVVGRIALAVITRSFCIIFPVIFLLKRLPFCLTNIVPHSYCEHIGVARLACADITVNIWYGFSVPIVMVILDVILIAVSYSLILRAVFRLPSQDARHKALSTCGSHLCVILMFYVPSFFTLLTHHFGRNIPQHVHILLANLYVAVPPMLNPIVYGVKTKQIREGVAHRFFDIKTWCCTSPLGS

SEQ ID NO: 855 - DNA, 1213 bp, Homo sapiens
  source (1)..(1213)
  CDS (201)..(1013)
atgccaatgagaatggggaggtatgtatggcttctagatattgctgagatgtgatcagaaacctttgtttatatttgtatctgcaattataatgtgagaagtggaagaataacattatatactctcagtcaaggcattagtgattgattccatgttcaacttttagtggaacttacaactggctctgctgactaactctcatgttctttagtcttcatagagagactccaaaagaaggcatgtttggtgctaatctcaccaccttccatcccactctattcattctccttggcatcccaggactggagcaataccacatctggctttccattcctttctaccttatgtacatcactgcagtcttgggaaatggagccctcatcctagttgtcctcagtgaacacaccctccatgtcttcctatccatgctggctggcactgatatcctgctatccaccaccactgtgcctaaggccttggcgatcttctgggtccacgctggggagatagcctttgatgcctgcattactcagatgtttttcattcatgttgcctttgtggctgagtcaggaatcctgctggccatggcatttgacagttatgtagccatttgtactcccttgagatacactaccatcttaacttctatggtaattggaaaaatgaccctgacaatctggggacaaagcattgggacaatttttcctgtcatattcctgctgaagaggctgccatactgtcagaccaatatcatcccccactcatactgtgagcacattggggtggcccaattggcctgtgctgacataactgtcaatatctggtatggcttttcagtgccaatggcatcggttttggtagatgttgcattcattggtttttcctacactttgatcctccaggctgtgtttagacttccttcccaggagtcccagcacaaagctcttaacacctgtggttctacattggagttgttctcctcttcttcatcccatcattttttactttcctgacccaccgctttggcaagaatatcccccatcatgtccacatacttctggcaaatctctacttgcttgttcccccatgcttaaccccattatctacggagagaagaccaagcaaatcagggacagtatggctcatatgttatctgtggtggggaagtcttgagacatcatggtcccttcacagttttctcttaccagtagga

SEQ ID NO: 856 - protein, 270 aa, Homo sapiens [sequence omitted]

SEQ ID NO: 857 - DNA, 1267 bp, Homo sapiens
  source (1)..(1267)
  CDS (201)..(1067)
attttggcctgtctgttcttatctgaactgtttccaagtgtctcaagagtgtagagaatgcattatgttaaaaatgactgaggattgtgggtgagccttatttttgtacagaaattttgaccctcagctgagctaaccacagtcttattctgtttccacttaatccacaggcagatgctgagaacaaaacatctcatgatatggatattggcctgagtatagccaatagctcagggtttcaactgtctgagttcattctgatagggttcccaggcattcatgagtggcagcactggctctccctgcccttagctcttggtgccaatctcctcatcataatcaccattcaacatgagaccatgctacatgaacccatgtaccatttgctgggcatattagcagtggtggacattggcctggccaccaccatcatgcccaagatcctggccatcttctggtttgatgccaaggccatcagcctccctgagtgttttgctcagatctatgccatccactctttcatgtgcatggagtcaggcatcttcctctgcatggcagtggatagatatatggccatttgttatccccttcagtacacttccatagttactgaagcttttgtcatcaaagccacactgtcagtagtgctcaggaatggcctgttgaccatcccagtgccagtattggctgcccagcgacactactgctccaggaatgagattgatcagtgcctctgctctaacttgggggtcacaagtctggcctgtgatgacaccactattaacaggttttaccagctggccttggtctgggttgtggttgggagtgacatgggtctggtctttgcttcctattctttgattattcactcagtgctgaagctgaactctgctaaagcaacatctaaggccctgaatacctgcagctctcaccttatcctcattctctttttctacacagctattattgtagtatctgtcaccacctggcaggaagaagggctccccgcatccctgttctcctcaatgtgctgcatattgtcatcccctcagcccttaaccccatagtatatgcccttaggacctaggagctgagagcgggcttccagaagctgcttggtttgggcgagtatgtgtccaggaagtgagctaactttaaatagcagaatattatatgcaatgctgaagaaagagcacagtctttggagtccaacacaccttggttaaaattccatctctcccaattgctaggaagattgattcacatt

SEQ ID NO: 858 - protein, 288 aa, Homo sapiens
MDIGLSIANSSGFQLSEFILIGFPGIHEWQHWLSLPLALGANLLIIITIQHETMLHEPMYHLLGILAVVDIGLATTIMPKILAIFWFDAKAISLPECFAQIYAIHSFMCMESGIFLCMAVDRYMAICYPLQYTSIVTEAFVIKATLSVVLRNGLLTIPVPVLAAQRHYCSRNEIDQCLCSNLGVTSLACDDTTINRFYQLALVWVVVGSDMGLVFASYSLIIHSVLKLNSAKATSKALNTCSSHLILILFFYTAIIVVSVTTWQEEGLPASLFSSMCCILSSPQPLTP

SEQ ID NO: 859 - DNA, 1360 bp, Homo sapiens
  source (1)..(1360)
  CDS (201)..(1160)
tttgtattctccgcagagatgagattttgccatgttagccaggtcagtctcgagctcctgacctcaaattatctccctgtctcagcctcccaaagtgctgggattacaggcatgaaccacgatgctcagccccttagctgaacttttaaacagagatttcttctatttcagacagacactgagactgaggcacccattccatggatacctccaccagtgttacctatgactccagcctccagatttcccagttcatcctgatgggattaccaggcattcatgagtggcagcactggctctccctgcccctgactctgctctacctcttagctcttggtgccaacctcctcatcataatcaccattcaacatgagaccgtgctacatgaacccatgtaccatttgctgggcatattagcagtggtggacattggcctggccaccaccatcatgcccaagatcctggccatcttctggtttgatgccaaggccattagcctccccatgtgttttgctcagatctatgccatccactgcttcttctgcatagagtcaggcatctttctctgcatggcagtagacagatacatagccatctgtcgccctcttcagtacccctccatagtcactaaagcttttgtcttcaaagccacagggttcatcatgctcaggaatggcctgttgaccatcccagtgcctatactggctgcccagagacactactgttccaggaatgaaatcgagcactgcctctgctctaacttgggggttatcagcctggcttgtgatgacatcactgtgaacaaattttaccaactgatgctagcatgggtcttggttgggagtgatatggctctggtattttcttcctatgctgtaatccttcactctgtgctgaggctgaactcagcagaagcaatgtccaaggctctgagcacttgtagctcccacctcatcctcatcctcttccacacaggtatcattgtgctgtctgtcacacaccttgcagagaaaaagattccccttattcctgtgttccttaatgtgctgcacaatgtcatcccccctgcactcaaccccctggcctgtgcactcaggatgcacaaactcagactgggctttcagagactgcttggactgggtcaggacgtgtccaagtaactccagctttaggaatccagtaagatgttaggaaatgacagaggttttagttctcaatagatcagggttataatctgcacttaccacactccctaggaaaaaaatggccaataaaatcatgaaaactgtcagcctcactaatcaaaatatgtatattaaaattacaagaaaatttcctattacctggaaaataagtaaga

SEQ ID NO: 860 - protein, 319 aa, Homo sapiens
MDTSTSVTYDSSLQISQFILMGLPGIHEWQHWLSLPLTLLYLLALGANLLIIITIQHETVLHEPMYHLLGILAVVDIGLATTIMPKILAIFWFDAKAISLPMCFAQIYAIHCFFCIESGIFLCMAVDRYIAICRPLQYPSIVTKAFVFKATGFIMLRNGLLTIPVPILAAQRHYCSRNEIEHCLCSNLGVISLACDDITVNKFYQLMLAWVLVGSDMALVFSSYAVILHSVLRLNSAEAMSKALSTCSSHLILILFHTGIIVLSVTHLAEKKIPLIPVFLNVLHNVIPPALNPLACALRMHKLRLGFQRLLGLGQDVSK

SEQ ID NO: 861 - DNA, 1099 bp, Homo sapiens
  source (1)..(1099)
  CDS (201)..(899)
tgcttggattgacacaggatcctttttggaagaaaatagtgtttgttatttttttgcgtctctacttgggaacactgttgggtaatttgctaatcattattagtgtcaagaccagccaggcacttaagaacccaatgttcttcttccttttctacttatccttatctgatacttgcctctctacttccataacccctagaatgattgtggatgcccttttgaagaagacaactatctccttcagcgagtgcatgatccaagtcttttcatcccatgtctttggctgcctggagatcttcatcctcatcctcacggctgttgaccgctatgtggacatctgtaagcccctgcactacatgaccatcataagccagtgggtctgtggtgttttgatggctgtggcctgggtgggatcctgtgtgcattctttagttcagatttttcttgccctgagtttgccattctgtggccccaatgtgatcaatcactgtttctgtgacttgcagcccttgttgaaacaagcctgttcagaaacctatgtggttaacctactcctggtttccaatagtggggccatttgtgcagtgagttatgtcatgctaatattctcctatgtcatcttcttgcattctctgagaaaccacagtgctgaagtgataaagaaagcactttccacatgtgtctcccacatcattgtggtcatcttgttctttggaccttgcatatttatgtacacatgccttgcaaccgtattccccatggataagatgatagctgtattttatacagttggaacatcttttctcaaccctgtgatttacacgctgaagaatacagaagtgaaaagtgccatgaggaagctttggagcaagaaattgatcacagatgacaaaagataaatgaaggtttcaaatccttctttatagtttggagtgacctagaagaaatcaatgagaatattatatttttattgttgatttaatgtaatcctgccttggtacatgaggattagttcctttgggaaaagagacagtgtaaacaaataacaatggttaatgttgagtcagttttatgtggcagaaaagacagcatgcaatac

SEQ ID NO: 862 - protein, 232 aa, Homo sapiens [sequence omitted]

SEQ ID NO: 863 - DNA, 1051 bp, Homo sapiens
  source (1)..(1051)
  CDS (201)..(851)
taaatacagtcctttttatgttttctttttttcaggtaatttaattgtctcctaagaacttgacccattccatggaaaaaataaacaacgtaactgaattcattttctggggtctttctcagagcccagagattgagaaagtttgttttgtggtgttttctttcttctacataatcattcttctgggaaatctcctcatcatgctgacagtttgcctgagcaacctgtttaagtcacccatgtatttctttctcagcttcttgtcttttgtggacatttgttactcttcagtcacagctcccaagatgattgttgacctgttagcaaaggacaaaaccatctcctatgtggggtgcatgttgcaactgcttggagtacatttctttggttgcactgagatcttcatccttactgtaatggcctatgatcgttatgtggctatctgtaaacccctacattatatgaccatcatgaaccgggagacatgcaataaaatgttattagggacgtgggtaggtgggttcttacactccattatccaagtggctctggtagtccaactacccttttgtggacccaatgagatagatcactacttttgtgatgttcaccctgtgttgaaacttgcctgcacagaaacatacattgttggtgttgttgtgacagccaacagtggtaccattgctctggggagttttgttatcttgctaatctcctacagcatcatcctagtttccctgagaaagcagtcagcagaaggcaggcgcaaagccctctccacctgtggctcccacattgccatggtcgttatctttttcgagcccctgtacttttatgtacatgcgccctgatacgaccttttcagaggataagatggtggctgtattttacaccattatcactcccatgttaaatcctctgatttatacatgagaaatgcagaagtaaagaatgcaatgaagaaactgtggggcagaaatgttttcttggaggctaaagggaaatagttggacttaataatttaagctagatgaccttaaaatttctcagc

SEQ ID NO: 864 - protein, 216 aa, Homo sapiens
MLTVCLSNLFKSPMYFFLSFLSFVDICYSSVTAPKMIVDLLAKDKTISYVGCMLQLLGVHFFGCTEIFILTVMAYDRYVAICKPLHYMTIMNRETCNKMLLGTWVGGFLHSIIQVALVVQLPFCGPNEIDHYFCDVHPVLKLACTETYIVGVVVTANSGTIALGSFVILLISYSIILVSLRKQSAEGRRKALSTCGSHIAMVVIFFEPLYFYVHAP

SEQ ID NO: 865 - DNA, 1162 bp, Homo sapiens
  source 3 (1)..(1162)
  CDS (201)..(962)
gtggcttttatgcattctttctgcactggttcatggaaaataggaatattgtcactgtctttattctcctgggactttctcaaaacaagaacattgaagttttttggtttgtattatttgtattttgctacattgctatttggatggaaaacttcatcataatgatttctatcatgtacatttagctaattgaccaacccatgtatttcttccttaattacctcgcactctcagatctttgctacatatccactgtggcccccaagctaatgattgacctactaacagaaaggaagatcgtttcctataataactgcatgatacagctatttatcactcacttccttggagacattgagatcttcatactcaaagcaatggcctatgaccactacatagccatctgcaagcacctgcactacaccatcatcacgaccaagcaaagctgtaacaccatcatcatagcttgttgtactgggggatttatacactctgccagtcagtttcttcttaccatcttcttaccgttctgtggtcttaatgagatagatcagtacttctgctatgtgtatcctctgctgaagttggctcgcattgatatatacagaattggtttcttggtaattgttaattcaggcctgatttctttgttggcttttgtgattttgatggtgtcttattatttgatattatccaccatcagggtttactctgctgagagtcataccaaagctctttcaacctgtagctctcacataatagttgtggtcctattctttgtgcctgccctcttcatttacatcagaccagccataacttttccagaagataaagtgtttgttctcttctgtgccatcattgctcccatgttcagtcttcttatctacatgctgagaaaggtggagatgaagaacgctgtaaggaaaatgtggtgtcatcaattgcttctggcaaggaagtaacttgtatgaaaggcattttagaatttcattttaatgcctaaatatcagccttagaattaatatggagtaatacaaaagcatatatggtgcatgcaagagccagctacagataaaagctcagtatctccagcacttgctcagacctcttctgcttgggcaatttttattattttattttaatgcttattcttcctttattc

SEQ ID NO: 866 - protein, 253 aa, Homo sapiens
MYFFLNYLALSDLCYISTVAPKLMIDLLTERKIVSYNNCMIQLFITHFLGDIEIFILKAMAYDHYIAICKHLHYTIITTKQSCNTIIIACCTGGFIHSASQFLLTIFLPFCGLNEIDQYFCYVYPLLKLARIDIYRIGFLVIVNSGLISLLAFVILMVSYYLILSTIRVYSAESHTKALSTCSSHIIVVVLFFVPALFIYIRPAITFPEDKVFVLFCAIIAPMFSLLIYMLRKVEMKNAVRKMWCHQLLLARK

SEQ ID NO: 867 - DNA, 1357 bp, Homo sapiens
  source (1)..(1357)
  CDS (201)..(1157)
gaattatgttagattatgtgagattgcatttagaatatgattagaatttgcataaggaatggatttagagtttgagttagagaacagtacatcaggatagagtcaggtgttaggtattgggatgcttatggatctgacagtggcttatctttgcattccagcctctacctgcctggtgctggtcacagttcagcttcttcatgatggtggatcccaatggcaatgaatccagtgctacatacttcatcctaataggcctccctggtttagaagaggctcagttctggttggccttcccattgtgctccctctaccttattgctgtgctaggtaacttgacaatcatctacattgtgcggactgagcacagcctgcatgagcccatgtatatatttctttgcatgctttcaggcattgacatcctcatctccacctcatccatgcccaaaatgctggccatcttctggttcaattccactaccatccagtttgatgcttgtctgctacagatgtttgccatccactccttatctggcatggaatccacagtgctgctggccatggcttttgaccgctatgtggccatctgtcacccactgcgccatgccacagtacttacgttgcctcgtgtcaccaaaattggtgtggctgctgtggtgcggggggctgcactgatggcaccccttcctgtcttcatcaagcagctgcccttctgccgctccaatatcctttcccattcctactgcctacaccaagatgtcatgaagctggcctgtgatgatatccgggtcaatgtcgtctatggccttatcgtcatcatctccgccattggcctggactcacttctcatctccttctcatatctgcttattcttaagactgtgttgggcttgacacgtgaagcccaggccaaggcatttggcacttgcgtctctcatgtgtgtgctgtgttcatattctatgtacctttcattggattgtccatggtgcatcgctttagcaagcggcgtgactctccgctgcccgtcatcttggccaatatctatctgctggttcctcctgtgctcaacccaattgtctatggagtgaagacaaaggagattcgacagcgcatccttcgacttttccatgtggccacacacgcttcagagccctaggtgtcagtgatcaaacttcttttccattcagagtcctctgattcagattttaatgttaacattttggaagacagtattcagaaaaaaaatttccttaataaaaatacaactcagatccttcaaatatgaaactggttggggaatctccattttttcaatattattttcttctttgttttcttgctacatataattattaa

SEQ ID NO: 868 - protein, 318 aa, Homo sapiens
MMVDPNGNESSATYFILIGLPGLEEAQFWLAFPLCSLYLIAVLGNLTIIYIVRTEHSLHEPMYIFLCMLSGIDILISTSSMPKMLAIFWFNSTTIQFDACLLQMFAIHSLSGMESTVLLAMAFDRYVAICHPLRHATVLTLPRVTKIGVAAVVRGAALMAPLPVFIKQLPFCRSNILSHSYCLHQDVMKLACDDIRVNVVYGLIVIISAIGLDSLLISFSYLLILKTVLGLTREAQAKAFGTCVSHVCAVFIFYVPFIGLSMVHRFSKRRDSPLPVILANIYLLVPPVLNPIVYGVKTKEIRQRILRLFHVATHASEP

SEQ ID NO: 869 - DNA, 1165 bp, Homo sapiens
  source (1)..(1165)
  CDS (201)..(965)
ttctgtacttttaattcatcacgtcaactttgcagaatatcacctccacttccatcattttcctgctcactggtgttcctgggctggaagccttccacacctggatctccattcccttctgcttcctctctgtaactgctctcttgggaaacagcctgatcctcttcgctaccatcactcagcccagcctccacgaaccaatgtactatttcctctccatgctgtccgccactgacctcggcctgtccatatccactctggtcaccatgctgagtatattctggttcaatgtgagggaaatcagctttaatgcctgcttgtcccacatgttctttattaaattcttcactgtcatggaatcctcagtgctgttggccatggcttttgatcgttttgtggccgtctctaatccccttaggtatgccatgattttaactgactccagaatagctcaaattggagtggcaagtgtcatcagggggctcctaatgctgacaccaatggtagcacttcttataagactttcctactgccacagccaagtactccaccactcctactgctaccaccctgatgtgatgaagctctcatgcacagacaccagaatcaacagtgcagttgggctgactgccatgttctctactgttggtgtagacttacttctcatcctcctttcttatgttttgatcattaggactgtccttagcgttgcttccccagaagagaggaaggaaaccttcagtacatgtgtctcccacattgtggcttttgctatatattacattccattgatcagtctgtccattgttcacagatttgggaaacaagccccagcctatgtacatactatgattgctaacacctacctgctgatctcccctttgatgaaccctgtcatctacagtgtgaaaaccaaacagatacgtagagctgtgataaaaattctccattccaaagaaacataaaattgtagaattctagcactagatggacccctcaagatggtatacttcaggtcatgtttccaattaaaaacaaaaaacaaccaaagaactggtgcccattgaagctaagcacataatcatttaaagttaaagctggaatgtatctagaacatcagctagtttgactactttattttccagatgaggaggtgaagacatgg

SEQ ID NO: 870 - protein, 254 aa, Homo sapiens
MYYFLSMLSATDLGLSISTLVTMLSIFWFNVREISFNACLSHMFFIKFFTVMESSVLLAMAFDRFVAVSNPLRYAMILTDSRIAQIGVASVIRGLLMLTPMVALLIRLSYCHSQVLHHSYCYHPDVMKLSCTDTRINSAVGLTAMFSTVGVDLLLILLSYVLIIRTVLSVASPEERKETFSTCVSHIVAFAIYYIPLISLSIVHRFGKQAPAYVHTMIANTYLLISPLMNPVIYSVKTKQIRRAVIKILHSKET

SEQ ID NO: 871 - DNA, 1348 bp, Homo sapiens
  source (1)..(1348)
  CDS (201)..(1148)
taaggaggatgaaaagtagcacagtattagaagtcatttttctgatcctgccataccaccaagctgagaatatccctaggttttcccagcaccacaaagaggaactaatcttataggactgcaccattctcttacatcatctatacattaataggcaagaagtctcacctgtgatgctgggtccagcttacaaccacacaatggaaacccctgcctccttcctccttgtgggtatcccaggactgcaatcttcacatctttggctggctatctcactgagtgccatgtacatcacagccctgttaggaaacaccctcatcgtgactgcaatctggatggattccactcggcatgagcccatgtattgctttctgtgtgttctggctgctgtggacattgttatggcctcctccgtggtacccaagatggtgagcatcttctgctcgggagacagctccatcagctttagtgcttgtttcactcagatgttttttgtccacttagccacagctgtggagacggggctgctgctgaccatggcttttgaccgctatgtagccatctgcaagcctctacactacaagagaattctcacgcctcaagtgatgctgggaatgagtatggccgtcaccatcagagctgtcacattcatgactccactgagttggatgatgaatcatctacctttctgtggctccaatgtggttgtccactcctactgtaagcacatagctttggccaggttagcatgtgctgaccccgtgcccagcagtctctacagtctgattggttcctctcttatggtgggctctgatgtggccttcattgctgcctcctatatcttaattctcagggcagtatttgatctctcctcaaagactgctcagttgaaagcattaagcacatgtggctcccatgtgggggttatggctttgtactatctacctgggatggcatccatctatgcggcctggttggggcaggatatagtgcccttgcacacccaagtgctgctagctgacctgtacgtgatcatcccagccactttaaatcccatcatctatggcatgaggaccaaacaattgctggagggaatatggagttatctgatgcacttcctctttgaccactccaacctgggttcatgaacacaatatctgttcagatccagagcattctagccaacttcaaagatgcctcagagatctgtggagctggattggtttacctggtactataaggaaatctgagatgaagctataaaggatatctttgtgtaacttttaaatttctaccaataatatgaatgaaatgtttctaattttctgacatttttaatgggttaata

SEQ ID NO: 872 - protein, 315 aa, Homo sapiens
METPASFLLVGIPGLQSSHLWLAISLSAMYITALLGNTLIVTAIWMDSTRHEPMYCFLCVLAAVDIVMASSVVPKMVSIFCSGDSSISFSACFTQMFFVHLATAVETGLLLTMAFDRYVAICKPLHYKRILTPQVMLGMSMAVTIRAVTFMTPLSWMMNHLPFCGSNVVVHSYCKHIALARLACADPVPSSLYSLIGSSLMVGSDVAFIAASYILILRAVFDLSSKTAQLKALSTCGSHVGVMALYYLPGMASIYAAWLGQDIVPLHTQVLLADLYVIIPATLNPIIYGMRTKQLLEGIWSYLMHFLFDHSNLGS

SEQ ID NO: 873 - DNA, 1348 bp, Homo sapiens
  source (1)..(1348)
  CDS (201)..(1148)
ataaaagtggtacaggataattttgtcagatgccacatttttgatcctgagattaccaccaagctgagaatatccttaggttttcccagcaccacatgtgtcaacaaatcttacgggattgcattcttctcatacatcatttgtgcattaacaggaaaaaagtctcacttgtgatgctgggtccagcttataaccacacaatggaaacccctgcctccttcctccttgtgggtatcccaggactgcaatcttcacatctttggctggctatctcactgagtgccatgtacatcatagccctgttaggaaacaccatcatcgtgactgcaatctggatggattccactcggcatgagcccatgtattgctttctgtgtgttctggctgctgtggacattgttatggcctcctcggtggtacccaagatggtgagcatcttctgctcaggagacagctcaatcagctttagtgcttgtttcactcagatgttttttgtccacttagccacagctgtggagacggggctgctgctgaccatggcttttgaccgctatgtagccatctgcaagcctctacactacaagagaattctcacgcctcaagtgatgctgggaatgagtatggccatcaccatcagagctatcatagccataactccactgagttggatggtgagtcatctacctttctgtggctccaatgtggttgtccactcctactgtgagcacatagctttggccaggttagcatgtgctgaccccgtgcccagcagtctctacagtctgattggttcctctcttatggtgggctctgatgtggccttcattgctgcctcctatatcttaattctcaaggcagtatttggtctctcctcaaagactgctcagttgaaagcattaagcacatgtggctcccatgtgggggttatggctttgtactatctacctgggatggcatccatctatgcggcctggttggggcaggatgtagtgcccttgcacacccaagtcctgctagctgacctgtacgtgatcatcccagccaccttaaatcccatcatctatggcatgaggaccaaacaactgcgggagagaatatggagttatctgatgcatgtcctctttgaccattccaacctgggttcatgaacacaatatctgttcagatccagccaatttcaaagatgccttagagatctgcagagcttagtttacctggtgctacaggaattctaagatgaaggtgtaaaggatatccttgcataacttttcaattactagcaggaatgtgaatgaaatgtttctgattttctgagggctttctcagtggattcaatcaacttgtatct

SEQ ID NO: 874 - protein, 315 aa, Homo sapiens
METPASFLLVGIPGLQSSHLWLAISLSAMYIIALLGNTIIVTAIWMDSTRHEPMYCFLCVLAAVDIVMASSVVPKMVSIFCSGDSSISFSACFTQMFFVHLATAVETGLLLTMAFDRYVAICKPLHYKRILTPQVMLGMSMAITIRAIIAITPLSWMVSHLPFCGSNVVVHSYCEHIALARLACADPVPSSLYSLIGSSLMVGSDVAFIAASYILILKAVFGLSSKTAQLKALSTCGSHVGVMALYYLPGMASIYAAWLGQDVVPLHTQVLLADLYVIIPATLNPIIYGMRTKQLRERIWSYLMHVLFDHSNLGS

SEQ ID NO: 875 - DNA, 1354 bp, Homo sapiens
  source (1)..(1354)
  CDS (201)..(1154)
gtactttctaagattttgcgaacattttagtataatgtgacactgacgttctagaatttcttctaaagatgacttatctaacatctagtcagtgaccctattattataggaacttagagtaaaatattgtcttttatttccaggaaaaacatcctgctgcgtttagtggtacaagtgagaaggttcacatataaatagccatgctcacttttcataatgtctgctcagtacccagctccttctggctcactggcatcccagggctggagtccctacacgtctggctctccatcccctttggctccatgtacctggtggctgtggtggggaatgtgaccatcctggctgtggtaaagatagaacgcagcctgcaccagcccatgtactttttcttgtgcatgttggctgccattgacctggttctgtctacttccactatacccaaacttctgggaatcttctggttcggtgcttgtgacattggcctggacgcctgcttgggccaaatgttccttatccactgctttgccactgttgagtcaggcatcttccttgccatggcttttgatcgctacgtggccatctgcaacccactacgtcatagcatggtgctcacttatacagtggtgggtcgtttggggcttgtttctctcctccggggtgttctctacattggacctctgcctctgatgatccgcctgcggctgcccctttataaaacccatgttatctcccactcctactgtgagcacatggctgtagttgccttgacatgtggcgacagcagggtcaataatgtctatgggctgagcatcggctttctggtgttgatcctggactcagtggctattgctgcatcctatgtgatgattttcagggccgtgatggggttagccactcctgaggctaggcttaaaaccctggggacatgcgcttctcacctctgtgccatcctgatcttttatgttcccattgctgtttcttccctgattcaccgatttggtcagtgtgtgcctcctccagtccacactctgctggccaacttctatctcctcattcctccaatcctcaatcccattgtctatgctgttcgcaccaagcagatccgagagagccttctccaaataccaaggatagaaatgaagattagatgattactattttcttctctctcaaataagctcatggagaaggtgtttaaatatggtaggctgcttcccattaggaactttacaagcagtttgaagtattaggcactgtgctctccaacttttgtagttccaaaggaattctaagaaagtatacaactctaagtcctaaaaggtggaaaatacaaaacttacaactaaaggat

SEQ ID NO: 876 - protein, 317 aa, Homo sapiens
MLTFHNVCSVPSSFWLTGIPGLESLHVWLSIPFGSMYLVAVVGNVTILAVVKIERSLHQPMYFFLCMLAAIDLVLSTSTIPKLLGIFWFGACDIGLDACLGQMFLIHCFATVESGIFLAMAFDRYVAICNPLRHSMVLTYTVVGRLGLVSLLRGVLYIGPLPLMIRLRLPLYKTHVISHSYCEHMAVVALTCGDSRVNNVYGLSIGFLVLILDSVAIAASYVMIFRAVMGLATPEARLKTLGTCASHLCAILIFYVPIAVSSLIHRFGQCVPPPVHTLLANFYLLIPPILNPIVYAVRTKQIRESLLQIPRIEMKIR

SEQ ID NO: 877 - DNA, 1345 bp, Homo sapiens
  source (1)..(1345)
  CDS (201)..(1145)
gagggtagaaaatatggattatacttctccatgtctatgaaggctgctaggttattttgtttaaagtctagcaatggaaacaagaggtaatctttgcaggtgggatagcacaggttgaactctaatcatatatactgtagaaggtatatatagaaggtgaagaagccctgtaaaaattgacaaggagatttccaggagccatgcttccctctaatatcacctcaacacatccagctgtctttttgttggtaggaattcctggtttggaacacctgcatgcctggatctccatccccttctgctttgcttatactctggccctgctaggcaactgtacccttctcttcattatccaggctgatgcagccctccatgaacccatgtacctctttctggccatgttggcaaccattgacttggttctttcttctacaacgctgcccaaaatgcttgccatattctggttcagggatcaggagatcaacttctttgcctgtctggtccagatgttcttccttcactccttctccatcatggagtcagcagtgctgctggccatggcctttgaccgctatgtggccatctgcaagccattgcactacacgacggtcctgactgggtccctcatcaccaagattggcatggctgctgtggcccgggctgtgacactaatgactccactccccttcctgctcagacgcttccactactgccgaggcccagtgattgcccattgctactgtgaacacatggctgtggtaaggctggcgtgtggggacactagcttcaacaatatctatggcattgctgtggccatgtttattgtggtgttggacctgctctttgttatcctgtcttatgtcttcatccttcaggcagttctccagcttgcctctcaggaggcccgctacaaggcatttgggacatgtgtgtctcacataggtgccatcctgtccacctacactccagtagtcatctcttcagtcatgcaccgtgtagcccgccatgctgcccctcgtgtccacatactccttgctattttctatctccttttcccacccatggtcaatcctatcatatatggagtcaagaccaagcagattcgtgagtatgtgctcagtctattccagagaaagaacatgtagatggatagttctctttttttatcccacttgccaagtaatgagaatgctggattggggttgaggggaaaaatctaaataggaaaattgcagagtatctttgacaattctctagtatgataaggaaaatgaggtttcattcctcacagatctacgagtcaggtcaaaccaggagtgcacctatagtctggtctgatagtaga

SEQ ID NO: 878 - protein, 314 aa, Homo sapiens
MLPSNITSTHPAVFLLVGIPGLEHLHAWISIPFCFAYTLALLGNCTLLFIIQADAALHEPMYLFLAMLATIDLVLSSTTLPKMLAIFWFRDQEINFFACLVQMFFLHSFSIMESAVLLAMAFDRYVAICKPLHYTTVLTGSLITKIGMAAVARAVTLMTPLPFLLRRFHYCRGPVIAHCYCEHMAVVRLACGDTSFNNIYGIAVAMFIVVLDLLFVILSYVFILQAVLQLASQEARYKAFGTCVSHIGAILSTYTPVVISSVMHRVARHAAPRVHILLAIFYLLFPPMVNPIIYGVKTKQIREYVLSLFQRKNM

SEQ ID NO: 879 - DNA, 1345 bp, Homo sapiens
  source (1)..(1345)
  CDS (201)..(1145)
gggcaaggatcatgcataatatttcatgatacatatgattattttctcatttcttttcatgtctaaaaatgggtctaagaactatcttctcacaagaatgatcagagtttgaatgtgagcattgtaattctgctgatattgaatattctctggaagggccctgtggaagcagataaggaggaagagaattcccaggagccatgtcagcctccaatatcaccttaacacatccaactgccttcttgttggtggggattccaggcctggaacacctgcacatctggatctccatccctttctgcttagcatatacactggccctgcttggaaactgcactctccttctcatcatccaggctgatgcagccctccatgaacccatgtacctctttctggccatgttggcagccatcgacctggtcctttcctcctcagcactgcccaaaatgcttgccatattctggttcagggatcgggagataaacttctttgcctgtctggcccagatgttcttccttcactccttctccatcatggagtcagcagtgctgctggccatggcctttgaccgctatgtggctatctgcaagccactgcactacaccaaggtcctgactgggtccctcatcaccaagattggcatggctgctgtggcccgggctgtgacactaatgactccactccccttcctgctgagatgtttccactactgccgaggcccagtgatcgctcactgctactgtgaacacatggctgtggtgaggctggcgtgtggggacactagcttcaacaatatctatggcatcgctgtggccatgtttattgtggtgttggacctgctccttgttatcctgtcttatatctttattcttcaggcagttctactgcttgcctctcaggaggcccgctacaaggcatttgggacatgtgtctctcatataggtgccatcttagccttctacacaactgtggtcatctcttcagtcatgcaccgtgtagcccgccatgctgcccctcatgtccacatcctccttgccaatttctatctgctcttcccacccatggtcaatcccataatctatggtgtcaagaccaagcaaatccgtgagagcatcttgggagtattcccaagaaaggatatgtagagggtgaggtggagaaagaatgggttggcttgtctgctggagttggagacaggctatggtagaatgtgcacggctgccaggatcttcatgtttagttttttcttggaaaaaaaaaaaatgatgtcctgaaactcagagccaccagtctgttcaggactcatgggtctgtgtcctctggtagcctgtggattgaatgtgct

SEQ ID NO: 880 - protein, 314 aa, Homo sapiens
MSASNITLTHPTAFLLVGIPGLEHLHIWISIPFCLAYTLALLGNCTLLLIIQADAALHEPMYLFLAMLAAIDLVLSSSALPKMLAIFWFRDREINFFACLAQMFFLHSFSIMESAVLLAMAFDRYVAICKPLHYTKVLTGSLITKIGMAAVARAVTLMTPLPFLLRCFHYCRGPVIAHCYCEHMAVVRLACGDTSFNNIYGIAVAMFIVVLDLLLVILSYIFILQAVLLLASQEARYKAFGTCVSHIGAILAFYTTVVISSVMHRVARHAAPHVHILLANFYLLFPPMVNPIIYGVKTKQIRESILGVFPRKDM

SEQ ID NO: 881 - DNA, 1240 bp, Homo sapiens
  source (1)..(1240)
  CDS (201)..(1040)
cacatagttcatgaatagaatggcaaagaattttagaccacatcccctgacttcttcaacaggacccttttcactgctccatccagtgaaaaataatctgttccctccttccctactccaaccccattcagcttcttgggaagagagaagaggtaactgccaaatcctacataccaatgctcaggtgaccttccctgggcatgacaacccacaactccactggtagcagccactcactcttcattctgctgagcattcctggcttagaagaccagcacacatggatgtctctccccttctttatttcctaccttgttgctttccttgggaacagcctcatcatcttcatcatcatcactgaatgcagcctccacgaacccatgtaccttttcctctgcatgctggctgtggctgaccttatcctgtctactaccactgtgcccaaggccctagccatattttggttctatgctggagcaatatcccttggtggctgtgttacccaaatcttctttatccatgctaccttcatcgaggaatcaggaattctgttggcgatggcacttgaccgctatgtggccatctgtgatccactgcactataccacagtgctcagtcgtgcaaaaatcacaaagattggcttggctgtggtcctgagaagcttctgtgtgatcatgccagatgtgtttctggtaaagcggctgcctttctgccatagcaatctgctgccacatacctactgtgagcacatggctgttgccaagtttgcttgtgctgatattcatgtcaatgtttggtatggcttgtctgtccttctctatactgtagtgctagatgccttgcttatcttagtgtcctatagcttcatcctgtatacaggcttccacctcccctccccaaggagctcggcaaaaggctctgggcacatgtggctcccacctcagagtcatttccatgttctacttgcctggtatttttaccataattacccagcggtttgggcaccatgttcctctccatacacacattctgctggctaatgtctgcgtgttggctcctcccatgctgaaccccatcatttatgggatcaacaccaggcagattcaagagtgtgtgctcagtcttttgtcctcacagaggaaatgatgctagatttgactaatctgatagtatgtttatcactatagggctttgctttttttttttttttttttttttttttttttttttttggccaact

SEQ ID NO: 882 - protein, 279 aa, Homo sapiens
MTTHNSTGSSHSLFILLSIPGLEDQHTWMSLPFFISYLVAFLGNSLIIFIIITECSLHEPMYLFLCMLAVADLILSTTTVPKALAIFWFYAGAISLGGCVTQIFFIHATFIEESGILLAMALDRYVAICDPLHYTTVLSRAKITKIGLAVVLRSFCVIMPDVFLVKRLPFCHSNLLPHTYCEHMAVAKFACADIHVNVWYGLSVLLYTVVLDALLILVSYSFILYTGFHLPSPRSSAKGSGHMWLPPQSHFHVLLAWYFYHNYPAVWAPCSSPYTHSAG

SEQ ID NO: 883 - DNA, 1369 bp, Homo sapiens
  source (1)..(1369)
  CDS (201)..(1169)
ctcatccatcaaaagtctccttcctagacccagtagaaaaggctaatagatcagcccccacccagttctcccctatgccatctgcagatgcttccttactggctgatcttgggacatttaggtgagtgagaattcagccttgtcactttccaggaatctcattctatattccaggtttctgagtccaagattgtaaagctatgacaattcttcttaatagcagcctccaaagagccactttcttcctgacgggcttccaaggtctagaaggtctccatggctggatctctattcccttctgcttcatctacctgacagttatcttggggaacctcaccattctccacgtcatttgtactgatgccactctccatggacccatgtactatttcttgggcatgctagctgtcacagacttaggcctttgcctttccacactgcccactgtgctgggcattttctggtttgataccagagagattggcatccctgcctgtttcactcagctcttcttcatccacaccttgtcttcaatggagtcatcagttctgttatccatgtccattgaccgctacgtggccgtctgcaacccactgcatgactccaccgtcctgacacctgcatgtattgtcaagatggggctaagctcagtgcttagaagtgctctcctcatcctccccttgccattcctcctgaagcgcttccaatactgccactcccatgtgctggctcatgcttattgtcttcacctggagatcatgaagctggcctgctctagcatcattgtcaatcacatctatgggctctttgttgtggcctgcaccgtgggtgtggactcactgctcatctttctctcatacgccctcatccttcgcaccgtgctcagcattgcctcccaccaggagcgactccgagccctcaacacctgtgtctctcatatctgtgctgtactgctcttctacatccccatgattggcttgtctcttgtgcatcgctgctttggtgaacatctgccccgcgttgtacacctcttcatgtcctatgtgtatctgctggtaccaccccttatgaaccccatcatctacagcatcaagaccaagcaaattcgccagcgcatcattaagaagtttcagtttataaagtcacttaggtgtttttggaaggattaagttagagtaaagagaggaagttttggacataaagcccacaggtttctgtttgttttcagctgtgctgtggcaaaataataaaccgttgactgtcaacaaaaaggcaattggctgtgcaacataaggcagtgtgaccaggagaaagttacttacctctctgttctccagtttcctcaactgcagaatgagcaaggaaataa

SEQ ID NO: 884 - protein, 322 aa, Homo sapiens
MTILLNSSLQRATFFLTGFQGLEGLHGWISIPFCFIYLTVILGNLTILHVICTDATLHGPMYYFLGMLAVTDLGLCLSTLPTVLGIFWFDTREIGIPACFTQLFFIHTLSSMESSVLLSMSIDRYVAVCNPLHDSTVLTPACIVKMGLSSVLRSALLILPLPFLLKRFQYCHSHVLAHAYCLHLEIMKLACSSIIVNHIYGLFVVACTVGVDSLLIFLSYALILRTVLSIASHQERLRALNTCVSHICAVLLFYIPMIGLSLVHRCFGEHLPRVVHLFMSYVYLLVPPLMNPIIYSIKTKQIRQRIIKKFQFIKSLRCFWKD

SEQ ID NO: 885 - DNA, 1345 bp, Homo sapiens
  source (1)..(1345)
  CDS (201)..(1145)
atgagacaaatttcctcaaaaagatactgagaggaagtcaaggaccagaaagaaataaccactagaaagagctgcacagttctaggtatatttgattctattttttttctttaatttccaccaggtgcaatcaccagtactgcctcaatttacttcaggattttggagggcacccaccttcccccttgtctcctcacacaatgaccctgggatccctgggaaacagcagcagcagcgtttctgctaccttcctgctgagtggcatccctgggctggagcgcatgcacatctggatctccatcccactgtgcttcatgtatctggtttccatcccgggcaactgcacaattctttttatcattaaaacagagcgctcacttcatgaacctatgtatctcttcctgtccatgctggctctgattgacctgggtctctccctttgcactctccctacagtcctgggcatcttttgggttggagcacgagaaattagccatgatgcctgctttgctcagctctttttcattcactgcttctccttcctcgagtcctctgtgctactgtctatggcctttgaccgctttgtggctatctgccaccccttgcactatgtttccattctcaccaacacagtcattggcaggattggcctggtctctctgggtcgtagtgtagcactcatttttccattaccttttatgctcaaaagattcccctattgtggctccccagttctctcacattcttattgtctccaccaagaagtgatgaaattggcctgtgccgacatgaaggccaacagcatctacggcatgtttgtcatcgtctctacagtgggtatagactcactgctcatcctcttctcttatgctctgatcctgcgcaccgtgctgtccatcgcctccagggctgagagattcaaggcccttaacacctgtgtttcccacatctgtgctgtgctgctcttctacactcccatgattggcctctctgtcatccatcgctttggaaagcaggcaccccacctggtccaggtggtcatgggtttcatgtatcttctctttcctcctgtgatgaatcccattgtctacagtgtgaagaccaaacagatccgggatcgagtgacgcatgccttttgttactaactgtgtctagtgttagagccactgtctcctgaaacgtgcccttgtttgcctatcctttataatttctaacatgcataaaataaaggagacatttacttactcaacaaacatgtacagggatgagttacagtccttacagaaccctcactctgttgtggccagggcaggggggggtaaaatgtaatatgatgtggtaaatt

SEQ ID NO: 886 - protein, 314 aa, Homo sapiens
MTLGSLGNSSSSVSATFLLSGIPGLERMHIWISIPLCFMYLVSIPGNCTILFIIKTERSLHEPMYLFLSMLALIDLGLSLCTLPTVLGIFWVGAREISHDACFAQLFFIHCFSFLESSVLLSMAFDRFVAICHPLHYVSILTNTVIGRIGLVSLGRSVALIFPLPFMLKRFPYCGSPVLSHSYCLHQEVMKLACADMKANSIYGMFVIVSTVGIDSLLILFSYALILRTVLSIASRAERFKALNTCVSHICAVLLFYTPMIGLSVIHRFGKQAPHLVQVVMGFMYLLFPPVMNPIVYSVKTKQIRDRVTHAFCY

SEQ ID NO: 887 - DNA, 1339 bp, Homo sapiens
  source (1)..(1339)
  CDS (201)..(1139)
accatgctggagaatatgaacttgtttaaggacttctggtaaattttgaagagtgcagttgattagcagccaaatatgcctttgagtatagtatacgaatgaaccccttatcctcacaaaactgagttttaaccaaaagcatgactgcttttcatttatatggtttcagatccggctaacgagctcatatctccctcattatgtctgttctcaataactccgaagtcaagcttttccttctgattgggatcccaggactggaacatgcccacatttggttctccatccccatttgcctcatgtacctgcttgccatcatgggcaactgcaccattctctttattataaagacagagccctcgcttcatgagcccatgtattatttccttgccatgttggctgtctctgacatgggcctgtccctctcctcccttcctaccatgttgagggtcttcttgttcaatgccatgggaatttcacctaatgcctgctttgctcaagaattcttcattcatggattcactgtcatggaatcctcagtacttctaattatgtctttggaccgctttcttgccattcacaatcccttaagatacagttctatcctcactagcaacagggttgctaaaatgggacttattttagccattaggagcattctcttagtgattccatttcccttcaccttaaggagattaaaatattgtcaaaagaatcttctttctcactcatactgtcttcatcaggataccatgaagctggcctgctctgacaacaagaccaatgtcatctatggcttcttcattgctctctgtactatgctggacttggcactgattgttttgtcttatgtgctgatcttgaagactatactcagcattgcatctttggcagagaggcttaaggccctaaatacctgtgtctcccacatctgtgctgtgctcaccttctatgtgcccatcatcaccctggctgccatgcatcactttgccaagcacaaaagccctcttgttgtgatccttattgcagatatgttcttgttggtgccgccccttatgaaccccattgtgtactgtgtaaagactcgacaaatctgggagaagatcttggggaagttgcttaatgtatgtgggagataagaacttgaacaattaggtaataaattatcaaccagtaggcatttactgtcatttgctatgtgcttaatgccatagaagtcactaatgaaggactggatgatggaagtgaaaagctatgtagtgcagaatttataataaagttgagaatataactgaacaggatagaaaaaaaagtcaagagatatataagatatagaggt

SEQ ID NO: 888 - protein, 312 aa, Homo sapiens
MSVLNNSEVKLFLLIGIPGLEHAHIWFSIPICLMYLLAIMGNCTILFIIKTEPSLHEPMYYFLAMLAVSDMGLSLSSLPTMLRVFLFNAMGISPNACFAQEFFIHGFTVMESSVLLIMSLDRFLAIHNPLRYSSILTSNRVAKMGLILAIRSILLVIPFPFTLRRLKYCQKNLLSHSYCLHQDTMKLACSDNKTNVIYGFFIALCTMLDLALIVLSYVLILKTILSIASLAERLKALNTCVSHICAVLTFYVPIITLAAMHHFAKHKSPLVVILIADMFLLVPPLMNPIVYCVKTRQIWEKILGKLLNVCGR

SEQ ID NO: 889 - DNA, 1384 bp, Homo sapiens
  source (1)..(1384)
  CDS (201)..(1184)
gaatttgaatctgtattgaactattttagcctagatatactatttaaccttcctgggtccatttcctttctttaaaacagaagaaaaataactaccttaaatttaaaattgtatataaaatgactaataaaatgtatgctatatatataaagaatcttaattatttttctttcctcatagttcagtgtcttcaaccaaccatggcaatattcaataacaccacttcgtcttcctcaaacttcctcctcactgcattccctgggctggaatgtgctcatgtctggatctccattccagtctgctgtctctacaccattgccctcttgggaaacagtatgatctttcttgtcatcattactaagcggagactccacaaacccatgtattatttcctctccatgctggcagctgttgatctatgtctgaccattacgacccttcccactgtgcttggtgttctctggtttcatgcccgggagatcagctttaaagcttgcttcattcaaatgttctttgtgcatgctttctccttgctggagtcctcggtgctggtagccatggcctttgaccgcttcgtggctatctgtaacccactgaactatgctactatcctcacagacaggatggtcctggtgatagggctggtcatctgcattagaccagcagttttcttacttccccttcttgtagccataaacactgtgtcttttcatgggggtcacgagctttcccatccattttgctaccacccagaagtgatcaaatacacatattccaaaccttggatcagcagtttttggggactgtttcttcagctctacctgaatggcactgacgtattgtttattcttttctcctatgtcctgatcctccgtactgttctgggcattgtggcccgaaagaagcaacaaaaagctctcagcacttgtgtctgtcacatctgtgcagtcactattttctatgtgccactgatcagcctctctttggcacaccgcctcttccactccaccccaagggtgctctgtagcactttggccaatatttatctgctcttaccacctgtgctgaaccctatcatttacagcttgaagaccaagacaatccgccaggctatgttccagctgctccaatccaagggttcatggggttttaatgtgaggggtcttaggggaagatgggattgaaggtaggaaattgtcaggacacgaattatgctttggaaagaaagggacttggggcagtcttatccacaggtgttttggttgctgagtcaattccaattgaattttaggagtgggaagaagacagtaattttcccctgagcttatcaaagagttttatttttaatttttaataccataatttaaaccaaattaattgagca

SEQ ID NO: 890 - protein, 327 aa, Homo sapiens
MAIFNNTTSSSSNFLLTAFPGLECAHVWISIPVCCLYTIALLGNSMIFLVIITKRRLHKPMYYFLSMLAAVDLCLTITTLPTVLGVLWFHAREISFKACFIQMFFVHAFSLLESSVLVAMAFDRFVAICNPLNYATILTDRMVLVIGLVICIRPAVFLLPLLVAINTVSFHGGHELSHPFCYHPEVIKYTYSKPWISSFWGLFLQLYLNGTDVLFILFSYVLILRTVLGIVARKKQQKALSTCVCHICAVTIFYVPLISLSLAHRLFHSTPRVLCSTLANIYLLLPPVLNPIIYSLKTKTIRQAMFQLLQSKGSWGFNVRGLRGRWD

SEQ ID NO: 891 - DNA, 1156 bp, Homo sapiens
  source (1)..(1156)
  CDS (201)..(956)
ttccagttgaagtcagtttgacttaatgagctcttctctattttcctactcaaacctctattccaccatgtcaccactcaaccaaactactgagaaccaccagagcttcttcaccctgactgggattccaggaatgccagagaaagacttatggatggccttgcccctctgtcttctttatagcaccacgatcttgggaaatgtcaccatccttgttgtcatcaaagttgagcaaagtctccatgagcccatgtatttttctagccatgttagctgccactgacctcagcctttcactgtcttccatgcctaccatggtcagtgttcactggttcaactggcgttcaataacttttaatggctgccttatccagatgttcttcatccacacatttgggggagtggaatcaggtgttctggtggccatggcctttgatcgctttgtggccatccgctttcctttgcactatgctacaattctcactcacagtgtcatcagcaagattgcagcagccatcctgctacggagtgtgggggctgtgctccctgtgccttttctcatcaaaaggttacctttctgtcactccaatgtcctctcccatgcatactgcctccatcaggatgccatgaggcttgcctgtgctgacactggtgtcaatagcatctatggcctgttggctgtgatcttcatcattgtactagatgccttaatacttttggcctcttacattctaatcctgcaggcagtattgagcattgcttcccaggaagacaggctcaaggctctcaacacctgtctctctcatatctgcagtgctgcttttctatgtgcctctcattggtatgaccctaattcatcgctatgggaagcatttgtcaccactaatacacacattcatggccaatatctacctgcttctccctcctgtgctcaatcccattgtgtacagtgttaggaccaagcagatctgatagcagattgtccaggccttttgtggggctagggttagcccttaatggcatctactatttccaagtaaatgcaatcaagttagagaagagtatcaaatacagcactatccaatagaaattcccacagaagtggatattttctatttctctgctgtttagtaactagtagctgtacatggctatt

SEQ ID NO: 892 - protein, 251 aa, Homo sapiens
MSPSLLSSKLSKVSMSPCIFLAMLAATDLSLSLSSMPTMVSVHWFNWRSITFNGCLIQMFFIHTFGGVESGVLVAMAFDRFVAIRFPLHYATILTHSVISKIAAAILLRSVGAVLPVPFLIKRLPFCHSNVLSHAYCLHQDAMRLACADTGVNSIYGLLAVIFIIVLDALILLASYILILQAVLSIASQEDRLKALNTCLSHICSAAFLCASHWYDPNSSLWEAFVTTNTHIHGQYLPASPSCAQSHCVQC

SEQ ID NO: 893 - DNA, 1309 bp, Homo sapiens
  source (1)..(1309)
  CDS (201)..(1109)
gtaatcacatgtgactgtgtaggaaggaaaaagacacagtgttacaaatatcatctaaatgttttttaactttattctttcctctgctattctactatgcattcataaagccattgttctgtccatatgagaatatatattcaatttaggagctgtgagccaagtggaggagtccagccccacccgatggtgagaacaacatgacgaacttgaatgcatcacaggccaaccaccgtaacttcattctgacaggtatcccaggaacgccagacaagaacccatggttggcctttcccctgggatttctctacacactcacactcctgggaaatggtaccatcctagctgtcatcaaggtggagccaagtctccatgagcccacgtattacttcctttctatcttggctctcactgacgttagtctctccatgtccaccttgccctccatgctcagcatctactggtttaatgcccctcagattgtttttgatgcatgcatcatgcagatgttcttcatccatgtatttggaatagtagaatcaggagtcctagtgtccatggcctttgacagatttgtggccatccgaaacccattacactatgtttccatcctcactcacgatgttattcgaaagactggaatagctgtcctcacccgggcagtctgtgtggtattccctgtgcccttccttataaagtgcctacccttctgccattccaatgtcttgtctcattcatactgtcttcaccaaaacatgatgcggctagcttgtgccagcacccgcatcaacagcctctacggcctcatcgtcgtcatcttcacactggggctcgatgttctcctcactctactgtcttatgtactcaccctgaagactgtgctgggcattgtctccagaggtgaaaggctgaaaaccctcagcacatgcctctctcacatgtctaccgtgctcctcttctatgttccttttatgggtgctgcctccatgatccacagattttgggagcatttatcaccagtagtgcacatggtcatggctgatatatacctactgctcccgcctgtgctaaaccccattgtctacagtgtgaagaccaagcaaatttgaagaatgatctttcaagtgttccagaggcaaaaaaaatagggtctagtagaatggaatcatgtgtaagaagcagagtaagtatccactggaagaattaattatttaattttccacagttatggtgcatcaaattttgcacatctggggaaatgcaggagtgggtaaggcttgtgggtgaagatacataacaggtcattatt

SEQ ID NO: 894 - protein, 302 aa, Homo sapiens
MTNLNASQANHRNFILTGIPGTPDKNPWLAFPLGFLYTLTLLGNGTILAVIKVEPSLHEPTYYFLSILALTDVSLSMSTLPSMLSIYWFNAPQIVFDACIMQMFFIHVFGIVESGVLVSMAFDRFVAIRNPLHYVSILTHDVIRKTGIAVLTRAVCVVFPVPFLIKCLPFCHSNVLSHSYCLHQNMMRLACASTRINSLYGLIVVIFTLGLDVLLTLLSYVLTLKTVLGIVSRGERLKTLSTCLSHMSTVLLFYVPFMGAASMIHRFWEHLSPVVHMVMADIYLLLPPVLNPIVYSVKTKQI

SEQ ID NO: 895 - DNA, 1372 bp, Homo sapiens
  source (1)..(1372)
  CDS (201)..(1172)
gaatgaatgctgcatatactattaggatgggtgcgtgcacagggaggaaatgtgtatatgtgtacgtgtatgtgagtgcatgagtcagggaagggaagatgcaggctattttggaacgtttcatgcaaatttggcacgcgattaagtaaacctttctaatcatttttcaggttccagagttcaacgtggaatcctgaactatgtcaacattaccaactcagatagcccccaatagcagcacttcaatggcccccaccttcttgctggtgggcatgccaggcctatcaggtgcaccctcctggtggacattgcccctcattgctgtctaccttctctctgcactgggaaatggcaccatcctctggatcattgccctgcagcccgccctgcaccgcccaatgcacttcttcctcttcttgcttagtgtgtctgatattggattggtcactgccctgatgcccacactgctgggcatcgcccttgctggtgctcacactgtccctgcctcagcctgccttctacagatggtttttatccatgtcttttctgtcatggagtcctctgtcttgctcgccatgtccattgatcgggcactggccatctgccgacctctccactacccagcgctcctcaccaatggtgtaattagcaaaatcagcctggccatttcttttcgatgcctgggtctccatctgcccctgccattcctgctggcctacatgccctactgcctcccacaggtcctaacccattcttattgcttgcatccagatgtggctcgtttggcctgcccagaagcttggggtgcagcctacagcctatttgtggttctttcagccatgggtttggaccccctgcttattttcttctcctatggcctgattggcaaggtgttgcaaggtgtggagtccagagaggatcgctggaaggctggtcaaacctgtgctgcccacctctctgcagtgctcctcttctatatccctatgatcctcctggcactgattaaccatcctgagctgccaatcactcagcatacccatactcttctatcctatgtccatttccttcttcctccattgataaaccctattctctatagtgtcaagatgaaggagattagaaagagaatactcaacaggttgcagcccaggaaggtgggtggtgctcagtgagtaggatgtccctccgtgtttggtggtacagggctcctgatactaaagtttctgtgagaactcagctcaccaagcatgaaatgatcattcacgtacacataagtgcatatatgtgcatgtagcttcctgtccctggaagtatgcctgtgtatattgatgcaaacttacaagccccaaagaatgaacatgatccacccact

SEQ ID NO: 896 - protein, 323 aa, Homo sapiens
MSTLPTQIAPNSSTSMAPTFLLVGMPGLSGAPSWWTLPLIAVYLLSALGNGTILWIIALQPALHRPMHFFLFLLSVSDIGLVTALMPTLLGIALAGAHTVPASACLLQMVFIHVFSVMESSVLLAMSIDRALAICRPLHYPALLTNGVISKISLAISFRCLGLHLPLPFLLAYMPYCLPQVLTHSYCLHPDVARLACPEAWGAAYSLFVVLSAMGLDPLLIFFSYGLIGKVLQGVESREDRWKAGQTCAAHLSAVLLFYIPMILLALINHPELPITQHTHTLLSYVHFLLPPLINPILYSVKMKEIRKRILNRLQPRKVGGAQ

SEQ ID NO: 897 - DNA, 1342 bp, Homo sapiens
  source (1)..(1342)
  CDS (201)..(1142)
agtattacccatctctcttcattatgatagccacataaatgctttgttctctcaaaagaaagctgaaagaagccacaaattttaacactgctttttttctactaaatttacagatatgcctattttaccaacacaagcaagcggatcacctgaggtcaggtgtatctgtatttttcatagcagagccctatgaatgaatcatgtccattatcaacacatcatatgttgaaatcaccaccttcttcttggttgggatgccagggctagaatatgcacacatctggatctctatccccatctgcagcatgtatcttattgctattctaggaaattgcaccattctttttatcatcaagacagagccctccttgcatgagcccatgtactattttctttccatgttggctatgtcagacttgggtttgtctttatcatctctgcccactgtgttaagcatcttcctgttcaatgctcctgaaatttcatccaatgcctgctttgcccaggaattcttcattcatggattctcagtactggagtcctcagtcctcctgatcatgtcatttgatagattcctagccatccacaaccctctgagatacacctcaatcctgacaactgtcagagttgcccaaatagggatagtattctcctttaagagcatgctcctggttcttcccttccctttcactttaagaaacttgagatattgcaagaaaaaccaattatcccattcctactgtctccaccaggatgtcatgaagttggcctgttctgacaacagaattgatgttatctatggcttttttggagcactctgccttatggtagactttattctcattgctgtgtcttacaccctgatcctcaagactgtaccgggaattgcatccaaaaaggagcagcttaaggctctcaatacttgtgtttcacacatctgtgcagtgatcatcttctacctgcccatcatcaacctggccgttgtccaccgctttgcccggcatgtctctcccctcattaatgttctcatggcaaatgttctcctacttgtacctccactgatgaacccaattgtttattgtgtaaaaactaaacagattagagtgagagttgtagcaaaattgtgtcaacggaagatttaacagtcatatgtgacagaaaacctggaaatgtctggtaagatatttaaggtaaatttgagaaacctaatatttgacaccaagaattatcaacacatatttttgttgtcatagagttattttattcactctggatactgcgaatgagaatagaactataaacaggaagtacgttgccttatgtccccatttcagttaagcag

SEQ ID NO: 898 - protein, 313 aa, Homo sapiens [sequence omitted]

SEQ ID NO: 899 - DNA, 1342 bp, Homo sapiens
  source (1)..(1342)
  CDS (201)..(1142)
agtattacccatctctcttcattatgatagccacataaatgctttgttctctcaaaagaaagctgaaagaagccacaaattttaacactgctttttttctactaaatttacagatatgcctattttaccaacacaagcaagcggatcacctgaggtcaggtgtatctgtatttttcatagcagagccctatgaatgaatcatgtccattatcaacacatcatatgttgaaatcaccaccttcttcttggttgggatgccagggctagaatatgcacacatctggatctctatccccatctgcagcatgtatcttattgctattctaggaaatggcaccattctttttatcatcaagacagagccctccttgcatgggcccatgtactattttctttccatgttggctatgtcagacttgggtttgtctttatcatctctgcccactgtgttaagcatcttcctgttcaatgcccctgaaacttcttctagtgcctgctttgcccaggaattcttcattcatggattctcagtactggagtcctcagtcctcctgatcatgtcatttgatagattcctagccatccacaatcctctgagatacacctcaatcctgacaactgtcagagttgcccaaatagggatagtattctcctttaagagcatgctcctggttcttcccttccctttcactttaagaagcttgagatattgcaagaaaaaccaattatcccattcctactgtctccaccaggatgtcatgaagttggcctgttctgacaacagaattgatgttatctatggcttttttggagcactctgccttatggtagactttattctcattgctgtgtcttacaccctgatcctcaagactgtaccgggaattgcatccaaaaaggaggagcttaaggctctcaatacttgtgtttcacacatctgtgcagtgatcatcttctacctgcccatcatcaacctggccgttgtccaccgctttgccgggcatgtctctcccctcattaatgttctcatggcaaatgttctcctacttgtacctccgctgatgaaaccaattgtttattgtgtaaaaactaaacagattagagtgagagttgtagcaaaattgtgtcaatggaagatttaacagtcatatgtgacagaaaacctggaaatgtctggtaagatatttaaggtaaatttgagaaacctaatatttgacaccaagaattatcaacacatatttttatcgttatcacagacttattttattcactctagatactgagaatgggaataaaactgtaaccaggaagtacgttgccttatgtccccatttcagttaag

SEQ ID NO: 900 - protein, 313 aa, Homo sapiens
MSIINTSYVEITTFFLVGMPGLEYAHIWISIPICSMYLIAILGNGTILFIIKTEPSLHGPMYYFLSMLAMSDLGLSLSSLPTVLSIFLFNAPETSSSACFAQEFFIHGFSVLESSVLLIMSFDRFLAIHNPLRYTSILTTVRVAQIGIVFSFKSMLLVLPFPFTLRSLRYCKKNQLSHSYCLHQDVMKLACSDNRIDVIYGFFGALCLMVDFILIAVSYTLILKTVPGIASKKEELKALNTCVSHICAVIIFYLPIINLAVVHRFAGHVSPLINVLMANVLLLVPPLMKPIVYCVKTKQIRVRVVAKLCQWKI

SEQ ID NO: 901 - DNA, 1342 bp, Homo sapiens
  source (1)..(1342)
  CDS (201)..(1142)
atacgacagattatagtccaaagcagcaaccaaccatctctcttcatgatgatagccacataaatgctttgttctctcaaaagaaagctgaaagaagccacaaattttaacactgctttttttctactaaatttacagatattcctattttaccaacacaagcatctgtatttttcatagcagagccctatgaatgaatcatgtccattatcaacacatcatatgttgaaatcaccaccttcttcttggttgggatgccagggctagaatatgcacacatctggatctctatccccatctgcagcatgtatcttattgctattctaggaaatggcaccattctttttatcatcaagacagagccctccttgcatgagcccatgtactattttctttccatgttggctatgtcagacttgggtttgtctttatcatctctgcccactgtgttaagcatcttcctgttcaatgctcctgaaatttcatccaatgcctgctttgcccaggaattcttcattcatggattctcagtactggagtcctcagtcctcctgatcatgtcatttgatagattcctagccatccacaaccctctgagatacacctcaatcctgacaactgtcagagttgcccaaatagggatagtattctcctttaagagcatgctcctggttcttcccttccctttcactttaagaaacttgagatattgcaagaaaaaccaattatcccattcctactgtctccaccaggatgtcatgaagttggcctgttctgacaacagaattgatgttatctatggcttttttggagcactctgccttatggtagactttattctcattgctgtgtcttacaccctgatcctcaagactgtactgggaattgcatccaaaaaggagcagcttaaggctctcaatacttgtgtttcacacatctgtgcagtgatcatcttctacctgcccatcatcaacctggccgttgtccaccgctttgcccggcatgtctctcccctcattaatgttctcatggcaaatgttctcctacttgtacctccactgacgaacccaattgtttattgtgtaaaaactaaacagattagagtgagagttgtagcaaaattgtgtcaacggaagatttaacagtcatatgtgacagaaaacctggaaatgtctggtaagatatttaaggtaaatttgagaaacctaatatttgacaccaagaattatcaacacatatttttgttgttgtcatagagttattttattcactctggatactgcgaatgagaatagaactataaacaggaagtacgttgccttatgtccccatttcagttaag

SEQ ID NO: 902 - protein, 313 aa, Homo sapiens
MSIINTSYVEITTFFLVGMPGLEYAHIWISIPICSMYLIAILGNGTILFIIKTEPSLHEPMYYFLSMLAMSDLGLSLSSLPTVLSIFLFNAPEISSNACFAQEFFIHGFSVLESSVLLIMSFDRFLAIHNPLRYTSILTTVRVAQIGIVFSFKSMLLVLPFPFTLRNLRYCKKNQLSHSYCLHQDVMKLACSDNRIDVIYGFFGALCLMVDFILIAVSYTLILKTVLGIASKKEQLKALNTCVSHICAVIIFYLPIINLAVVHRFARHVSPLINVLMANVLLLVPPLTNPIVYCVKTKQIRVRVVAKLCQRKI

SEQ ID NO: 903 - DNA, 1285 bp, Homo sapiens
  source (1)..(1285)
  CDS (201)..(1085)
ggattatgagtatgagaagtgcttcaggagccaaatgactgatcaatgagggctattgtatttttctccccttaggctggctccacagatttgggagagaacattcccaacaatctctcaggcacagatagatttggaatttagttcccctgctcagtatgggtgctcaatgaagtcaggtactaactaaccagctcaccatgccacacctcagcaacaccacatctgagttcccaatcttcctcctaacaggcttccctgggctggaggccttccacatctggatctcaattcccttcttccttctgagcacagttgctctcttagggaacagcatgatcctattggttgttattctggagccaaacctccatgaacccatgtactgttttctcttcatgctgtctgccgctgacctggggctgaccctctccacaatgcccacgaccctcagtgtcctctggttcagtgcacgtgaaatcatcctcaatgcatgtatcatccagctctttttcctccacagctctggctttatggaatcctcagtactgatggccatggcttttgaccgctttgttgccatttgcagacccctcagatatgctaccatcctgacagactccagaattctaaagattggtgtagcaatagtcctaagaacattgatcagcctctctccatccctctttctcattaagagactgtcattttgcaaagtcaatgtcctttcccattcttactgcttccaccctgatgcgcttaaagttgcatgttctgattcaaggatgaacagctatggaggcttagctgttctcattctggtcaccggggttggtacaccatgtgttgcgctttcctacatcctgataatccactctgtactaaacatcatctcttcagagggacggaggaaggccttcgacacttgtggatctcacattggggcagttgcagtcttctacattccctgggttgttctttcagttgtccacagatttttccacaaggcttcaccaatatgtccacccactattgtccaacatctatttccttggcccctctcggctgaaccccatcatatatagtgtgaagactaaacaaatccgcagggctatcctcaaactctttcaaacaaaatcaaaagaaatgtaatgggggcttttcttcctgctggggtctacctgattcaatcatattctgttgcatttctctcccatgccaacccgtatttcttctctaataacaaaaagaagaacagtaatgtttactgagcacccactatctt

SEQ ID NO: 904 - protein, 294 aa, Homo sapiens [sequence omitted]

SEQ ID NO: 905 - DNA, 1393 bp, Homo sapiens
  source (1)..(1393)
  CDS (201)..(1193)
ctcaataaatgtgaaacactgacagacttggagagaaatgtgtagctctgggaagctaaaaagaaaattcaagttctttgaaaattagaaataataactcagtgaatcttgaagtgccagagagatgttacaagtgataaactatgtattatgtgttatgttaaatgactgaaacatccctgtcttctcagtgcttccctatgtcggtcctcaataataccattgctgagcctctgatcttcctcctgatgggcattccaggcctgaaagccacccagtactggatctccatccctttttgtctcctatatgttgttgccgtctctggaaatagcatgatcctgtttgtggtcctctgtgaacggagcctccataagcctatgtactatttcctctctatgctttcagccacagacctgagcttgtccctgtgtacactttctactacccttggtgtcttctggtttgaagcccgagaaatcaacctaaatgcctgcattgcccagatgttctttctacacggatttactttcatggagtctggggttctactggccatggcctttgatcgttttgtggccatctgttacccactgagatacactaccatccttaccaatgcccgaattgccaagattgggatgagcatgttgataagaaatgttgccgtcatgttgccagtcatgctctttgtcaagaggttgtccttctgcagttctatggtcctttcacattcttactgctaccatgttgatctcatccaactctcctgcacagacaataggatcaacagcatccttggtctgtttgcgcttttgtccactacagggtttgactgcccttgcatcctgctctcctatatcctgatcattcgatctgtcctcagcattgcttcctcagaagagaggcggaaagccttcaacacctgcacatcccacatcagtgctgtttccatcttctacctccctctcatcagtttgtctcttgtccatcgctatggccattcagcacctccatttgtccacatcatcatggccaatgtctttctgctaatccctcctgtgctcaaccctattatttacagtgtaaagattaagcagattcaaaaggccattatcaaggtcttaattcagaagcactccaaatctaatcatcagctatttctgattagagataaagccatttatgaataagtgctttgctacaatggagtaattgtcccaaagtgcccacacatgcctccaacagtccaaactaagcaatttataggttatgtgacatttatttagtcaatttctttgtcaataaattcatgtcattgccaactaaattatgattttgttttcaatatgaagtgaagaaacatatataaacaactaattatatttgtaag

SEQ ID NO: 906 - protein, 330 aa, Homo sapiens
MSVLNNTIAEPLIFLLMGIPGLKATQYWISIPFCLLYVVAVSGNSMILFVVLCERSLHKPMYYFLSMLSATDLSLSLCTLSTTLGVFWFEAREINLNACIAQMFFLHGFTFMESGVLLAMAFDRFVAICYPLRYTTILTNARIAKIGMSMLIRNVAVMLPVMLFVKRLSFCSSMVLSHSYCYHVDLIQLSCTDNRINSILGLFALLSTTGFDCPCILLSYILIIRSVLSIASSEERRKAFNTCTSHISAVSIFYLPLISLSLVHRYGHSAPPFVHIIMANVFLLIPPVLNPIIYSVKIKQIQKAIIKVLIQKHSKSNHQLFLIRDKAIYE

SEQ ID NO: 907 - DNA, 1348 bp, Homo sapiens
  source (1)..(1348)
  CDS (201)..(1148)
gaatttgtgctccttaatattgggaaatgttttttacatagggccgacaagagataccagcttccttcctctgtgaggttagacgaaagatgtatttttgtcctcattccattatttgtactcaaaagagataactttgagggatcaggaaggaaaacacgaaccattcctcactacttgctgaattactcaaagtcactatgggagactggaataacagtgatgctgtggagcccatatttatcctgaggggttttcctggactggagtatgttcattcttggctctccatcctcttctgtcttgcatatttggtagcatttatgggtaatgttaccatcctgtctgtcatttggatagaatcctctctccatcagcccatgtattactttatttccatcttagcagtgaatgacctggggatgtccctgtctacacttcccaccatgcttgctgtgttatggttggatgctccagagatccaggcaagtgcttgctatgctcagctgttcttcatccacacattcacattcctggagtcctcagtgttgctggccatggcctttgaccgttttgttgctatctgccatccactgcactaccccaccatcctcaccaacagtgtaattggcaaaattggtttggcctgtttgctacgaagcttgggagttgtacttcccacacctttgctactgagacactatcactactgccatggcaatgccctctctcacgccttctgtttgcaccaggatgttctaagattatcctgtacagatgccaggaccaacagtatttatgggctttgtgtagtcattgccacactaggtgtggattcaatcttcatacttctttcttatgttctgattcttaatactgtgctggatattgcatctcgtgaagagcagctaaaggcactcaacacatgtgtatcccatatctgtgtggtgcttatcttctttgtgccagttattggggtgtcaatggtccatcgctttgggaagcatctgtctcccatagtccacatcctcatggcagacatctaccttcttcttcccccagtccttaaccctattgtctatagtgtcagaacaaagcagattcgtctaggaattctccacaagtttgtcctaaggaggaggttttaagtaacctctgtcctccaacttttccactgaaaatctcatggaagctgttttagtatatgaaaagtaaaatatctgggtgttgctcatctggttaaaatcctaattctttcacttcttatacatgtaatttcagttaatctttaaccaatatgaaactcaggatttttttggacaaattgtgacaactatggccttacgtt

SEQ ID NO: 908 - protein, 315 aa, Homo sapiens
MGDWNNSDAVEPIFILRGFPGLEYVHSWLSILFCLAYLVAFMGNVTILSVIWIESSLHQPMYYFISILAVNDLGMSLSTLPTMLAVLWLDAPEIQASACYAQLFFIHTFTFLESSVLLAMAFDRFVAICHPLHYPTILTNSVIGKIGLACLLRSLGVVLPTPLLLRHYHYCHGNALSHAFCLHQDVLRLSCTDARTNSIYGLCVVIATLGVDSIFILLSYVLILNTVLDIASREEQLKALNTCVSHICVVLIFFVPVIGVSMVHRFGKHLSPIVHILMADIYLLLPPVLNPIVYSVRTKQIRLGILHKFVLRRRF

SEQ ID NO: 909 - DNA, 1258 bp, Homo sapiens
  source (1)..(1258)
  CDS (201)..(1058)
ccaaataaccttttctttttgctctgcatatactgaatgaaacacaaacttcttattcaatcttctctccccagctgctgcttctacatgtggcaagttctcctacactgtgatttggaaaaatgttttatcacaacaagagcatatttcacccagtcacatttttcctcattggaatcccaggtctggaagacttccacatgtggatctccgggcctttctgctctgtttaccttgtggctttgctgggcaatgccaccattctgctagtcatcaaggtagaacagactctccgggagcccatgttctacttcctggccattctttccactattgatttggccctttctgcaacctctgtgcctcgcatgctgggtatcttctggtttgatgctcacgagattaactatggagcttgtgtggcccagatgtttctgatccatgccttcactggcatggaggctgaggtcttactggctatggcttttgaccgttatgtggccatctgtgctccactacattacgcaaccatcttgacatccctagtgttggtgggcattagcatgtgcattgtaattcgtcccgttttacttacacttcccatggtctatcttatctaccgcctacccttttgtcaggctcacataatagcccattcctactgtgagcacatgggcattgcaaaattgtcctgtggaaacattcgtatcaatggtatctatgggctttttgtagtttctttctttgttctgaacctggtgctcattggcatctcgtatgtttacattctccgtgctgtcttccgcctcccatcacatgatgctcagctaaaagccctaagcacgtgtggcgctcatgttggagtcatctgtgttttctatatcccttcagtcttctctttccttactcatcgatttggacaccaaataccaggttacattcacattcttgttgccaatctctatttgattatcccaccctctctcaaccccatcatttatggggtgaggaccaaacagattcgagagcgagtgctctatgtttttactaaaaaataagactcttaccatgttattttactaagggctttgatccttctataaagaccgatatgttcttgccttaaggaatatctcctgatccttaacttattgctgtcaacttgcaatacaagttggtttgttcctggatgctgactaataatggattttaaaactgtcagaaacatcattgtagttcaagttcaaagactgaccaa

SEQ ID NO: 910 - protein, 285 aa, Homo sapiens [sequence omitted]

SEQ ID NO: 911 - DNA, 1327 bp, Homo sapiens
  source (1)..(1327)
  CDS (201)..(1127)
atttaaatctttggccacatgttaccattaaattgtacgtactttcaagcctctatgatgcagaaatatagcagatattagtttcactgatttctttgttttctgtgtgcactaagcaaggataaggcccactcagtgaatgagagacatttagtttataatatatcttagcataaaaagttcccagaagaacggcctcaatgaataccactctatttcatccttactctttccttcttctgggaattcctgggctggaaagtatgcatctctgggttggttttcctttctttgctgtgttcctgacagctgtccttgggaatatcaccatcctttttgtgattcagactgacagtagtctccatcatcccatgttctacttcctggccattctgtcatctattgacccgggcctgtctacatccaccatccctaaaatgcttggcaccttctggtttaccctgagagaaatctcctttgaaggatgccttacccagatgttcttcatccacctgtgcactggcatggaatcagctgtgcttgtggccatggcctatgattgctatgtggccatctgtgaccctctttgctacacgttggtgctgacaaacaaggtggtgtcagttatggcactggccatctttctgagacccttagtctttgtcataccctttgttctatttatcctaaggcttccattttgtggacaccaaattattcctcatacttatggtgagcacatgggcattgcccgcctgtcttgtgccagcatcagggttaacatcatctatggcttatgtgccatctctatcctggtctttgacatcatagcaattgtcatttcctatgtacagatcctttgtgctgtatttctactctcttcacatgatgcacgactcaaggcattcagcacctgtggctctcatgtgtgtgtcatgttgactttctatatgcctgcatttttctcattcatgacccataggtttggtcggaatatacctcactttatccacattcttctggctaatttctatgtagtcattccacctgctctcaactctgtaatttatggtgtcagaaccaaacagattagagcacaagtgctgaaaatgtttttcaataaataaaacatagctcatttataatatcagattgttatcaatattataaataatcatatttacaatgaaagtggcatgaattttctatgttcaaaataataacagaacatttggaaagtatttaggaccatcttaggggaggactgaaaatggcaatcgtttggcaggtgctacccagaaatggaaaggtaagcccatgtcaaatg

SEQ ID NO: 912 - protein, 308 aa, Homo sapiens
MNTTLFHPYSFLLLGIPGLESMHLWVGFPFFAVFLTAVLGNITILFVIQTDSSLHHPMFYFLAILSSIDPGLSTSTIPKMLGTFWFTLREISFEGCLTQMFFIHLCTGMESAVLVAMAYDCYVAICDPLCYTLVLTNKVVSVMALAIFLRPLVFVIPFVLFILRLPFCGHQIIPHTYGEHMGIARLSCASIRVNIIYGLCAISILVFDIIAIVISYVQILCAVFLLSSHDARLKAFSTCGSHVCVMLTFYMPAFFSFMTHRFGRNIPHFIHILLANFYVVIPPALNSVIYGVRTKQIRAQVLKMFFNK

SEQ ID NO: 913 - DNA, 1354 bp, Homo sapiens
  source (1)..(1354)
  CDS (201)..(1154)
gtgggagcagtctgcagaattgggctaaggaaaggatatcatatatcacaatgttcttaaatcttgctttagttaccctcaacaactctgaacatttatttgtgtagaatttggattaaatggggcaaagagatattatttctaatgtttctttttctccctgagtgaagatcctgaatctgaagacacattcatcagtcatgtcccaggtgactaacaccacacaagaaggcatctacttcatcctcacggacatccctggatttgaggcctcccacatctggatctccatccccgtctgctgtctctacaccatctccatcatgggcaataccaccatcctcactgtcattcgcacagagccatctgtccaccagcgcatgtatctgtttctctccatgctggccctgacggacctgggtctcaccctcaccaccctacccacagtcatgcagcttctctggttcaacgttcgtagaatcagctctgaggcctgttttgctcagtttttcttccttcatggattctcctttatggagtcttctgtcctcctggctatgtccgttgactgctatgtggccatctgctgtcccctccattatgcctccatcctcaccaatgaagtcattggtagaactgggttagccatcatttgctgctgtgttctggcggttcttccctcccttttcttactcaagcgactgcctttctgccactcccaccttctctctcgctcctattgcctccaccaggatatgatccgcctggtctgtgctgacatcaggctcaacagctggtatggatttgctcttgccttgctcattattatcgtggatcctctgctcattgtgatctcctatacacttattctgaaaaatatcttgggcacagccacctgggctgagcgactccgtgccctcaataactgcctgtcccacattctagctgtcctggtcctctacattcccatggttggtgtatctatgactcatcgctttgccaagcatgcctctccactggtccatgttatcatggccaatatctacctgctggcacccccggtgatgaaccccatcatttacagtgtaaagaacaagcagatccaatggggaatgttaaatttcctttccctcaaaaatatgcattcaagatgagggaatgcatttcttaaattactgacaagtatgagtcataggcttaaggggggaatatattcagaattaggaaactataaaataaaacttcatcataatattaaggcagtatgacaagtccctggcttttagcatggaatttttggctgaggtgagctagcagcagtgattctatgcaaaagagatatggatctgagttg

SEQ ID NO: 914 - protein, 317 aa, Homo sapiens
MSQVTNTTQEGIYFILTDIPGFEASHIWISIPVCCLYTISIMGNTTILTVIRTEPSVHQRMYLFLSMLALTDLGLTLTTLPTVMQLLWFNVRRISSEACFAQFFFLHGFSFMESSVLLAMSVDCYVAICCPLHYASILTNEVIGRTGLAIICCCVLAVLPSLFLLKRLPFCHSHLLSRSYCLHQDMIRLVCADIRLNSWYGFALALLIIIVDPLLIVISYTLILKNILGTATWAERLRALNNCLSHILAVLVLYIPMVGVSMTHRFAKHASPLVHVIMANIYLLAPPVMNPIIYSVKNKQIQWGMLNFLSLKNMHSR

SEQ ID NO: 915 - DNA, 1363 bp, Homo sapiens
  source (1)..(1363)
  CDS (201)..(1163)
tggaacaatcttggtttttgcatgttgctaccattattactaattttaacctttgttcatttcagacaggttctattttggatgacaaattatatggtcactttatcttcaggaggcaataattataattagttgaaagtttgagagttactcaagtttctctatccttaatcaccctctgtctttaggggctgagatttatgccatctgcctctgccatgatcattttcaacctgagcagttacaatccaggacccttcattctggtagggatcccaggcctggagcaattccatgtgtggattggaattcccttctgtatcatctacattgtagctgttgtgggaaactgcatccttctctacctcattgtggtggagcatagtcttcatgaacccatgttcttctttctctccatgctggccatgactgacctcatcttgtccacagctggtgtgcctaaagcactcagtatcttttggctaggggctcgcgaaatcacattcccaggatgccttacacaaatgttcttccttcactataactttgtcctggattcagccattctgatggccatggcatttgatcactatgtagctatctgttctcccttgagatataccaccatcttgactcccaagaccatcatcaagagtgctatgggcatctcctttcgaagcttctgcatcatcctgccagatgtattcttgctgacatgcctgcctttctgcaggacacgcatcataccccacacatactgtgagcatataggtgttgcccagctcgcctgtgctgatatctccatcaacttctggtatggcttttgtgttcccatcatgacggtcatctcagatgtgattctcattgctgtttcctacgcacacatcctctgtgctgtctttggccttccctcccaagatgcctgccagaaagccctcggcacttgtggttctcatgtctgtgtcatcctcatgttttatacacctgcctttttctccatcctcgcccatcgctttggacacaatgtctctcgcaccttccacatcatgtttgccaatctctacattgttatcccacctgcactcaaccccatggtttacggagtgaagaccaagcagatcagagataaggttatacttttgttttctaagggtacaggatgatgttttactaggataagtttatagtgtacagaaatgtagaaagagtgaaatggcaaatgctctttaaagcaagaactacctgaaactgctttcatgtgccaagaatgtggcatgatctgtatgacaatgatggtcatatgtataaaaaaaatccttgatgacctctttgcttgtgaaatagggggctgtacagaatatga

SEQ ID NO: 916 - protein, 320 aa, Homo sapiens
MPSASAMIIFNLSSYNPGPFILVGIPGLEQFHVWIGIPFCIIYIVAVVGNCILLYLIVVEHSLHEPMFFFLSMLAMTDLILSTAGVPKALSIFWLGAREITFPGCLTQMFFLHYNFVLDSAILMAMAFDHYVAICSPLRYTTILTPKTIIKSAMGISFRSFCIILPDVFLLTCLPFCRTRIIPHTYCEHIGVAQLACADISINFWYGFCVPIMTVISDVILIAVSYAHILCAVFGLPSQDACQKALGTCGSHVCVILMFYTPAFFSILAHRFGHNVSRTFHIMFANLYIVIPPALNPMVYGVKTKQIRDKVILLFSKGTG

SEQ ID NO: 917 - DNA, 1150 bp, Homo sapiens
  source (1)..(1150)
  CDS (201)..(752)
  CDS (789)..(950)
tgcattctagtgtgcttgggaggacaataaaataaacatccctgtgctgttgtatgacatagcttgaaacaaaagagaataaagaggatgattcaatggagatgaaaaactgtaccagggtaaaagaatttattttccttggcctaacccagaatggggacacaagattggtcctatttcttttcctactcttggtgtacatgacgactctgctgggaaacctcctcatcatggtcactgtcacctgtgaatcttgccttcacatgcccatgtattttttgctccataatttatctattgccgatatctgcttctactccatcacagagcccaaggttctggtggaccttctgtctgagagaaagaccatctccttcaatggttgcttcactcagatgtttctcttccaccttattggaggggtggatgcattttctctatcagtgatggcattggatcaatatgtggccatttccaagtccctgcactatgcgaccatcatgagtagagaccgttgcattgggctcacagtggctgcctggttggggggctttgtccactccattgtgcagattaccctgttgctcccactccctttctgtggaccaaatgttcttgacactttctactgtgatgttccccaggttctcaaactcgcccatacagacattttcatacttgagctgttgatgatttccaacaatggactgctcaccacactgtggtttttcctgctcctggtgtcctacatggtcatattatcattactcaagtctcaggcaggatagggcaggaggaaagtcatctccacctgcacctcccacatcactgtggtgaccctgcattttgtgccctgcatctatgtctatgcccggcctttcactgccctccccacggataaggccatctctgtcaccttcactgtcatctcccctctgctcaacccttgatctacactctgagaaaccatgagatgaagtcaaccatgaagagactgaagactctgaccttctgataggaaatagaccagtgcttccctccttctcaccacttttgaaaatgcttgcccagcaaatactttctactcactaattgatttctaattattttttagtctactaataagaagcacatgactttcaaacattct

SEQ ID NO: 918 - protein, 237 aa, Homo sapiens
MTTLLGNLLIMVTVTCESCLHMPMYFLLHNLSIADICFYSITEPKVLVDLLSERKTISFNGCFTQMFLFHLIGGVDAFSLSVMALDQYVAISKSLHYATIMSRDRCIGLTVAAWLGGFVHSIVQITLLLPLPFCGPNVLDTFYCDVPQVLKLAHTDIFILELLMISNNGLLTTLWFFLLLVSYMGRRKVISTCTSHITVVTLHFVPCIYVYARPFTALPTDKAISVTFTVISPLLNP

SEQ ID NO: 919 - DNA, 3411 bp, Homo sapiens
  source (1)..(3411)
  CDS (201)..(834)
  CDS (3042)..(3211)
  modified_base (3236)..(3335): a, t, c, g, unknown or other
cagacctaatacttgaatctgttaagagagagtaaacactttctgaaataacattattttttccaagatattcaggaaagagaaaacatgattcaatggagttgggaaatgtcaccagagtaaaagaatttatatttctgggacttactcaatcccaagaccagagtttggtcttgtttctttttttatgtcttgtgtacatgacgactctgctgggaaacctcctcatcatggtcaccgtgacctgtgagtctcgccttcacacccccatgtacttcctgctccgcaatctagccatccttgacatctgcttctcctccacaactgctcctaaagtcttgctggaccttctgtcaaagaaaaagaccatatcctatacaagctgcatgacacagatatttctcttccacctccttggtggggcagacattttttctctctctgtgatggcgtttgactgctacatggccatctccaagcccctgcactatgtgaccatcatgagtagagggcaatgcactgccctcatctctgcctcttggatggggggctttgtccactccatcgtgcagatctccctgttgctgcctctccctttctgtggacccaatgttcttgacactttctactgcgatgtcccccaggtcctcaaactcacttgcactgacacttttgctcttgagttcttgatgatttccaacaatggcctggtcactaccctgtggtttatcttcctgcttgtgtcctacacagtcatcctaatgacgctgaggtctcaggcaggagggggcaggaggaaagccatctccacttgcacctccccacatcactgtggtgaccctgcattttgtgccctgcatctatgtctatgcccggcccttcactgccctccccacagaaaaggccatctctgtcaccttcactgtcatctcccctctgctgaaccctttgatctacactctgaggaaccaggaaatgaagtcagccatgagaagactgaagagaagactcgtgccttctgaaagggaatagaaaacaaatccaggccaggcgcggtggctcacagctgtaaccccagcactttgggaggccaaggcgggtggatcatgaggtcaagagatcgagaccatcctggccaacatggtgaaaccctgtctctactaaaaatacaaaaattagctgggcatgatggtgcgcacctgtagtcccagctaccaggaggctgaggcaggagaattacttgaacccaggaggcagaggttgcagtgagccaagattgcgtcactgcattccagcctggcaacacagcaagactccatctcaaaaaaaaaaaaaaaaagaggccgggcgcggtggctcatgcctgtaatttttttgggaggccgaggcgggcagatcacgaggtcaggagatcgagaccatcctggttaacacggtgaaacctcgtctctactaaaaatacaaaaaattagctgggcgtggtggcaggcgcctgtggtcccagctactcgggaggctgaggcaggagaattacttgaacccaagaggcagaggttgcagtgagccgagatcgcgccactgcattccaacctggtaacacagtgagactctgtctcaaaaaaaaaaaaaaagaaaagaaaacaaattcagctcttcatcaccaaggacaccttatattatttttcccatgaattcacatttacatactcagatacattgtcagtaaaccaactatactgactatgaacaatttgtcttcctatttcagttagtagataactgataacctaagcttctgtgcagcatgaactaactagtgttataggagtgaactgactgttacttttccaaagaccaagtaaccttatgtcaatcaagacagctatatggcaggcagataagatgattaagtccaacatttttttcagaagataaggaaataaaagcccagagagataaagtgatgtgttcaaggtcttatattaagttaattacagagacatcttcagatgctcaacccattgttcttccaccacatgaatgtaatttattacattgttggacctgtctataccaaactataatcctgttccagaaggatctcatgatcaatgcctctggagtacatatatgtgggtatgcatagcctattgcagattgagaaattggcctctgctgaattaaactaaagtgggctcatgagctactgagaacttcataggaacataatggttatcctcctggattcctatcaagattgatgaggcttgggaagatttctcatcatggcctaaaggtatatatcttaatgcagaactagacatgccacacattctcatgatgagtttggataaaggcaaaacttcagaaaccacacacatgaagcaatttatctctaccatcaaaggaccgattttccagttgcagccttacaagggtcagttttgccttggcctcaccattgagaattcacatttcttttcactggaaagagagaatgggagagtttaagaagaaaaaactctacccggtctattttttcaaacttctagtgtttgtgaagaggcagtataggctagtgttattatctgggagagcagtaaagcatggtggatgaaagctctaatttcagagtcatacagacccaggtatgaatcctatctctgccatccaccagctgtgcgatcttgagcaagttatttcacctctctctccaaaggtcatagttcacctacgcaaagattctcgttataatatccatctcatgaggttgttgtaaaggacaaaatgagatggtatacatgaaatatatggtacctggcagagaataaatgtgcgaccaaagataaatgtcattaagaatatcaactttattgctttacctagcacgccttctgtttcccattggcctgtagcgcccttgatcggtatgcgcagagggcttatctatagatacagacgggtcgagtacgagcatggaaatgtgtgttgagttaagagcgggcacatgtgagagagggtgcacgcgcacgctcagacagacgagcgcgatgagacggagggaacgtcagggaacacgaatgtcggaagtccaggggaagtaggaacgcaccataggaaagaaaatgacctcacacgtcttcggcacacgacactacgcacgggcaatagtggtcggacgacggcacacagcgagtgcatacaacgctgatgcgcgaggttaatggtcgacgaannnnnnnnnnnnnnnnnnnnnnnnnnnnnnnnnnnnnnnnnnnnnnnnnnnnnnnnnnnnnnnnnnnnnnnnnnnnnnnnnnnnnnnnnnnnnnnnnnnntataagttatactttagcaaagcaaggggcaatttcattttaagcagtttgcaaaacacaaaagacatccagaagc

SEQ ID NO: 920 - protein, 267 aa, Homo sapiens
MTTLLGNLLIMVTVTCESRLHTPMYFLLRNLAILDICFSSTTAPKVLLDLLSKKKTISYTSCMTQIFLFHLLGGADIFSLSVMAFDCYMAISKPLHYVTIMSRGQCTALISASWMGGFVHSIVQISLLLPLPFCGPNVLDTFYCDVPQVLKLTCTDTFALEFLMISNNGLVTTLWFIFLLVSYTVILMTLRSQAGGGRRKAISTCTSPHHCDERDETEGTSGNTNVGSPGEVGTHHRKENDLTRLRHTTLRTGNSGRTTAHSECIQR

SEQ ID NO: 921 - DNA, 1375 bp, Homo sapiens
  source (1)..(1375)
  CDS (201)..(1175)
ttattagttaataaacctctgcatcaagtcaagtaacactgagataaatatgaagaaaacaagcacatccatttaatctatataatttctaaagagatgaagaaaggcttagaaaaatactacaattttatttctgtggtggttccaacctgtgataactgagaacaatacaaatagagatttgaaattcatgttgaatcatgaatcatatgtctgcatctctcaaaatctccaatagctccaaattccaggtctctgagttcatcctgctgggattcccgggcattcacagctggcaacactggctatctctgcccctggcactactgtatctctcagcacttgctgcaaacaccctcatcctcatcatcatctggcagaacccttctttacagcagcccatgtatattttccttggcatcctctgtatggtagacatgggtctggccactactatcatccctaagatcctggccatcttctggtttgatgccaaggttattagcctccctgagtgctttgctcagatttatgccattcacttctttgtgggcatggagtctggtatcctactctgcatggcttttgatagatatgtggctatttgtcaccctcttcgctatccatcaattgtcaccagttccttaatcttaaaagctaccctgttcatggtgctgagaaatggcttatttgtcactccagtgcctgtgcttgcagcacagcgtgattattgctccaagaatgaaattgaacactgcctgtgctctaaccttggggtcacaagcctggcttgtgatgacaggaggccaaacagcatttgccagttggttctggcatggcttggaatggggagtgatctaagtcttattatactgtcatatattttgattctgtactctgtacttagactgaactcagctgaagctgcagccaaggccctgagcacttgtagttcacatctcaccctcatccttttcttttacactattgttgtagtgatttcagtgactcatctgacagagatgaaggctactttgattccagttctacttaatgtgttgcacaacatcatccccccttccctcaaccctacagtttatgcacttcagaccaaagaacttagggcagccttccaaaaggtgctgtttgcccttacaaaagaaataagatcttagagaccttctccatgatgtacatgaacctcagcttctcctaaactggatagtaaaatttcaaagaggataaatgagtaagtgaatacctttggaattccctttttatatttgtatgtaaataattgtgaaagcttcagaaaagatacaaaaaatcacagtagcctaaaatattgacaaaagctaaatatttaaatatattt

SEQ ID NO: 922 - protein, 324 aa, Homo sapiens
MNHMSASLKISNSSKFQVSEFILLGFPGIHSWQHWLSLPLALLYLSALAANTLILIIIWQNPSLQQPMYIFLGILCMVDMGLATTIIPKILAIFWFDAKVISLPECFAQIYAIHFFVGMESGILLCMAFDRYVAICHPLRYPSIVTSSLILKATLFMVLRNGLFVTPVPVLAAQRDYCSKNEIEHCLCSNLGVTSLACDDRRPNSICQLVLAWLGMGSDLSLIILSYILILYSVLRLNSAEAAAKALSTCSSHLTLILFFYTIVVVISVTHLTEMKATLIPVLLNVLHNIIPPSLNPTVYALQTKELRAAFQKVLFALTKEIRS

SEQ ID NO: 923 - DNA, 1366 bp, Homo sapiens
  source (1)..(1366)
  CDS (201)..(1166)
catataattctcttctctatagggaatagatatgattattattgctattttatggatgatgaagctttctaaacatgatatagccagtaagtgttactattctctcattcctatctctgttctatcttgttcctccagataatgtgatactatgtggaggtttctgaccacagagaatgtccagcactcttggccacaacatggaatctcctaatcacactgatgttgacccttctgtcttcttcctcctgggcatcccaggtctggaacaatttcatttgtggctctcactccctgtgtgtggcttaggcacagccacaattgtgggcaatataactattctggttgttgttgccactgaaccagtcttgcacaagcctgtgtacctttttctgtgcatgctctcaaccatcgacttggctgcctctgtctccacagttcccaagctactggctatcttctggtgtggagccggacatatatctgcctctgcctgcctggcacagatgttcttcattcatgccttctgcatgatggagtccactgtgctactggccatggcctttgatcgctacgtggccatctgccacccactccgctatgccacaatcctcactgacaccatcattgcccacataggggtggcagctgtagtgcgaggctccctgctcatgctcccatgtcccttccttattgggcgtttgaacttctgccaaagccatgtgatcctacacacgtactgtgagcacatggctgtggtgaagctggcctgtggagacaccaggcctaaccgtgtgtatgggctgacagctgcactgttggtcattggggttgacttgttttgcattggtctctcctatgccctaagtgcacaagctgtccttcgcctctcatcccatgaagctcggtccaaggccctagggacctgtggttcccatgtctgtgtcatcctcatctcttatacaccagccctcttctccttttttacacaccgctttggccatcacgttccagtccatattcacattcttttggccaatgtttatctgcttttgccacctgctcttaatcctgtggtatatggagttaagaccaaacagatccgtaaaagagttgtcagggtgtttcaaagtgggcagggaatgggcatcaaggcatctgagtgactctggagtatagagggacttaatccaaaataaaaaaaaaaccttttcaagataatcctcagtatgtgagaccagaaagagcttttaagagggggataatgtcttctgcagaactttctagaccatttccaagaatgataaaccacagagaagggcattctttctttcctttcagagaagtgtaaacatggggagattct

SEQ ID NO: 924 - protein, 321 aa, Homo sapiens
MESPNHTDVDPSVFFLLGIPGLEQFHLWLSLPVCGLGTATIVGNITILVVVATEPVLHKPVYLFLCMLSTIDLAASVSTVPKLLAIFWCGAGHISASACLAQMFFIHAFCMMESTVLLAMAFDRYVAICHPLRYATILTDTIIAHIGVAAVVRGSLLMLPCPFLIGRLNFCQSHVILHTYCEHMAVVKLACGDTRPNRVYGLTAALLVIGVDLFCIGLSYALSAQAVLRLSSHEARSKALGTCGSHVCVILISYTPALFSFFTHRFGHHVPVHIHILLANVYLLLPPALNPVVYGVKTKQIRKRVVRVFQSGQGMGIKASE

SEQ ID NO: 925 - DNA, 1246 bp, Homo sapiens
  source (1)..(1246)
  CDS (201)..(1046)
attttctcttgtttttttttttttaactctaggaaagcccagacaaattttgagctatttcataacctaccagacttatcatgctaacactgaataaaacagacctaataccagcttcatttattctgaatggagtcccaggactggaagacacacaactctggatttccttcccattctgctctatgtatgttgtggctatggtagggaattgtggactcctctacctcattcactatgaggatgccctgcacaaacccatgtactacttcttggccatgctttcctttactgaccttgttatgtgctctagtacaatccctaaagccctctgcatcttctggtttcatctcaaggacattggatttgatgaatgccttgtccagatgttcttcatccacaccttcacagggatggagtctggggtgcttatgcttatggccctggatcgctatgtggccatctgctaccccttacgctattcaactatcctcaccaatcctgtaattgcaaaggttgggactgccaccttcctgagaggggtattactcattattccctttactttcctcaccaagcgcctgccctactgcagaggcaatatacttccccatacctactgtgaccacatgtctgtagccaaattgtcctgtggtaatgtcaaggtcaatgccatctatggtctgatggttgccctcctgattgggggctttgacatactgtgtatcaccatctcctataccatgattctccgggcagtggtcagcctctcctcagcagatgctcggcagaaggcctttaatacctgcactgcccacatttgtgccattgttttctcctatactccagctttcttctccttcttttcccaccgctttggggaacacataatccccccttcttgccacatcattgtagccaatatttatctgctcctaccacccactatgaaccctattgtctatggggtgaaaaccaaacagatacgagactgtgtcataaggatcctttcaggttctaaggataccaaatcctacagcatgtgaatgaacacttgccaggagtgagaagagaaggaaagaattacttctatttgcctcttatgcaggagttcataaaatctttctggaagtactgtattgatcacaaaatggagtttgttgactggtgcattctcaataagtaccttgggaatctcaacatcactggaaggcccaccaacatttctataaattttttaccttct

SEQ ID NO: 926 - protein, 281 aa, Homo sapiens
MVGNCGLLYLIHYEDALHKPMYYFLAMLSFTDLVMCSSTIPKALCIFWFHLKDIGFDECLVQMFFIHTFTGMESGVLMLMALDRYVAICYPLRYSTILTNPVIAKVGTATFLRGVLLIIPFTFLTKRLPYCRGNILPHTYCDHMSVAKLSCGNVKVNAIYGLMVALLIGGFDILCITISYTMILRAVVSLSSADARQKAFNTCTAHICAIVFSYTPAFFSFFSHRFGEHIIPPSCHIIVANIYLLLPPTMNPIVYGVKTKQIRDCVIRILSGSKDTKSYSM

SEQ ID NO: 927 - DNA, 1300 bp, Homo sapiens
  source (1)..(1300)
  CDS (201)..(1100)
atgtccaatagatgtaagtgacaacatgagattaacgaggctgagtcacacctcaatatcatgatgctaggtaattattttctcaatacttccatagagattattagaaatactaatatcaaatatttttccccttagtggtgctccaggagctcagagattccaacagctctaagttccaggtctctgagtttatcctgatgggattccctggcattcacagttggcagcactggctctccctgcccctggctctgctctacctcttagctctcagtgccaacatccttatcctgatcatcatcaacaaagaggcagcactgcaccagcctatgtactatttcctgggcatcttggctatggcagacataggcctggctaccaccatcatgcctaagattttggccatcttatggttcaatgctaagaccatcagtctcctggagtgctttgctcagatgtatgccatacattgctttgtggccatggaatcaagtacctttgtctgcatggctattgatagatatgtagccatttgtcgaccgctacgatatccatcaatcatcactgaatcttttgttttcaaagcaaatgggttcatggcactgagaaacagcctgtgtctcatctcagtgcctctgttggctgcccagaggcattactgctcccagaatcaaattgagcactgtctttgttctaaccttggagtcactagcctatcttgtgatgatcgaagaatcaatagcattaaccaggtccttttggcttggacactcatgggaagtgacctgggtttgattattttatcatatgctctaatactttactctgtcctgaagctgaactctccagaagctgcatccaaggccttaagtacctgcacctcccacctcatcttaatccttttcttctacacagtcatcattgtgatttccattactcgtagtacaggaatgagagttccccttattccagttctacttaatgtgctacacaatgtcattccccctgccctgaaccccatggtatatgcactcaagaacaaggaactcaggcaaggcttatacaaggtacttagactgggagtgaagggcacctgatatggaaaagatatttcattttttgaaaattttcttcacatgtttttatatcatattctccaactgctgcaaatggcagaacaacaaagaaatagcataatgaattggtggcaacaactgacactttagaacaaaggagatagaagtaatatttgaaatatttgggagtcaagcaaaaatcttcatcacaaagggtaaca

SEQ ID NO: 928 - protein, 299 aa, Homo sapiens
MGFPGIHSWQHWLSLPLALLYLLALSANILILIIINKEAALHQPMYYFLGILAMADIGLATTIMPKILAILWFNAKTISLLECFAQMYAIHCFVAMESSTFVCMAIDRYVAICRPLRYPSIITESFVFKANGFMALRNSLCLISVPLLAAQRHYCSQNQIEHCLCSNLGVTSLSCDDRRINSINQVLLAWTLMGSDLGLIILSYALILYSVLKLNSPEAASKALSTCTSHLILILFFYTVIIVISITRSTGMRVPLIPVLLNVLHNVIPPALNPMVYALKNKELRQGLYKVLRLGVKGT

SEQ ID NO: 929 - DNA, 1252 bp, Homo sapiens
  source (1)..(1252)
  CDS (201)..(1052)
tgtatttgcaaggaaaatttgaatgaaatttgtttcataattccttctcttcaggatgaaacttctggaaaaatagaatgcctctatttaattcattatgctggtttccaacaattcatgtgactcctccatcttttattcttaatggaatacctggtctggaaagagtacatgtatggatctccctcccactctgcacaatgtacatcatcttccttgtggggaatcttggtcttgtgtacctcatttattatgaggagtccttacatcatccgatgtattttttttttggccatgctctctccctcattgacctccttacctgcaccaccactctacccaatgcactctgcatcttctggttcagtctcaaagaaattaacttcaatgcttgcttggcccagatgttctttgttcatgggttcacaggtgtggagtctggggtgctcatgctcatggctctagaccgctatatagccatttgctaccctttgcgttatgctaccacactcaccaaccctatcattgccaaggctgagcttgccaccttcctgaggggtgtattgctgatgattcctttcccattcttggttaagcgtttgcctttctgccaaagcaatattatctcccatacgtactgcgaccacatgtctgtagtaaagctatcttgtgccagcatcaaggtcaatgtaatctatggtctaatggttgctctcctgattggagtgtttgacatttgttgtatatctttgtcttacactttgatcctcaaggcagcgatcagcctctcttcatcagatgctcggcagaaggctttcagcacctgcactgcccatatatctgccatcatcatcacctatgttccagcattcttcactttctttgcccaccgttttgggggacacacaattcccccttctcttcacatcattgtggctaatctttatcttcttcttcccccaactctaaaccctattgtttatggagtaaagacaaaacagatacgcaagagtgtcataaagttcttccagggtgataagggtgcaggttgattcaaggcaacttaattcagatggaagaaagataaatgaaaaataacaaagaataaacttacgtgtgatattttacatttattgatgtgtagtatcatacattttctctctcagtctatgttttctgaaactgttttggggaaatttatagcccattctggatgtatatctcagtgcctttcccttaatttttgtctatt

SEQ ID NO: 930 - protein, 283 aa, Homo sapiens
MYIIFLVGNLGLVYLIYYEESLHHPMYFFFGHALSLIDLLTCTTTLPNALCIFWFSLKEINFNACLAQMFFVHGFTGVESGVLMLMALDRYIAICYPLRYATTLTNPIIAKAELATFLRGVLLMIPFPFLVKRLPFCQSNIISHTYCDHMSVVKLSCASIKVNVIYGLMVALLIGVFDICCISLSYTLILKAAISLSSSDARQKAFSTCTAHISAIIITYVPAFFTFFAHRFGGHTIPPSLHIIVANLYLLLPPTLNPIVYGVKTKQIRKSVIKFFQGDKGAG

SEQ ID NO: 931 - DNA, 1342 bp, Homo sapiens
  source (1)..(1342)
  CDS (201)..(1142)
ttattgattctgtttcatgctcatatgaccctagcagagtaagaggtattttactctttttcagaaaggaaccaagaagagtacaatgctattttttattttaccaggaatcaggataaagtgagaagtggagcaagaatcactaatggaaagtcaataattgtcactgatacacacaacagctttttgtgacagaaagaatgcctatagctaacgacacccagttccatacttcttcattcctactgctgggtatcccagggctagaagatgtgcacatctggattggattcccttttttctctgtgtatcttattgcactcctgggaaatgctgctatcttctttgtgatccaaactgagcagagtctccatgagcccatgtactactgcctggccatgttggattccattgacctgagcttgtctacggccaccattcccaaaatgctgggcatcttctggttcaatatcaaggaaatatcttttggaggctacctttctcagatgttcttcatccatttcttcactgtcatggagagcatcgtattggtggccatggcctttgaccgctacattgccatttgcaaacctctttggtacaccatgatcctcaccagcaaaatcatcagcctcattgcaggcattgctgtcctgaggagcttgtacatggtcattccactggtgtttctcctcttaaggttgcccttctgtggacatcgtatcatccctcatacttactgtgagcacatgggcattgcccgtctggcctgtgccagcatcaaagtcaacattatgtttggtcttggcagtatttctctcttgttattggatgtgctccttattattctctcccatatcaggatcctctatgctgtcttctgcctgccctcctgggaagctcgactcaaagctctcaacacctgtggctctcacattggtgttatcttagccttttctacaccagcatttttctctttctttacacactgctttggccatgatattccccaatatatccacattttcttggctaatctatatgtggttgttcctcccaccctcaatcctgtaatctatggggtcagaaccaaacatattagggagacagtgctgaggattttcttcaagacagatcactaaccagttggagtttggagggtctctcttagcattcatgatgaagcagccactagggaggagagaagagacaccaaggaatttgggtacagagaaagtgagataccctgaataaaatttaaaataattatgagtgtattggtagataaatattatttcacagtcaccttcagtgaaatgtcccaaccacaaaatatatccat

SEQ ID NO: 932 - protein, 313 aa, Homo sapiens
MPIANDTQFHTSSFLLLGIPGLEDVHIWIGFPFFSVYLIALLGNAAIFFVIQTEQSLHEPMYYCLAMLDSIDLSLSTATIPKMLGIFWFNIKEISFGGYLSQMFFIHFFTVMESIVLVAMAFDRYIAICKPLWYTMILTSKIISLIAGIAVLRSLYMVIPLVFLLLRLPFCGHRIIPHTYCEHMGIARLACASIKVNIMFGLGSISLLLLDVLLIILSHIRILYAVFCLPSWEARLKALNTCGSHIGVILAFSTPAFFSFFTHCFGHDIPQYIHIFLANLYVVVPPTLNPVIYGVRTKHIRETVLRIFFKTDH

SEQ ID NO: 933 - DNA, 1366 bp, Homo sapiens
  source (1)..(1366)
  CDS (201)..(1166)
actgtagttcaaagtctttcttgctatagttggaagaaagaatttctggttatcaatgtaaggtgaatgtacatggcacttgaggttcactttgtccaaaccagtacctcttatctcgtctctaactctccctctccctctcctaggcagaaagcaatggctgctaaagagtataaaatgctctcctcctgtcagccatcatgtctggggacaacagctccagcctgaccccaggattctttatcttgaatggcgttcctgggctggaagccacacacatctggatctccctgccattctgctttatgtacatcattgctgtcgtggggaactgtgggctcatctgcctcatcagccatgaggaggccctgcaccggcccatgtactacttcctggccctgctctccttcactgatgtcaccttgtgcaccaccatggtacctaatatgctgtgcatattctggttcaacctcaaggagattgactttaacgcctgcctggcccagatgttttttgtccatatgctgacagggatggagtctggggtgctcatgctcatggccctggaccgctatgtggccatctgctaccccttacgctatgccaccatccttaccaaccctgtcatcgccaaggctggtcttgccaccttcttgaggaatgtgatgctcatcatcccattcactctcctcaccaagcgcctgccctattgccgggggaacttcatcccccacacctactgtgaccatatgtctgtggccaaggtatcctgtggcaatttcaaggtcaatgctatttatggtctgatggttgctctcctgattggtgtgtttgatatctgctgtatctctgtatcttacactatgattttgcaggctgttatgagcctgtcatcagcagatgctcgtcacaaagccttcagcacctgcacatctcacatgtgttccattgtgatcacctatgttgctgcttttttcacttttttcactcatcgttttgtaggacacaatatcccaaaccacatacacatcatcgtggccaacctttatctgctactgcctcctaccatgaacccaattgtttatggagtcaagaccaagcagattcaggaaggtgtaattaaatttttacttggagacaaggttagttttacctatgacaaatgaaacatagaatagacatattgtttcaggtggtgagaaaataatggagacaaaatttcataaaagatgtgaataaaatggtattaaaatcatgacatgtaatttacccatgtaacaaacttgcacgtgtacctaaaataaaaatagaaataaaaaatcaaaataaagacataaatttgtaagtcaccataatatgtcaattt

SEQ ID NO: 934 - protein, 321 aa, Homo sapiens
MSGDNSSSLTPGFFILNGVPGLEATHIWISLPFCFMYIIAVVGNCGLICLISHEEALHRPMYYFLALLSFTDVTLCTTMVPNMLCIFWFNLKEIDFNACLAQMFFVHMLTGMESGVLMLMALDRYVAICYPLRYATILTNPVIAKAGLATFLRNVMLIIPFTLLTKRLPYCRGNFIPHTYCDHMSVAKVSCGNFKVNAIYGLMVALLIGVFDICCISVSYTMILQAVMSLSSADARHKAFSTCTSHMCSIVITYVAAFFTFFTHRFVGHNIPNHIHIIVANLYLLLPPTMNPIVYGVKTKQIQEGVIKFLLGDKVSFTYDK

SEQ ID NO: 935 - DNA, 1384 bp, Homo sapiens
  source (1)..(1384)
  CDS (201)..(1184)
gcaaatatttaaaagtgagagtgtctttttaactatatttcatattccctctctaggtctcttatgctatattatggagttaaagaatggattttctgtttccccaagaaatagacaccatgctgtgagagaagttatggtttctcactggaagcaagaaaactcatgcaagaaatgtgtctgtagggaatggcaccaatatgcttcataccaacaatacacagtttcacccttccaccttcctcgtagtgggggtcccagggctggaagatgtgcatgtatggattggcttccccttctttgcggtgtatctaacagcccttctagggaacatcattatcctgtttgtgatacagactgaacagagcctccaccaacccatgttttacttcctagccatgttggccggcactgatctgggcttgtctacagcaaccatccccaagatgctgggaattttctggtttaatcttggagagattgcatttggtgcctgcatcacacagatgtataccattcatatatgcactggcctggagtctgtggtactgacagtcacgggcatagatcgctatattgccatctgcaaccccctgagatatagcatgatccttaccaacaaggtaatagccattctgggcatagtcatcattgtcaggactttggtatttgtgactccattcacatttctcaccctgagattgcctttctgtggtgtccggattatccctcatacctattgtgaacacatgggcttggcaaagttagcttgtgccagtattaatgttatatatggattgattgccttctcagtgggatacattgacatttctgtgattggattttcctatgtccagatcctccgagctgtcttccatctcccagcctgggatgcccggcttaaggcactcagcacatgtggctctcacgtctgtgttatgttggctttctacctgccagccctcttttccttcatgacacaccgctttggccacaacatccctcattacatccacattcttctggccaatctgtatgtggtttttccccctgctcttaactctgttatctatggggtcaaaacaaaacagatacgagagcaggtacttaggatactcaaccctaaaagcttttggcattttgaccccaagaggatcttccacaacaattcagttagacaataatgagatcataacaaaataaacactggaaacattttttttactacttctcttgcattcccacatgagccaatagcattatatcccctacaacatctcatgatttcagtacggtctgttggaagttatagctcaaagattccaaaacaatctctctgtttcacccattaaaagtgcaaaaagtactcacacttaagccccat

SEQ ID NO: 936 - protein, 327 aa, Homo sapiens
MLHTNNTQFHPSTFLVVGVPGLEDVHVWIGFPFFAVYLTALLGNIIILFVIQTEQSLHQPMFYFLAMLAGTDLGLSTATIPKMLGIFWFNLGEIAFGACITQMYTIHICTGLESVVLTVTGIDRYIAICNPLRYSMILTNKVIAILGIVIIVRTLVFVTPFTFLTLRLPFCGVRIIPHTYCEHMGLAKLACASINVIYGLIAFSVGYIDISVIGFSYVQILRAVFHLPAWDARLKALSTCGSHVCVMLAFYLPALFSFMTHRFGHNIPHYIHILLANLYVVFPPALNSVIYGVKTKQIREQVLRILNPKSFWHFDPKRIFHNNSVRQ

SEQ ID NO: 937 - DNA, 1339 bp, Homo sapiens
  source (1)..(1339)
  CDS (201)..(1139)
acaataatctgtgttgagaggcttcctcgattatcctctggaaagaagtgagtcttgaatgtttgtaaattaaccacctataccattacctctagcacactgataagagtctttctgtttcttcaggaacttgacaagagaggaccttaaagaaagtgagatccttcatacttaggaattcagtgacacttgctgggagaatgccttctatcaatgacacccacttctatccccccttcttcctcctgctaggaataccaggactggacactttacatatctggatttctttcccattctgtattgtgtacctgattgccattgtggggaatatgaccattctctttgtgatcaaaactgaacatagtctacaccagcccatgttctacttcctggccatgttgtctatgattgatctgggtctgtccacatccactatccccaaaatgctaggaatcttctggttcaacctccaagagatcagctttgggggatgccttcttcagatgttctttattcacatgtttacaggcatggagactgttctgttggtggtcatggcttatgaccgctttgttgccatctgcaaccctctccagtacaccatgatcctcaccaataaaaccatcagtatcctagcttctgtggttgttggaagaaatttagttcttgtaaccccatttgtgtttctcattctgcgtctgccattctgtgggcataacatcgtacctcacacatactgtgagcacaggggtctggccgggttggcctgtgcacccattaagatcaacataatctatgggctcatggtgatttcttatattattgtggatgtgatcttaattgcctcttcctatgtgcttatccttagagctgtttttcgccttccctctcaagatgtccgactaaaggccttcaatacctgtggttctcatgtctgtgttatgctgtgcttttacacaccagcatttttttcttttatgacacatcgttttggccaaaacattccccactatatccatattcttttggctaacctgtatgtggttgtcccacctgcccttaaccctgtcatttatggagtcaggaccaagcagatccgagagcaaattgtgaaaatatttgtacagaaagaataattctgtattaaagtttggataaatatatctatatacaacccaaattatcatcatctgagctccctttttaatcttctgtaacagttggtcatgcttgtcagattttttccttttgactggaagtgctttagtgttgacagataatgcaaacttaaaacctttgctgcctgtttcccctacttctctccaagtacctggac

SEQ ID NO: 938 - protein, 312 aa, Homo sapiens
MPSINDTHFYPPFFLLLGIPGLDTLHIWISFPFCIVYLIAIVGNMTILFVIKTEHSLHQPMFYFLAMLSMIDLGLSTSTIPKMLGIFWFNLQEISFGGCLLQMFFIHMFTGMETVLLVVMAYDRFVAICNPLQYTMILTNKTISILASVVVGRNLVLVTPFVFLILRLPFCGHNIVPHTYCEHRGLAGLACAPIKINIIYGLMVISYIIVDVILIASSYVLILRAVFRLPSQDVRLKAFNTCGSHVCVMLCFYTPAFFSFMTHRFGQNIPHYIHILLANLYVVVPPALNPVIYGVRTKQIREQIVKIFVQKE

SEQ ID NO: 939 - DNA, 1348 bp, Homo sapiens
  source (1)..(1348)
  CDS (201)..(1148)
aaagtgataggaataccccagtgacatgacactgaggaaaaacagatgaattcgcttggctctacataacctgctagaaaccacaagttgtacctatgacaaacaaattgtgctatctttgtgtatcaagaatccacagctagtttgtaatcataattttccagatcactgaaagaaagcagtaaaatatatgggaaaatatgacaacacaccgaaatgacaccctctccactgaagcttcagacttcctcttgaattgttttgtcagatcccccagctggcagcactggctgtccctgcccctcagcctccttttcctcttggccgtaggggccaacaccaccctcctgatgaccatctggctggaggcctctctgcaccagcccctgtactacctgctcagcctcctctccctgctggacatcgtgctctgcctcactgtcatccccaaggtcctgaccatcttctggtttgacctcaggcccatcagcttccctgcctgcttcctccagatgtacatcatgaattgtttcctagccatggagtcttgcacattcatggtcatggcctatgatcgttatgtagccatctgccacccactgagatatccatcaatcatcactgatcactttgtagtcaaggctgccatgtttattttgaccagaaatgtgcttatgactctgcccatccccatcctttcagcacaactccgttattgtggaagaaatgtcattgagaactgcatctgtgccaatatgtctgtttccagactctcctgcgatgatgtcaccatcaatcacctttaccaatttgctggaggctggactctgctaggatctgacctcatccttatcttcctctcctacaccttcattctgcgagctgtgctgagactcaaggcagagggtgccgtggcaaaggccctaagcacatgtggctcccacttcatgctcatcctcttcttcagcaccatccttctggtttttgtcctcacacatgtggctaagaagaaagtctcccctgatgtgccagtcttgctcaatgttctccaccatgtcattcctgcagcccttaaccccatcatttacggggtgagaacccaagaaattaagcagggaatgcagaggttgttgaagaaagggtgctaacaaggaccactggatctctgaatatctaaaataagataatttattaatcacttaatgagtgagtgggctgaaattcatatctgtgacttataacctcaaactgggtacactagatattgtgtgtgcttttcaaaaacatcggttttaatttaagtctatcttccttttcacccttttctcagaaatattcttggccctct

SEQ ID NO: 940 - protein, 315 aa, Homo sapiens
MTTHRNDTLSTEASDFLLNCFVRSPSWQHWLSLPLSLLFLLAVGANTTLLMTIWLEASLHQPLYYLLSLLSLLDIVLCLTVIPKVLTIFWFDLRPISFPACFLQMYIMNCFLAMESCTFMVMAYDRYVAICHPLRYPSIITDHFVVKAAMFILTRNVLMTLPIPILSAQLRYCGRNVIENCICANMSVSRLSCDDVTINHLYQFAGGWTLLGSDLILIFLSYTFILRAVLRLKAEGAVAKALSTCGSHFMLILFFSTILLVFVLTHVAKKKVSPDVPVLLNVLHHVIPAALNPIIYGVRTQEIKQGMQRLLKKGC

SEQ ID NO: 941 - DNA, 1363 bp, Homo sapiens
  source (1)..(1363)
  CDS (201)..(1163)
aggcacacacccagacagtgtatatatcacatattaaacataatagaacaaatatagtcattgatctacaaggaaaacaaaatagccattatgggaaagaagactgatggtcagtcactccttgaaattactcttttttttatttcctgctcacagaggcaatgctataactgctatacaatgaacttccaacagtcattatgtcatttctaaatggcaccagcctaactccagcttcattcatcctaaatggcatccctggtttggaagatgtgcatttgtggatctccttcccactgtgtaccatgtacagcattgctattacagggaacttcggccttatgtacctcatctactgtgatgaggccttacacagacctatgtatgtcttccttgcccttctttccttcacagatgtgctcatgtgcaccagcacccttcccaacactctcttcatattgtggtttaatctcaaggagattgattttaaagcctgcctcgcccagatgttctttgtgcacaccttcacagggatggagtctggggtgctcatgctcatggccctggaccactgtgtggccatctgcttccctctgcgttatgccaccatcctcactaattcagtcattgctaaagctgggttcctcacttttcttaggggtgtgatgcttgttatcccttccactttcctcaccaagcgccttccatactgcaagggcaacgtcataccccacacctactgtgaccacatgtctgtggccaagatatcttgtggtaatgtcagggttaacgccatctatggtttgatagttgccctgctgattgggggctttgatatcctgtgcattacaatctcctacactatgattcttcaagcagttgtgagtctatcatcagcagatgctcgacagaaggccttcagcacctgcactgcccacttctgtgccatagtcctcacctatgttccagccttctttaccttctttacacaccattttgggggacacaccattcctctacacatacatattattatggctaatctctacctactaatgcctcccacaatgaaccctattgtgtatggggtgaaaaccaggcaggtacgagaaagtgtcattaggttctttcttaagggaaaggacaattctcataacttttaaagtcttctgagatgttagaattttcttagccaggttgagatcaccaagtcaatagggagctctttaaatgacaccagaaatctggccacaggaatatttttatgatactcggattactctacatctttggaaagggtaccatcatgttcaaataggtaaataccctctcttatgttattccatgttctttaaagcctttt

SEQ ID NO: 942 - protein, 320 aa, Homo sapiens
MSFLNGTSLTPASFILNGIPGLEDVHLWISFPLCTMYSIAITGNFGLMYLIYCDEALHRPMYVFLALLSFTDVLMCTSTLPNTLFILWFNLKEIDFKACLAQMFFVHTFTGMESGVLMLMALDHCVAICFPLRYATILTNSVIAKAGFLTFLRGVMLVIPSTFLTKRLPYCKGNVIPHTYCDHMSVAKISCGNVRVNAIYGLIVALLIGGFDILCITISYTMILQAVVSLSSADARQKAFSTCTAHFCAIVLTYVPAFFTFFTHHFGGHTIPLHIHIIMANLYLLMPPTMNPIVYGVKTRQVRESVIRFFLKGKDNSHNF

SEQ ID NO: 943 - DNA, 1342 bp, Homo sapiens
  source (1)..(1342)
  CDS (201)..(1142)
  modified_base (190): a, t, c, g, unknown or other
ttgtggctggcatatgatacatacttggttaaatataagggaggatgatgacagtgattttaaaaactttattgggacagatacagggcctcagtggaaacccacactctactacgtctagaatgtactttttatgtttctgtacttctctactaggttttaaggtacactgggtctccagattgatcangaaactttacatggcatctcccaacaatgactccactgccccagtctctgaattcctcctcatctgcttccccaacttccagagctggcagcactggttgtctctgcccctcagccttctcttcctcctggccatgggagctaacaccaccctcctgatcaccatccagctggaggcctctctgcaccagcccctgtactacctgctcagcctcctctccctgctggacatcgtgctctgcctcaccgtcatccccaaggtcctggccatcttctggtttgacctcaggtcgatcagcttcccagcctgcttcctccagatgttcatcatgaacagttttttgaccatggagtcctgcacgttcatggtcatggcctatgaccgttatgtggccatctgccatccattgagatacccgtctatcatcactgaccagtttgtggctagggccgtggtctttgttatagcccggaatgcctttgtttctcttcctgttcccatgctttctgccaggctcagatactgtgcaggaaacataatcaagaactgcatctgcagtaacctgtctgtgtccaaactctcttgtgatgacatcactttcaatcagctctaccagtttgtggcaggctggactctgttgggctctgatcttatccttattgttatctcctattcttttatattgaaagttgtgcttaggatcaaggccgagggtgctgtggccaaggccttgagcacgtgtggttcccacttcatcctcatcctcttcttcagcacagtcctgctggttctggtcatcactaacctggccaggaagagaattcctccagatgtccccatcctgctcaacatcctgcaccacctcattcccccagctctgaaccccattgtttatggtgtgagaaccaaggagatcaagcagggaatccaaaacctgctgaagaggttgtaagaataaaaaggattagatccacctttagagttgttaattgttagtgaaaattgggaaatagggaattaattttatgttggaaaggaaatttcactttaaatcctgcctgagttcggattcttctgttctcaatatctcaggcaacaatgaacacatttatttgtgaatctttgttttctgttgcttgaaaggaaacctcc

SEQ ID NO: 944 - protein, 313 aa, Homo sapiens
MASPNNDSTAPVSEFLLICFPNFQSWQHWLSLPLSLLFLLAMGANTTLLITIQLEASLHQPLYYLLSLLSLLDIVLCLTVIPKVLAIFWFDLRSISFPACFLQMFIMNSFLTMESCTFMVMAYDRYVAICHPLRYPSIITDQFVARAVVFVIARNAFVSLPVPMLSARLRYCAGNIIKNCICSNLSVSKLSCDDITFNQLYQFVAGWTLLGSDLILIVISYSFILKVVLRIKAEGAVAKALSTCGSHFILILFFSTVLLVLVITNLARKRIPPDVPILLNILHHLIPPALNPIVYGVRTKEIKQGIQNLLKRL

SEQ ID NO: 945 - DNA, 1390 bp, Homo sapiens
  source (1)..(1390)
  CDS (201)..(1190)
  modified_base (1)..(26): a, t, c, g, unknown or other
nnnnnnnnnnnnnnnnnnnnnnnnnnttaattcagacatgtggatgtctcacttgtaaaagaattatctccaccaaaggagattttcttccctgtagctaactttattcccttcgtttgcagttgaagtcactttattcttctcaggatgatggttgccccatttggacaatgtgataatgtagcaggaatgcagaaatcatgactttggtttcttttttctctttcctctccaagccattgataatgctccttagcaattcaagctggaggctatcccagccttcttttctcctggtagggattccaggtttagaggaaagccagcactggattgcactgcccctgggcatcctttacctccttgctttagtgggcaatgttaccattctcttcatcatctggatggacccatccttgcaccaatctatgtacctcttcctgtccatgctagctgccatcgacctggttctggcctcctccactgcacccaaagcccttgcagtgctcctggttcatgcccacgagattgggtacatcgtctgcctgatccagatgttcttcatccatgcattctcctccatggagtcaggggtacttgtggccatggctctggatcgctatgtagccatttgtcaccccttgcaccattccacaatcctgcatccaggggtcatagggcgcatcggaatggtggtgctggtgaggggattactactccttatccccttccccattttgttgggaacacttatcttctgccaagccaccatcataggccatgcctattgtgaacatatggctgttgtgaaacttgcctgctcagaaaccacagtcaatcgagcttatgggctgactatggccttgcttgtgattgggctggatgttctggccattggtgtttcctatgcccacatcctccaggcagtgctgaaggtaccagggagtgaggcccgacttaaggcgtttagcacatgtggctctcatatttgtgtcatcctggtcttctatgtccctggaattttctccttcctcactcaccgctttggtcatcatgtaccccatcatgtccatgttcttctggccacacggtatctcctcatgccacctgcgctcaatcctcttgtctatggagtgaagactcagcagatccgccagcgagtgctcagagtgtttacacaaaaggattgatctgaacatattctcattgtttccttcggaggcttcttctgcggaccacagccaggagcctgtgactggtgtagattacatgaatacagaccattttgcagtgagtattccttctagtcttactagtgccatgctaaagaacacccacagatacttggcttattgggatgtacctggatatctggatttgtgaatatttt

SEQ ID NO: 946 - protein, 329 aa, Homo sapiens
MTLVSFFSFLSKPLIMLLSNSSWRLSQPSFLLVGIPGLEESQHWIALPLGILYLLALVGNVTILFIIWMDPSLHQSMYLFLSMLAAIDLVLASSTAPKALAVLLVHAHEIGYIVCLIQMFFIHAFSSMESGVLVAMALDRYVAICHPLHHSTILHPGVIGRIGMVVLVRGLLLLIPFPILLGTLIFCQATIIGHAYCEHMAVVKLACSETTVNRAYGLTMALLVIGLDVLAIGVSYAHILQAVLKVPGSEARLKAFSTCGSHICVILVFYVPGIFSFLTHRFGHHVPHHVHVLLATRYLLMPPALNPLVYGVKTQQIRQRVLRVFTQKD

SEQ ID NO: 947 - DNA, 1360 bp, Homo sapiens
  source (1)..(1360)
  CDS (201)..(1160)
atctctaaaaaaactagacctattctaattcagacatgtggatgtctcacctgtaaaaaaatttatctccaccaaagattttctttcttgtatctaactttattccctttggttgcagttttagtcactttattcttctcatgaagatggtagacaatgtgatctggactatgtgataatgtaccagaaatgcagaaatcatgaatttggattcttttttctctttcctcctcaagtcattgataatggcacttagcaattccagctggaggctaccccagccttcttttttcctggtaggaattccgggtttagaggaaagccagcactggatcgcactgcccctgggcatcctttacctccttgctctagtgggcaatgttaccattctcttcatcatctggatggacccatccttgcaccaatctatgtacctcttcctgtccatgctagctgccatcgacctggttgtggcctcctccactgcacccaaagcccttgcagtgctcctggttcgtgcccaagagattggttacactgtctgcctgatccagatgttcttcacccatgcattctcctccatggagtcaggggtacttgtggccatggctctggatcgctatgtagccatttgtcaccccttgcaccattccacaatcctgcatccaggggtcatagggcacatcggaatggtggtgctggtgcggggattactactcctcatccccttcctcattctgttgcgaaaacttatcttctgccaagccaccatcataggccatgcctattgtgaacatatggctgttgtgaaacttgcctgctcagaaaccacagtcaatcgagcttatgggctgactgtggccttgcttgtggttgggctggatgtcctggccattggtgtttcctatgcccacattctccaggcagtgctgaaggtaccaggaaatgaggcccgacttaaggcctttagcacatgtggctctcatgtttgtgtcatcctggtcttctatatcccgggaatgttctccttcctcactcaccgctttggtcatcatgtaccccatcacgtccatgttcttctggccatactgtatcgccttgtgccacctgcactcaatcctcttgtctatagggtgaagacccagaagatccaccagtgagtgctcagggtgtttacactaaaggattgacctgaatatattctcactgtttccttcagaggcacctgccaggacatagccaggaactcatggctggtgcagattatatggatggggtaattttcacagcgagcagtccttctagtgtcacttatatcacagcaaagaatatccagaggcacctggcttcacagcttatt

SEQ ID NO: 948 - protein, 319 aa, Homo sapiens
MNLDSFFSFLLKSLIMALSNSSWRLPQPSFFLVGIPGLEESQHWIALPLGILYLLALVGNVTILFIIWMDPSLHQSMYLFLSMLAAIDLVVASSTAPKALAVLLVRAQEIGYTVCLIQMFFTHAFSSMESGVLVAMALDRYVAICHPLHHSTILHPGVIGHIGMVVLVRGLLLLIPFLILLRKLIFCQATIIGHAYCEHMAVVKLACSETTVNRAYGLTVALLVVGLDVLAIGVSYAHILQAVLKVPGNEARLKAFSTCGSHVCVILVFYIPGMFSFLTHRFGHHVPHHVHVLLAILYRLVPPALNPLVYRVKTQKIHQ

SEQ ID NO: 949 - DNA, 1345 bp, Homo sapiens
  source (1)..(1345)
  CDS (201)..(1145)
ccattatttatcaagtctcacaattctacctttagaatattggctgaaatttgccttacttggcaaaagtgaactacctatcattggcttcctaaagagtaagtgaaagggatacttttcaaagcaatttgtaaaaataacctcttgtatctgcccataaacatagtcatcagaagcctactcagctcatgattcagcctatggcgtcacccagcaacagctccactgtcccagtctctgaattcctcctcacctgcttccccaacttccagagttggcagcactggctctccctgcccctcagccttctcttcctcctggccatgggagctaacaccaccctcctgatcaccatccagctggaggcctctctgcaccagcccctgtactacctgctcagcctcctctccctgctggacatcgtgctctgcctcaccgtcatccccaaggtcctggccatcttctggtatgatcttaggtcgatcagcttccctgcctgcttcctccagatgttcatcatgaacagtttcctccccatggagtcctgcacgtttatggtcatggcctatgaccgttatgtggccatctgccacccactgcggtacccatccatcatcactaatcaatttgtggccaaagctagtgtcttcattgtggtgcggaatgcgcttcttactgcacccattcctatcctcacttccctgctccattactgtggggaaaatgtcattgagaactgcatctgtgccaacttgtctgtgtccaggctctcctgtgataatttcacccttaacagaatctaccaatttgtggctggttggaccttgctgggctcagatttattcctcatcttcctctcttacaccttcattctaagagctgtgcttagattcaaagcagagggggcggcagtgaaggccctgagcacatgtggctcccacttcatcctcattcttttcttcagcaccatactgctggttgtggtgttgacaaacgtggccagaaagaaggtccccatggacatcctgatcctgctgaacgtccttcatcaccttattcctcctgcgttgaaccctattgtgtatggggttcggaccaaagagataaaacagggaattcagaagttactgcagagagggaggtgaatatgtaaagcatttctaatacctcctgttcttcctcttcagtgattttacctaggcagcgaagtagagaaatgtcagttagtgagtgtttattgcatgcactgaggctcccttcattactgaaccagattccttcctttactttccttgcctagttcaggtggaggtaggcaaggggaagaaactcgtatttattgagt

SEQ ID NO: 950 - protein, 314 aa, Homo sapiens
MASPSNSSTVPVSEFLLTCFPNFQSWQHWLSLPLSLLFLLAMGANTTLLITIQLEASLHQPLYYLLSLLSLLDIVLCLTVIPKVLAIFWYDLRSISFPACFLQMFIMNSFLPMESCTFMVMAYDRYVAICHPLRYPSIITNQFVAKASVFIVVRNALLTAPIPILTSLLHYCGENVIENCICANLSVSRLSCDNFTLNRIYQFVAGWTLLGSDLFLIFLSYTFILRAVLRFKAEGAAVKALSTCGSHFILILFFSTILLVVVLTNVARKKVPMDILILLNVLHHLIPPALNPIVYGVRTKEIKQGIQKLLQRGR

SEQ ID NO: 951 - DNA, 976 bp, Homo sapiens
  source (1)..(976)
  CDS (201)..(776)
ttgactcccaacttcacacacccatgtatttttttctctgcaacttgtctctggctgacctctgtttctctaccaacatagttcctcaggcactagtccacctgctttccagaaagaaggtcattgcattcacactttgcgcagctcgacttctctttttcctcatttttgggtgtacccagtgcgcccttcttgcagtgatgtcctatgatcgctatgttgcaatctgcaatcctctgcgttaccctaacatcatgacctggaaagtgtgtgtccagctggcaacaggatcatggaccagtggcattctggtgtctgtggtagacaccaccttcatactgaggctaccctaccgaggcagtaacagcattgctcatttcttttgtgaggcccctgcactattgatcttagcatccacagacacccatgcatcagagatggccatttttcttatgggggttgtgattctcctcatacctgtttttctgattctggtatcctatggccgtatcatagtaactgtggtcaagatgaagtcaactgtggggagtctcaaggcattttctacctgtggctcccacctcatggtggtcatacttttttatggatcagcaattatcacttacatgacacccaagtcttccaaacagcaggaaaaatcggtgtctgttttctatgcaatagtgactcccatgcttaatcccctcatctatagcctgagaaacaaggatgtgaaggcagctctgaggaaagtagccacaaggaatttcccatgaaggcttggaatctcacactgacagtgagctcagagaaccttttggcttcctacttcaaagacttgctgggaagacatggaatcaacccaggtggattggatttttaaaaatgtacattggcacacttggtttctcaagtcacctgcttggcccccttccaagttgtactttccttctttttcctcctttccttttccttc

SEQ ID NO: 952 - protein, 191 aa, Homo sapiens
MSYDRYVAICNPLRYPNIMTWKVCVQLATGSWTSGILVSVVDTTFILRLPYRGSNSIAHFFCEAPALLILASTDTHASEMAIFLMGVVILLIPVFLILVSYGRIIVTVVKMKSTVGSLKAFSTCGSHLMVVILFYGSAIITYMTPKSSKQQEKSVSVFYAIVTPMLNPLIYSLRNKDVKAALRKVATRNFP

SEQ ID NO: 953 - DNA, 1330 bp, Homo sapiens
  source (1)..(1330)
  CDS (201)..(615)
  CDS (832)..(1130)
gattacaactctgtagataatgcattaaagattgttaccaagcctatgctttagatctatagaattttaaagtacaattgttgctataattacataatgcatatagtatttatatatttctaaatctctttttttgtttatcactctattgctttatttctcattgctacaggtcatcttaagtttctcagataatactgatggagaattgtacggaagtgacaaagttcattcttctaggactaaccagtgtcccagaactacagatccccctctttatcttgttcaccttcatctacctcctcactctgtgtgggaacctggggatgatgttgctgatcctgatggactcttgtctccacacccccatgtactttttcctcagtaacctgtctctggtggactttggatactcctcagctgtcactcccaaggtcatggctgggttccttagaggagacaaggtcatctcctacaatgcatgtgctgttcagatgttcttctttgtagccttggccacggtggaaaattacttgttggcctcaatggcctatgaccgctatgcagcagtgtgcaaacccctacactacaccaccaccatgacggccagtgtaggtgcctgtctggccctaggctcatatgtctgtggcttcctaaatgcctcattccacattgggggcatattcagtctctctttctgtaaatccaatctggtacatcactttttctgtgatgttccagcagtcatggctctgtcttgctctgataaacacactagtgaggtgattctggtttttatgtcaagctttaatatcttttttgttcttctagttatctttatctcctacttgttcatattcatcaccatcttgaagatgcattcagctaagggacaccaaaaagcattgtccacctgtgcctctcacttcactgcagtctccgtcttctatgggacagtaatcttcatctacttgcagcccagctccagccactccatggacacagacaaaatggcatctgtgttctatgctatgatcatccccatgctgaaccctgtggtctacagcctgaggaacagagaagtccagaatgcattcaagaaagtgttgagaaggcaaaaatttctataagtttggaattttaacattgttgtatacacaaaaatgttgtttccctcatctcagactttcctcatgcaatgagttacatttgaaaccccacaatacatttaagttcatgaggtgatattcttacctctttagaagtcaattttttaataaaaataaaatattatcagaaatgtaatacctgaatgaggaaggctaaatgg

SEQ ID NO: 954 - protein, 237 aa, Homo sapiens
MENCTEVTKFILLGLTSVPELQIPLFILFTFIYLLTLCGNLGMMLLILMDSCLHTPMYFFLSNLSLVDFGYSSAVTPKVMAGFLRGDKVISYNACAVQMFFFVALATVENYLLASMAYDRYAAVCKPLHYTTTMTASVVIFISYLFIFITILKMHSAKGHQKALSTCASHFTAVSVFYGTVIFIYLQPSSSHSMDTDKMASVFYAMIIPMLNPVVYSLRNREVQNAFKKVLRRQKFL

SEQ ID NO: 955 - DNA, 1325 bp, Homo sapiens
  source (1)..(1325)
  CDS (201)..(778)
  CDS (948)..(1125)
aaggtatgtatgaagtttcaatagctgctttaaaaatgagttagcacgtggctcatagcaggtgttcaattcttaccagttcctctccctctttccctaacactgtctatcctggggatatttaaaaatctctgggcactgaccctaactctagggtacacacgtgtcttatttggtctctctgcagtgacatgcacaccatggtggagaaccacacccaagtcacctggttccgcctgctgggacttacagagcaggaggagctcagaggcatcctctttgtgctcttcctgctcatgcattcagtcactgttatgggcaacctgggaatgatcactctgatccatgcagacccacagctccacacccccatgtatttcttcctgagcgtcctatccttgatagactcctcgttttccacagtggacatccccaggctgctggagagcttcctcatctcaagccaatccatctcctttgcaggctgtatggtccagatggccctcatgatcctccatggtactgctgagtgtctgctcctggccatcatggcctatgaccgattcaccgccatctgccaccctctcctctatcacactattatatcccaatgtctgtgtgccctgctggtggtgacctgctatactgtttctgttgccaattcagctttgctgactgggtgcatctttaagctgccctactgtggccccaatgtcattaaccactatttctgtgacatcccccctgtgctccaacttgccggtgcagatactacgaggttgagaccattatcttctcattgtgtgccttgctcatcctctttaccatcaccattatcccagtctcctatgcctacatcctcgtgaccatttgcaggatgcgctccctgcaagcccagagcaaagctctctccacccccacctcaccatcatctgcctcttctatagcaccatcaccttcatgtatgctcagccaagctctcacaattccatggaacacaacaaggtcatgtctgtcttctacactgtggtcatccgcaggctgaaccctctgatctacagcctgaggaataaagatgtaaaatatgctttgaagaggagatgcctgtgcaagctgtcttcataatcaagtgtggaacattgagcatcctatcccaagctgtaacatggtagccacaatataaagtatggataatattaacccttagatagagcaaagtatgtgccagcactagtttaaacacttgacacattatcaacccatttaatcttcacaagtgtatgaaatgggcactattattatcccttaggaatctggggcacaga

SEQ ID NO: 956 - protein, 251 aa, Homo sapiens
MVENHTQVTWFRLLGLTEQEELRGILFVLFLLMHSVTVMGNLGMITLIHADPQLHTPMYFFLSVLSLIDSSFSTVDIPRLLESFLISSQSISFAGCMVQMALMILHGTAECLLLAIMAYDRFTAICHPLLYHTIISQCLCALLVVTCYTVSVANSALLTGCIFKLPYCGPNVINHYFCDIPPVLQLAGADTTSTITFMYAQPSSHNSMEHNKVMSVFYTVVIRRLNPLIYSLRNKDVKYALKRRCLCKLSS

SEQ ID NO: 957 - DNA, 4080 bp, Homo sapiens
  source (1)..(4080)
  CDS (201)..(249)
  CDS (2892)..(3880)
atctatgattagcgacccaaggaagaaagggtgggcttgagagggtgagagggagagctaaggggcagcgcagagtagtggaaagagctcagatgctagagtcagttgggtccttggttcttaaaggcatcatcctcagagccattgctcagggacggccacgaggctgaagatcccctgtgcgaccacaaggtggcagcatgaagaagcgagagtccctgacacagcttcgatccccttgggtagttagtgtgttcggagcgctggtatccctgcgtgctttctgctgagtgcccacccctccattccagcaggtcctctcttccagccccgttattcctcttctcctttccaccccgcgacacagcctccctctagtctcttgagctgggctcagagggatagtgatagagctcagtccctttgggtaggagtcagggctcagctttccttgggcgtctgagcagagcgtcagtgccagggagacccgactcgttcactctccatcactctacacactcctgaggggccccagagaagctataattgggcggcctccatgcgctggggaagcactggtggtgagtgtagcaggctcagcccagggaggttaggcaacgggagggtccgcagagacaggcacagaaggctcattgcataaggaagccgggacttgatcagtcagcttggctgcttggagaggtcttctagtgtacaccttttccagatcacagtagcccggttcctggaccttgttcctacacagaggaatttcttcaagcctgtgagacccgttccaagctttgcctatcctttgtcccaggacaggactcctcagttcctgcctcctactcttcacttaagcaaggcaaggggaattactttaccaggaaaaaaatgtgtgtgagtgtgtacgtgtgtgtgtatgtgcacgtgtgtgttgtggtggtgctggtggtgattggtgatgaagaaggaaactgaagctgggctggaaagttgagttagaggaacactgtgaagggccttgtctgcatactgtggagttactagttctcactttatctggaaagctatgggaatcactcctaacttgctcagcaggagccccaggtgtccagttttgctgtttagatggcagtggtgtggaaggtggtttggaatagactaggtttggaggcagggaggtaagttggaaggctctttttataatcagggcagagtggataatataattaagttgggaggaggtgtattaagaggaacggccccaataattaattggaaaagttgaattgcatgtgggggtgaaagaggagacgggtcaagatgagaccagctgccctgacttgggtgatgtgggttctgagcagtggcattctctgagatcaggaacaggtttggaaggggtccctgttagaggcaagatgagtgggaggcccataggctatccaggtagaactatcaaggaggcggtaggttatatggctgaatctcaggacacaggcttagaacagtgtggtctgtagagagaaagaagttgagcctgggacgttgtgtgatcaccagggagagtaggtggagggagaggtgtgtgtgcctgtgaacactgtggagtaacagcagcagcactggctgattttctgttcatgtctcagctgcatctgatttccatgacatgctcctcttgctgagcgcaacctgggactgactctcacctggggcttgagagatcttgatggcagatgctgcttattgttcgtttgggagctggaaatggaaatgatagtccctcttcattcacctccctgcccccaagaacaccagaacaactttccccaaagttctctgatttaaagcacaaatttcctaggggaaaggggcttatcgttttttgtttgtttatttgttttgttttgtttttgagttggtgtctcgctgtgtcacccaggctggaatgcagtgggggtgatctcgtctcactgcagcctctgccgcccaggttcaaatgattctcctgcctcagcctcctgagtagctgggattacaggtgcgctccaccaagcctggctaacttttgcatttttaatagaggcagggtttcaccatgttggcctggctggtctcgaacccctgaccttgcgatctgcccacctcggcctcccaaagtgctgggattacaggcgtgagccactgtacctggcggggcttattgttttttaaaaagatttccaaaaccttgccctggcaattctgattttctgggcctggagcaggacctggagggatggtgttgtcaattactttagatgtttctatcaggaaagtttgagaaatggtattcaggcctaaacacaaacctctcttgaaatctcatcccagactgagcccctgctccctatcttaaattagattatagtaggtcttaaagtcagctgtagactgagcctctaaatctgaacccagacccaccctaaccccaggatacatcagaagagctggtcaatgtggaccattctgagcaatcctgcaagtctactctgatgggaaaaggctaagagcagtgccctgggcagcaacatcagctctgaagatgcaggactgtgttacatgttttatgagtgggtcttcacacactgagattcatgggacagtaatagaatctgcttgtgcagcactggggccttggagggtcagggtaaggctcaagatgtccaggaagttgtatataaggagaatcagagcagagagagactagggttcagaattaccaggatgacttagtcctgtttgttactgtcaccactccaatgccttttcctcattagtcctttctctcctctgagccacaactaaatgatgtttctacttttccctttctactttcctagaccctggattttgtatgcagaagccccagctcttggtccctatcatagccacttcaaatggaaatctggtccacgcagcatacttccttttggtgggtatccctggcctggggcctaccatacacttttggctggctttcccactgtgttttatgtatgccttggccaccctgggtaacctgaccattgtcctcatcattcgtgtggagaggcgactgcatgagcccatgtacctcttcctggccatgctttccactattgacctagtcctctcctctatcaccatgcccaagatggccagtcttttcctgatgggcatccaggagatcgagttcaacatttgcctggcccagatgttccttatccatgctctgtcagccgtggagtcagctgtcctgctggccatggcttttgaccgctttgtggccatttgccacccattgcgccatgcttctgtgctgacagggtgtactgtggccaagattggactatctgccctgaccagggggtttgtattcttcttcccactgcccttcatcctcaagtggttgtcctactgccaaacacatactgtcacacactccttctgtctgcaccaagatattatgaagctgtcctgtactgacaccagggtcaatgtggtttatggactcttcatcatcctctcagtcatgggtgtggactctctcttcattggcttctcatatatcctcatcctgtgggctgttttggagctgtcctctcggagggcagcactcaaggctttcaacacctgcatctcccacctctgtgctgttctggtcttctatgtacccctcattgggctctcggtggtgcataggctgggtggtcccacctccctcctccatgtggttatggctaatacctacttgctgctaccacctgtagtcaacccccttgtctatggagccaagaccaaagagatctgttcaagggtcctctgtatgttctcacaaggtggcaagtgagacaccttagtgtctcgcttctactactactacagaagatgggaatattaggatcctattgaatgccttggtgattaaagtatcaaacctattgtgctgtcttcttccagcaatttaagtagatcatgtattctgtctccaggaatgtgtcagtactgaacttatgaccctgtctggacatcctggagaatgactgcact

SEQ ID NO: 958 - protein, 345 aa, Homo sapiens
MKKRESLTQLRSPWVVNPGFCMQKPQLLVPIIATSNGNLVHAAYFLLVGIPGLGPTIHFWLAFPLCFMYALATLGNLTIVLIIRVERRLHEPMYLFLAMLSTIDLVLSSITMPKMASLFLMGIQEIEFNICLAQMFLIHALSAVESAVLLAMAFDRFVAICHPLRHASVLTGCTVAKIGLSALTRGFVFFFPLPFILKWLSYCQTHTVTHSFCLHQDIMKLSCTDTRVNVVYGLFIILSVMGVDSLFIGFSYILILWAVLELSSRRAALKAFNTCISHLCAVLVFYVPLIGLSVVHRLGGPTSLLHVVMANTYLLLPPVVNPLVYGAKTKEICSRVLCMFSQGGK

SEQ ID NO: 959 - DNA, 1242 bp, Homo sapiens
  source (1)..(1242)
  CDS (201)..(499)
  CDS (526)..(1042)
catagcataatgatgaatcccagttgcttcatctctcagggattcctaggactcagagcaaggcagtgaggtcttctctaaccaccttacttggccatgaaactcataaaccataccatcagaacccaacctcctttctgctcatgggaattccaggcccggaggcatcccacttttggattgcttttcccttctgctccatgtatgccctggcagtgctgggaaacatggtggtgctgctagtggtacattcagagcctgtattgcaccagcccatgtacctgttcctctgcatgctatccaccattgacctggtcctctgcacctccactgtgcccaagctccttgcacttttttgggcaaaggatgctgagatcaactttggggcctgtgctgcccagatgttctttatccatggcttctcagctgtagaatctggtatactgctagcaatggcctttgaccgctacttagccatttgctggcctctgcactatgggtcattgctctccccagagtctgtaggcaagctgggggctgcagcgtgcttcgtggtttgggactcatgaccccactcacctgcttactggcaagactgagctactgcagtcgagtggtggcccactcctactgtgaacacatggctgtggtaaagctggcttgtggaggaacacagccaaacaacatctatggcatcactgctgccacactggtggtgggcactgactccatctgtattgctgtctcctatgcactcatcctccgagctgtgttaggtctttcctccaaggaggcaagggctaagacctttggcacttgtggctcccacctgggtgtcatacttctcttctacacaccaggactcttctccttctacacacagcggtttggccagcacgtgccccggcacatccacatccttctagctgacctctacctggttgtgccacccatgctcaaccccatcatctatggcatgaagaccaaacagatctgggatggggccctccggcttctgaagtggggccctgctcagtcataaagtcttcaaccccaccctgaaacctttatcttctttgcccctcagccctcgggggactggtggctcccaacatgataggacacagaaactcatgctcaatggtacccgtacttcgataaggagcaacagcaaagtcagatggtggaagatctgtcaggtgtttacttatgttgtagatatggttacaaagctcagggagc

SEQ ID NO: 960 - protein, 271 aa, Homo sapiens
MYALAVLGNMVVLLVVHSEPVLHQPMYLFLCMLSTIDLVLCTSTVPKLLALFWAKDAEINFGACAAQMFFIHGFSAVESGILLAMAFDRYLAICWPLHYGQAGGCSVLRGLGLMTPLTCLLARLSYCSRVVAHSYCEHMAVVKLACGGTQPNNIYGITAATLVVGTDSICIAVSYALILRAVLGLSSKEARAKTFGTCGSHLGVILLFYTPGLFSFYTQRFGQHVPRHIHILLADLYLVVPPMLNPIIYGMKTKQIWDGALRLLKWGPAQS

SEQ ID NO: 961 - DNA, 1350 bp, Homo sapiens
  source (1)..(1350)
  CDS (201)..(382)
  CDS (478)..(1150)
  modified_base (1)..(72): a, t, c, g, unknown or other
nnnnnnnnnnnnnnnnnnnnnnnnnnnnnnnnnnnnnnnnnnnnnnnnnnnnnnnnnnnnnnnnnnnnnnnngggcgggccggggcatatcccagcttcaacttgccaggttggccgctaaggcagaagatcgaacgggttcagactaactgcagttcttttcaaatggcaggcgaagactgatctctgctgatggtggcatgggagctgaaagcaatgaaagtcttgacctcctatctgtcttcctgactggcatcccaggactggaggcccaacatggttggctctccatccctttcttcaccatgtacattgtggccattgtgggaaacatcctaattatggcagcagtgcaggaagactctgccctacatgagcccatgtacttatttctctccatgttggctgtcactgaggtgggcgtctctgtgtctacactgctactgttacaggcattctttggtttgatgcccacagagttgactttgatggctgcctggcccagatgttcttcattcacaccttctcctgcatggagtcaggggtcctactagccatgagctatgaccgctttgtagccatctacaacctcctgcgctatacagccatcctgaccctgccccgtattatctgcatgggtctgggcattacactgaagagtgtggcactcatggccccacttccaatccttttgaggcaactgccctattgccacactaatgtcctctcacactcctactgcctccactcagatctgatccagctgccttgtgcagatactaaactcaacagcatcctgggcttagccattgttctcgcaaatttcgggctggactcattgcttatcgtggtctcttatgtcttgattctttatacagtgatgggcattgcttctggagagggacggtggaaggctctcaacacatgtgtgtcacatatttgtgcagtgcttatatattatgtgcccatgattggggtgtctgtgatgcatcgtgctgccaaacatgcttctcccattgtccacacacttatgtctagcatctgccttttggtgccacctgtacttaatcccatcatctatagtgttaagacccagacaataagacagggaattctcaccttgttttcctgcaagagggaattgctctgaatcactgcaaggagtcaggaactgtcattaaattcataaattccgataatgtttctgctatgggcaaagctctacattaggcattttgaggaggaataggaacaaggaattcaaagtattgcaacaggcttgaatctgaaatgcaagagttattcctaaccctttccatctcacattttatttgtgtatgtgtgtctctg

SEQ ID NO: 962 - protein, 284 aa, Homo sapiens
MGAESNESLDLLSVFLTGIPGLEAQHGWLSIPFFTMYIVAIVGNILIMAAVQEDSALHEPIVDFDGCLAQMFFIHTFSCMESGVLLAMSYDRFVAIYNLLRYTAILTLPRIICMGLGITLKSVALMAPLPILLRQLPYCHTNVLSHSYCLHSDLIQLPCADTKLNSILGLAIVLANFGLDSLLIVVSYVLILYTVMGIASGEGRWKALNTCVSHICAVLIYYVPMIGVSVMHRAAKHASPIVHTLMSSICLLVPPVLNPIIYSVKTQTIRQGILTLFSCKRELL

SEQ ID NO: 963 - DNA, 6455 bp, Homo sapiens
  source (1)..(6455)
  CDS (201)..(575)
  CDS (5336)..(5839)
  CDS (5872)..(6255)
agccctctgtctgagccctggttctggctttccaatgtcctcatgctgagggttgttcttggcttcaagactctcctccctctggcccctgccaacctctttagcctcatctttggagactcgcagtctctccttctatattgcagcccaaaccaacttctatctcccctctaacacacctcctgctttttctacacttcatgactttgtttaccccctcctttgtggcctgcactctattcatctgcttgaaatttatgacccatttaagagatgtcttccatgatgcaagtcgctttgtttcctcctctgggcccttcagctctatggtagcacagatcacagtggatatgatggacagggttttggctggctaccccactagactgtgtcaattccctgtgaccatgcacccagtgcaaagccagccttattcaatgtggaatgaaaaacgaacctcagttatcttaatctttaaaatggcagcattggcagccaggcctggtcaatccagaggagagaaagagcactggagcctggaggaagatgaagtcacagaaggctccctggaggaggtcgggcttagaattataaggcctctgtattagtctgttttcacactgctgatacagacatactcaagactgggcaatcttctgagccctccaaactgttccaacctgtgcctgttacccagttccaaagtcgcttccacagttttgggtatcttttcagcaatgccgcactctatcggtaccaatttactgtattagtcctttttcatgatgctgataaagacatacctgagactgggcaatttataaaaggaagaggtttattggacgtacagttccacttggctggggaagtcacacaatcatggcagaaggcaaggaagagcaagtctcgtcttacatggatggtggcaggcaaagagagaatgaggaagattcaaaagtggaaacccctgataaaataatcagatctcatgagacttgttcactaccaagagaacagtagaggggaaaccacctccatgattcagttatctcccactgggtccctcccacaaaacgtgggaattatgggagtacaattcaagatgagatttgggtggggacacagagccaaaccatatcagccgctaagaacgatcaagagtgagcaagagagtgaggatttggaagactgagtggctctctgttctgtcatgcttgttcctccagcttcaatacacttgaggggtcccaccaaccaatagcacagccttttacatttacacggaaaattttcactaactttttcatttgtgtcattggtgcagaggctggagtgagggttaggaaatctgagacttcctatcctgacttgtgtttggattgctgtgtgactttgggcaatccctttcacctctgagcctgtttcctcatctgccacatgtggataccaatggttgctccacacataggaaagtccccatagaccataaagttctgtgtcccactaagcactattaatcttgttgttctaattatcagcaaagcccatggtagctgctaaccagccacctgggggtccccagaaaatattattcagggccccagtaaaagggaacctctgggggtcaaggccccagcaggccaggaaggggtagagcttgggagtttaatggaaataggctcagctccaacctggttcttcccactgaggcagcactgacttcgggagaggaaggagcagctggcatggcctgggttgggcagatgagctgggttgacctgcagaggtctcgggcatgaaggctgaaagtgaagtgcccaaagccagccatagccaaggaggggctaggctctgggagggcagcgtctggggaggtgggcagttagggaccctcatcccgctaggagaggggctctaagagaagggatctgggccaaactctttgtgctctgatttagagcattcctggcaggcaggctatgctgctggtttgccatctgtgtgactgtggctgggtcagaactcccactgggcctccccctgcgtatcagcagcaatacaggagctggactaggagctctctatagagcctagtgttgtctgattctgcagcagcactggacagaaagctctgaggttgttaggacagtcatggtccagtctgcctgtggaaaactgggaaaccaggtgcccagaccccactgacatgttgattttgtagaagaggggtcagaacacatcccaggccccagggaacgcctagtctggtgagggaagcagatgtgaacatggatagctcccagtattgtctgggctgccagacaggcaagcttcagggaccctcccacagaggacacctgggagccctgaacagggagcaggcatctggtttctggtgtggctctgccaatagctctctgtgtagccttgaccaagatcagctcccctatcagctttaaaaaaatgtatttttaagttatttttattttttatagaaacagggtctcgctatgttggccaggctggtcttgaactcttgacctcaggtgatccatctgcctcagcctcccaaaatgttgggattacaggcatgagccaccgcacccagcccaggtctgctttatcttaatagggagtgaattcattttcaacttgggttccattcaggaaataactccttctatcaaaggcacatacaatgtctctgccctctgagagtgaccaacagaggagtttcacaggacatgggactttcagtgctgaaaccaggacagttctgggcaaatcaatatggttggtcactgtatgatatgacaaagagaaaggatacaaagacaggtcccagggcacccaggctagaaagaaacagacagagcaagcccctgtacaggcacacagaagaggaagctatttctggggtaagcagacagcattttgaagtgcttcttgaaggaagcagctgaagagaaagatatcacagaaaaggaattctcatgtgaatggaaatggagagactgaaacaaagggcactgattcagacataacattccgacccagatagagtgagatgagaatagagcggggcgtagaagaggaatggaatccagagcatgacagaagccattgttccggctatccccaaagaagttttcccagcagttccctagagctcatgagctaggagtctttatcggtggcccctgacaatcctccaggctgagaggaacacaccatcaagggaaccttagaatgaacgacatagttttcactctagagtttagctttactcactgccaaccagtgattctgctgtcttcacaaggtcccaagataaagaacgccattcaggaatcgtgcaggcatagctggactggatggacttatgtcaaatgactacagtcaagatcctggtgcttagagtgggcaaaacctggtaagtgtattcatcaacattaccatacctagaagattacttcacctgtgctagtgggaactgggctaaaaaccagacatccttaaaggagctacttgaactaataaaagagctacttgattttttaattggcatttgaacacaagcagatgcctctcagatttttttctctccaataggttaaatttgcccaccaacaccgcaatcttattttttaatttttgtaagataagatcttgctctgctgcccagcttagagtgcagtggtgtgatcatggctcactgcagcctcaaactcctaggcttaccttcacatctggggtagttacgattacaggtgcatgtcacaatgcctgactaacttttttgactttttatagaaaaggggtctttctatgttgcctggctggtctcaaacttctggcctcaagcgatcctctggccttagcctctaaaagtgttgggattacaggtgtgagccactgtacctggctacaatcttgttcatgtgattcatttatgttattattattatttttagaagcaatgaatctagggttagaaggtcacttaaaggtttttaatctagctgctatccaagtactacatctctgtagcattccagaaaaagacctcagccttgcaacctctagttacatggacttcactaattatcaagcctgtttttgcattatggagttgttctttctttttctttttctttttttcttttgagacagggtctcactctgttgcccaggctggagtgcagtggtgcaatctcagctcactgcaacctccgcctccagagttcaagttattttcctgcctcagcctcctgaatagctgggactacaggtatgtgccaccacgcctggctaatttttgtatttttagtagagacaaggttttaccacgttgtccaggctagttttaaactcctgacctcagatatctgcccaccttggcctcccaaagtgctgagattacaggcatgagccaccgcgcccggccttcattatggggtcattctaatggtaagaaactgcttccatatgtgggattgatctctgggcccctgaagctgctaacagtggccccacttctttgtaagtgttgctccttctctttgacagttcttaggtgtttgtatccacctctcttccccccagaacaggaccagctctttctgccattgttgttagacatctcaccactctgggaatcttaattgtgcaatacaattcctggcacaaagaaagtgttgggactgagatccatggttggaaaggaaaaatatacatgttctagtgaatgtttccttgattgctctggtttccagatgttcccagtgtgtgtctacagacatccaactctgacccactgtggaggccacagcctgtaatggatcagaggactccttgcctgtcttctgcctggtcagcatcccctctctgccagagtccctcttcccccaactcccgtctttgtggttttctttcttctttccttttttcttttcttttcctttcttttcttttcttttcttttcttttctttctcccttcctttctcccttccttccttctttctcctttcctttcctttctctctttctttctctctctctttgtttctatctttctttcttttttcttttttgatggagcttcgctcttgttgcccaggctggagtgcaatggcgcaatctctgctcactgcaaactccacctcccaggttcaagcaatcctcccacctcagcctctggagtagctgggattacaggcacctaccgcctggctaatttttatatttttagtacagatgggattttacaatgttggccaggctggtattgaactcctggcctcaaaagatctgcctgccttggcgtcccaaagttctgggattacaggtgtgagccaccatgcctggccttgattttcttcttaatctatccgcttatcctggtgggtaatgaccagatcctggtggttgtgatggcagaggccagccttcacaagcctgtgtacttcttcctgataaacctctcagccctagacatcctctccactacagtcactgtccccaagacgctgcccctgttcttgcttggggaccacttcctcagcttccctgcctgcttcctacagatgtacctgttccacagcttctcctgctcagaagccttcatcctggtggtcatggcctatgaccgctatgtagctatctgccacccactgcaataccctgttctcatgaacccacagaccaatgctgtcttggcaaccggtgcctggctcactgccctcctcctgcccattccagcagtagtacagacctcccagatggcatttgacagcattgctgacatctaccactgcttctgtgatcatctggctgtggtccaggcctcctgctctgataccacccccagaccttcatgggtttctgcatcgccatggtggtgtccttcctcccccttctcctggtgcttctctcctatgcccacatcttgacctcggtgcttcgcattaactcccaagaaggacgctccaaagccttctccacctgcagctcccatctcccggtagtgggcacctactactcatccattgccatagcctatgtggcctacagcgctgacctgcccctcgacttccacgtcatgggcaatgttgtacatgtcttcttcttcctcttcttcttcttcttcctcttcctcttcttcctcttcctcttcgtcttcctcttcttcttcttctccttctccttcctcttcctcttcttctccttctccttcttcttctttcttctttaatacatccttccctccctgtatatgccatgccattctcacacctgttctccactctcacctgcatgctgaggaacagggatgtcaaagcagccatcaccaagatcgcatgtccccaggagctagggtgttctgggggccctagatccctagatccaactaattcagctcccaggataccaatgacagcacctagctcagaa

SEQ ID NO: 964 - protein, 420 aa, Homo sapiens
MTLFTPSFVACTLFICLKFMTHLRDVFHDASRFVSSSGPFSSMVAQITVDMMDRVLAGYPTRLCQFPVTMHPVQSQPYSMWNEKRTSVILIFKMAALAARPGQSRGEKEHWSLEEDEVTEGSLEEFWDYRCEPPCLALIFFLIYPLILVGNDQILVVVMAEASLHKPVYFFLINLSALDILSTTVTVPKTLPLFLLGDHFLSFPACFLQMYLFHSFSCSEAFILVVMAYDRYVAICHPLQYPVLMNPQTNAVLATGAWLTALLLPIPAVVQTSQMAFDSIADIYHCFCDHLAVTFMGFCIAMVVSFLPLLLVLLSYAHILTSVLRINSQEGRSKAFSTCSSHLPVVGTYYSSIAIAYVAYSADLPLDFHVMGNVVHVFFFLFFFFFLFLFFLFLFVFLFFFFSFSFLFLFFSFSFFFFLL

SEQ ID NO: 965 - DNA, 1310 bp, Homo sapiens
  source (1)..(1310)
  CDS (201)..(707)
  CDS (832)..(1110)
agaacttctagtggattttgtttaaggactaggaatggtaacaagggctcatcatagaaggtgattgaactctctaatcctatgtaccctggatactcttcctagaaggtgaaggagcctatgaagatcaacaaggagaatttccaagagtcatgtcagcctccagtatcacctcaacacatccaacttccttcttgttgatggggattccaggcctggagcacctgcacatctggatctccatccccttctcagcatatacactggccctgcttggaaactgcaccctccttctcatcatccaggctgatgcagccctccatgagcccatatacctctttctggccatgttggcagccatcgacctggtcctttcctcctcagcattgcccaaaatgcttgccatattctggttcagggatcgggagatcaacttttttgcctgtctggtccagatgttcttccttcactccttctccatcatggagtcagcagtgctgctggccatggcctttgaccgctatgtggccatctgcaagccactgcactacaccacggtcctgactgggtccctcatcaccaagattggcatggctgctgtggcccgggctgtgacactaatgactccactccccttcctgctgagatgtttccactactgccgaggcccagtgattgcccgctgctactgtgaacacatggctgtggtcaggctggctgtgggaacactagcttcaattcccccaatatctatggcattgctggtgcccatgtttattgaagtgttggatctattctttatcatcctatcttatatctttatcccttcaggcagttctacaactctcctctcaggaggcccgctacaaagcatttgggacatgtgtctctcacataggtgccatcttagccttctacacaccttcagtcatctcttcagtcatgcaccgtgtggcccgctgtgctgcgccacacgtccacattctcctcgccaatttctatctgctcttcccacccatggtcaatcccatcatctacggcgttaagaccaagcagatccgtgacagtcttgggagtattcccgagaaaggatgtgtgaatagagagtgaggaataagtggaaaaagagtggggcacagtgaatgctgtagtgggccagggctgtgctgagagtagatgggtgctagactccacgtttagttcttttcttgtattatggaaagaataaatgatgtcctgaagctcagtgccaacagtctgtttagaatttgtgggtctttgccctctggtagcctctggattgaacctgg

SEQ ID NO: 966 - protein, 261 aa, Homo sapiens
MGIPGLEHLHIWISIPFSAYTLALLGNCTLLLIIQADAALHEPIYLFLAMLAAIDLVLSSSALPKMLAIFWFRDREINFFACLVQMFFLHSFSIMESAVLLAMAFDRYVAICKPLHYTTVLTGSLITKIGMAAVARAVTLMTPLPFLLRCFHYCRGPVIARCYCEHMAVAVLQLSSQEARYKAFGTCVSHIGAILAFYTPSVISSVMHRVARCAAPHVHILLANFYLLFPPMVNPIIYGVKTKQIRDSLGSIPEKGCVNRE

SEQ ID NO: 967 - DNA, 1195 bp, Homo sapiens
  source (1)..(1195)
  CDS (201)..(995)
cagccaataggttactgccctgagctggaaaggactgacgcagcctgacatggcaaggcttcctctgctacagaatctgtcctgggtctgccttgaagctttactgccaatgcctcatccccaggcatgccctgccactgataacccactggagcattctttttagttcttgtcagtcaaaagggaaacctgaatgctccatggaagtcagcaacatgaccacagtcactgtgtttattctcctaggactgtccaacaaccctcaggttcaggcactgctctttgttctgttcctggtgatttacctcttgactctactggggaacctgctgatggtgctggtgatcagtactgattcccacctctgcacccctatgtacttcttcctgagacaactctccttcctggatgctttctattcctcaattattgtgcctaaactgctagagaaccttctttctaagggggagacaatatccttccttgagtgtttcactcagatctccctggtcatattttctggagctactgaggcttgcctcctctcggtcatggcctatgaccggtttcaggccatgtgtcatccactgttgtatgtggtgattataaacaggagggtgtgtgctggcctggtgggggcatcctgggccataggaatggggactggcctaattaacaccctcctcctggctcagcagcacttctgcggccctaatgtcatccacagttttgcctgcgagcttcctccggtgctcttattgacctgttctgacccctgcgctagcatcgtctccattctcactaccatgtcagtcctgggccttggcacccttgtccttttgctgggttcctacagctgtatcatcatgacagccctgaggatcaactctgctacaggtcggagcaagatcttttccacctgctcttcccatttccttgtggtcaccatcttttatacttcaggagttctcaggtatgtcatactatacccctgaatataaatgcgggatattccttaccctaagtggtctccgttggcagaagagagcattacaaaatagcaggacattcaaaaggcctaggctctagtgctggctctaccatggactagctgtatgaattgtaaagaatctattttcagctgggtacagtggctcatgcctgtaaccccagcactttgggaggctgaggtggg

SEQ ID NO: 968 - protein, 264 aa, Homo sapiens
MEVSNMTTVTVFILLGLSNNPQVQALLFVLFLVIYLLTLLGNLLMVLVISTDSHLCTPMYFFLRQLSFLDAFYSSIIVPKLLENLLSKGETISFLECFTQISLVIFSGATEACLLSVMAYDRFQAMCHPLLYVVIINRRVCAGLVGASWAIGMGTGLINTLLLAQQHFCGPNVIHSFACELPPVLLLTCSDPCASIVSILTTMSVLGLGTLVLLLGSYSCIIMTALRINSATGRSKIFSTCSSHFLVVTIFYTSGVLRYVILYP

SEQ ID NO: 969 - DNA, 1335 bp, Homo sapiens
  source (1)..(1335)
  CDS (201)..(467)
  CDS (560)..(1135)
agattctgaaagaggcaacttttcttgctagggaagaacctccagaagcttctgctctgctttcctgaatccatggggaagcagcagggagggggaaagaaatgatgcatttcaggagaaatttttcccttttcatcctaatttctgatggtcctatttgcccagaattgcacatttctggaaagggcttgaggtccacaatggccaatcagactgtggtgactgagttcttcctccaaggcctgacggataccaaagagcttcaggtggctgtttttctgctcctgctgcttgcctaccttgtgactgtctctgggaacctgatcatcatcagcctgaccttgctggacacccgcctgcagacatctatgtacttatttctccagaatctgtcctgcttagaaatttggttccagacagtcatcgtgcccaagatgctgctcaacattgccatggggaccaagaccgttagctttgctgggtgcattacccaggactttttccacatcttctgggggccacagagttcttcctcctcacagccatggcctatgaccagtatattgccatctgcaagcccctccactaccccatgctcataagtagtagagtctgcacacagctcatcctcacctgctggctactaggtttctccttcatcatcatgcctgtcatcctgaccagtcagcttccattctgtgatacccacatcaagcatttcttctgtgactacacgcctctaatggaggtggtctgcagtgggccaaaggtgctggagatggtggattttaccctggccttagtagcactgtttggcaccttggtactcatcaccctgtcctatgtccagatcatccagacaattgtcagaatccccgctgtccaggagaggaagaaggctttctctacctgttcctctcatgtcattatggttaccatgtgttatgacagctgcttctttatgtatgtcaagccctctccaggaaagtgggttgatgtcaacaagggagtgtctctaatcaatacaattattgccccactgttaaatcccttcatctgtactctgaggaaccaacaagttaagcaggtaatgaaagacctagtcagaaaaatgactttgttccaaaataaataagggccctaaaagtcatcttctggggaaaaaatgggtgccttctccagagtaagtccacatgacatcaggccaagaggcaggagtcaggggcttaggcccccattgcacccccagcaaggtgcaggtttccccacaggccataaggaaaatgtcctgatatcatatgaagagtcttattacctagcctcagtcttaggttt

SEQ ID NO: 970 - protein, 280 aa, Homo sapiens
MANQTVVTEFFLQGLTDTKELQVAVFLLLLLAYLVTVSGNLIIISLTLLDTRLQTSMYLFLQNLSCLEIWFQTVIVPKMLLNIAMGTKTYIAICKPLHYPMLISSRVCTQLILTCWLLGFSFIIMPVILTSQLPFCDTHIKHFFCDYTPLMEVVCSGPKVLEMVDFTLALVALFGTLVLITLSYVQIIQTIVRIPAVQERKKAFSTCSSHVIMVTMCYDSCFFMYVKPSPGKWVDVNKGVSLINTIIAPLLNPFICTLRNQQVKQVMKDLVRKMTLFQNK

SEQ ID NO: 971 - DNA, 1102 bp, Homo sapiens
  source (1)..(1102)
  CDS (201)..(902)
tcactggcctatcccagactcgggaggtccaactagtcctatttgttatatttctatccttctatttgttcatcctaccaggaaatatccttatcatttgcaccatcaggctagaccctcatctgacttctcctatgtatttcctgttggctaatctggccctccttgatatttggtactcttccattacagcccctaaaatgctcatagacttctttgtggagaggaagataatttcctttggtggatgcattgcacagctcttcttcttacactttgttggggcttcggagatgttcttgctcatagtgatggcctatgaccgctatgctgctatctgccgacccctccactatgctaccatcatgaatcgacgtctctgctgtatcctggtggctctctcctggatggggggcttcattcattctataatacaggtggctctcattgttcgacttcctttctgtgggcccaatgagttagacagttacttctgtgacatcacacaggttgtccggattgcctgtgccaacaccttcccagaggagttagtgatgatctgtagtagtggtctgatctctgtggtgtgtttcattgctctgttaatgtcctatgccttccttctggccttgctcaagaaacattcaggctcagatgagaataccaacagggccatgtccacctgctattcccacattaccattgtggtgctaatgtttgggccatccatctacatttatgctcgcccatttgactcattttccctagataaagtggtgtctgtgtttcatactgtaatattccctttacttaatcccattatttacacattgagaaacaaggaagtaaaggcagccatgaggaaggtggtcaccaaatatattttgtgtgaagagaagtgaaagataaattatacattttatagtcctcctgaagatcattgtcctaaagcaggaagtatttgcagtaataatgctgcattcacttcctccgttcatttgtgttcttaaaattttactataatttttctctattaattcctctttatattgaaaaaatagaggcattaagatgaaaataaatttactcacacctaccctga

SEQ ID NO: 972 - protein, 233 aa, Homo sapiens
MLIDFFVERKIISFGGCIAQLFFLHFVGASEMFLLIVMAYDRYAAICRPLHYATIMNRRLCCILVALSWMGGFIHSIIQVALIVRLPFCGPNELDSYFCDITQVVRIACANTFPEELVMICSSGLISVVCFIALLMSYAFLLALLKKHSGSDENTNRAMSTCYSHITIVVLMFGPSIYIYARPFDSFSLDKVVSVFHTVIFPLLNPIIYTLRNKEVKAAMRKVVTKYILCEEK

SEQ ID NO: 973 - DNA, 940 bp, Homo sapiens
  source (1)..(940)
  CDS (201)..(740)
gagagaaaaggcataaacacacaagaaattaaatgaccaaatgattgatgcagatactgtgttatattagactttttttctaattctttacaggttgtctaacaaagagaatggaagaggccatcctactcaatcaaacttctttagtgacatattttcggcttagaggtttatctgtaaatcataaggcacggatagctatgttttccatgttcctcattttttatgtcctgacactgattgggaatgttctcattgtcataactattatctatgaccaccggctccatactcccatgtatttcttcctcagcaacctgtcctttattgatgtctgccactccactgtcactgtccccaagatgctgagagacgtgtggtcagaggaaaagctcatctcttttgatgcctgtgtgacccagatgttcttcctgcacctctttgcctgcacagagatcttcctcctcaccgtcatggcctatgatcggtatgtggccatctgtaaacccctgcagtacatgatagtgatgaactggaaggtatgtgtgctgctggctgtggccctctggacaggagggaccatccactccatagccctcacctcccttaccatcaagctgccctactgtggtcctgatgagattgacaacttcttctgtgatgtacctcaggtgatcaagctggcctgcattgacacacccacgtccttgagatcctcattgtctccaacagtggattgatctccgtggtctgttttgtggtcctggtggtgtcctacgcagtcatcctggtgagtctgaggcagcagatctccaagggcaagtggaaggccctgtccacctgtgcagcccatctcactgtagttacactgttcctgggacactgcatcttcatctattcccgcccatccaccagcctcccagaggacaaggcagtatct

SEQ ID NO: 974 - protein, 179 aa, Homo sapiens [sequence omitted]

SEQ ID NO: 975 - DNA, 1192 bp, Homo sapiens
  source (1)..(1192)
  CDS (201)..(992)
  modified_base (110): a, t, c, g, unknown or other
tgggcttcccctgcctgctgcagggagaccaagatcctcctctttgtggtcttctccctcatctaccttctgaccctcatgggtaacacatccatcatctgcgctgtgtggtcaagccagaaactccacacacctatgtacatcctcttggctaatttctctttcctggagatctgctgcattagttctgatgtcccaaaatgttggccaatctcatctcccatatcaagagcatctcctatgctggctgcctgctccagttcttctacttctccatgtgtgctgcagaaggctactttctgtctgtgatgtcctttgatcggttccttaccatctgtcgacctttgcattatcccacagtcatgactcaccacctgtgtgtccgattagtggccttctgcagggcaggtggttttctatccatactgatgcctgcagtgcttatgtcccgagtgcctttctgtggccctaacatcactgaccattttttctgtaacctgggaccattgctggcactgtcctgtgccccagttcccaaaactactctgacttgtgctacagtaagctctctcatcatcttcatcaccttcctctacattcttgggtcccatatcttagttttgcgagctgttctgtgggtcccagctggctcaggcaggaacaaagctttctctacatgtgcttcccatttcttggttgtttctttcttctatggctcagtcatggtgatgtatgtgagtccaggctccaggagccgccctgggacacagaaatttgtgacattgttttactgcacagcaaccccattctttaatcccctgacctacagtctctggaacaaagatatgacagatgcccttaaaaaagtgctgggagtgccatcaaaagaaatatattggaacacaccacntgaaatgatatacattcttctacaattattccataagaaatgcaaaatttctctcattttaaaaaaaactattttctggtgatgtctgagcacttggcttcttactcataaaagcgtgactcattacacacaaagagccctgatcctatctcaaagcaaaaagtatacaaagtcctaagtttcatcgtaggtaagatctgtacaatttttattcatctatgtatcatttttccattttggagattttttaagtcctaaaactatatgtaattcagttggtat

SEQ ID NO: 976 - protein, 263 aa, Homo sapiens
  MOD_RES (237): Variable amino acid
MLANLISHIKSISYAGCLLQFFYFSMCAAEGYFLSVMSFDRFLTICRPLHYPTVMTHHLCVRLVAFCRAGGFLSILMPAVLMSRVPFCGPNITDHFFCNLGPLLALSCAPVPKTTLTCATVSSLIIFITFLYILGSHILVLRAVLWVPAGSGRNKAFSTCASHFLVVSFFYGSVMVMYVSPGSRSRPGTQKFVTLFYCTATPFFNPLTYSLWNKDMTDALKKVLGVPSKEIYWNTPXEMIYILLQLFHKKCKISLILKKTIFW

SEQ ID NO: 977 - DNA, 1084 bp, Homo sapiens
  source (1)..(1084)
  CDS (201)..(884)
tccttcgtttgacccagtttcgagatatttagctcctggtctttgtgctagttttaatattctacttcttcatcctccctggaaattttctcattattttcaccataaggtcagaccctgggctcacagcccccctctatttatttctgggcaacttggccttcctggatgcatcctactccttcattgtggctcccaagatgttggtggacttcctctctgagaagaaggtaatctcctacagaggctgcatcactcagctctttttcttgcacttccttggaggaggggagggattactccttgttgtgatggcctttgaccgctacatcaccatctgcctgcctctgcagtattcaactgtcatgaactctagagcctgctatgcaatgatgttggctctgtggcttgggggttttgtccactccattatccaggtggtcctcatcatccgcttgcctttttgtggcccaaaccagctggacaacttcttctgtgatgtccgacaggtcatcaagctggcttgcaccgacatgtttgtggtggagcttctgatggtcttcaatagtggcctgatgacactcatgtgctttctgggacttctggcctcctatgcagtcattctttgtcgcatacgagcgtcttcttctgaggcaaaaaacaaggccatgtccacatgcaccacccatatcattgttatattcttcatgtttggacctggcatcttcatctacacgtgccccttcagggctttcccagccgacaaggtggtttctctcttccacacagtgattcttcctttgttgaatcctgtcatttatacccttcataaccaggaagtgaaagcttccatgaaaaaggtgtttaataaacacatagcctgaaaaagggcaaaaaaaaaaagaataaaaatagactgtagaattttatctgaaattgatttgtttatttccaagtactgcaatcattgaatacctcccatttgtcaggactattctaggaactgaagaaagaaagtattgaggcagataaggtctatctgctctccaagagatacaacctagtaaaaatagaccgccgttaa

SEQ ID NO: 978 - protein, 227 aa, Homo sapiens
MLVDFLSEKKVISYRGCITQLFFLHFLGGGEGLLLVVMAFDRYITICLPLQYSTVMNSRACYAMMLALWLGGFVHSIIQVVLIIRLPFCGPNQLDNFFCDVRQVIKLACTDMFVVELLMVFNSGLMTLMCFLGLLASYAVILCRIRASSSEAKNKAMSTCTTHIIVIFFMFGPGIFIYTCPFRAFPADKVVSLFHTVILPLLNPVIYTLHNQEVKASMKKVFNKHIA

SEQ ID NO: 979 - DNA, 1060 bp, Homo sapiens
  source (1)..(1060)
  CDS (201)..(860)
ccatgtcttccagactaatgaatgtgttcagcatggaaactatcaattttgttagctgccttatcctcatgggctttccctcaagcccagaaatgcagctcctctacttcggtctcttctcagtagcctatactctcaccccgatgggaaatgcagccattgtctgtgctgtgtggtaggaccagcaccttcacactcccatgtacaccctcttgggaaatttctctctcctggaaatatgttatgttactgcaactaaactgctggccaacttcctctccacaagcaagtccatctcattcatgagttgttttgcacagttctacttcttctctttggggtatgatgagggcttcttcctttgcatcacggcctttgacaggtatcttgccatctgccgccctctacgttatccatgcatcatgactaaacaagtatgcactggcctcatcatttttgcatggtcatgtgtctttgtaatcttcctaactctggtgattctcatttcacagctatcctactgtggcccaaatattatcaaccattttatttgtgatcccgtcccattgaagatgctgtcctgttctgaagacatcatcatcacccagctcatttactccacattcaattctgtcttcataattggcacctttctctttatcctttgttcctatgctctggtgattctggctataatacggatgccttcagaggctggcaaacgaaaagctttctccacttgtgcctctcatttggcagttgtcaccttattttatggctctatcatggtgatgtatgttagtcctggatcagcacacccagtaaaaatgaaaaaatcattaccttgttcttttctgtgataacaccactctgtaatcctctaatatatagtctcaggaacaaagagatgaaagattatctgaggaaaatcttcaggactggaaaagatgttaataaaatataaataagagaattttcatttatcaaatgtaactttattatacatgaatatttgtctacaaatttattgttttatttaagaactgctataataatgagc

SEQ ID NO: 980 - protein, 219 aa, Homo sapiens
MYTLLGNFSLLEICYVTATKLLANFLSTSKSISFMSCFAQFYFFSLGYDEGFFLCITAFDRYLAICRPLRYPCIMTKQVCTGLIIFAWSCVFVIFLTLVILISQLSYCGPNIINHFICDPVPLKMLSCSEDIIITQLIYSTFNSVFIIGTFLFILCSYALVILAIIRMPSEAGKRKAFSTCASHLAVVTLFYGSIMVMYVSPGSAHPVKMKKSLPCSFL

SEQ ID NO: 981 - DNA, 16156 bp, Homo sapiens
  source (1)..(16156)
  CDS (201)..(391)
  CDS (1086)..(1258)
  CDS (7723)..(7844)
  CDS (14993)..(15409)
  CDS (15438)..(15956)
gtttcagagagcacagggttgggggtagggtcacagatcaacaggataagaatttttcttagtacagagcaaaatgaaaagtctcccatgtctacctctttctacacagacacggcaaccatccgatttctcaatcttttccccacctttcccccctttctattccacaaaaccaccattgtcatcatggcccgttctcaatgagctgttgggtacacctcccagacggggtggtggccaggcagaggggctcctcacttcccagtaggggcggccgggcagaggcgcccctcacctccagggtggggcggctggccaggcgaggggctgacctcctcacctccctcccggacggggcggctggccgggcagaggggctcctcacttcccagtaggggcggccgggcagaagtgcccctcatctcccggacgaggcggctggccgggcggggggctgacccccccacctccctcccggacggggtggctggctgggcagggggctgacccccccacctccctcccggacggggtggctggccgggcggggggctgatccccccacctccctcccggatggggcggctggccgggcggggggctgaccccaccacctccctcccggacggggcggctggccgggcggggggcagattcccccacctccctcccggacggggtggctggccgggcagaggggctcctcggggatcctctagagtgcacttcccagtaggggaggccgggcagaggcgcccctcacctcccggatggggcggctggccgggcgggggtgctgacccccccacctccctcccggacggggcggctggccgggcagagggactcctcacttcccagtaggggcggccgggcagaggcgcccctcacctcctggccggggcggctggccgggcgggaggctgacctcccccccacctcccgcccggacggggcggctggccgggaggggggctgacccccccacctccctcccggacggggcggctggccgggcgggggctgacccccacctccctcccggacggggtggctgccaggcggagacgctcctcacttcccagacggggtggctgccgggcagaggggctcctcacttctcatacggggcggctgccaggcggaggggctcctcacttctcagacggggcagttgccaggcggagggtctcctctcttctcagacggggcggccaggcagagacgctcctcacctcccagacggggtcgcggccgggtagaggtgctcctcacatcccagacggggcagcagggcagaggcgctccccacatctcagacgatgggcggccgggcagagacgctcctcacttcctagatgggatggcggccgggaagaggcactcctcacttcctagatgggatggcggccgggcagagacactcctcactttccagactgggcagccaggcagaggggctcctcacgtcccagacgatgggcggccagacagagacgctcctcacttcccagacggggtggcggctgggcagaggctgcaatctcggcactttgggaggccaaggcaggcggctgggaggtggaggttgtagcgagctgagatcacgccactgcactccagcctgggcaccattgagcactgagtgaacgagactccgtctgcaatcccggcacctcgggaggccgaggctggcggatcactcgcggttaggagctggagaccagcccggccatcacagcgaaaccccgtctccaccaaaaaaatacgaaaaccagtcaggcgtggcggcgcgcacctgcaatcgcaggcactcggcaggctgaggcaggagaatcaggcagggaggttgcagtgagccgagatggcagcagtacagtccagcttcggctcggcatcagagggagaccatggaaagagggagagggagagggaggagaaggagaaggagagggagagggagagggagagggagagggagagggagagggagagggagagggagacggcgagggagagggagagggagagggctctttaggattttttgatgtaggcatataatgctatgaactttcctcttagcactacttttgctacatcccagaagctttcataggttgtgtcactcttattcagttgaaataatttttttaatttccatcatgattttactcaaataacatgcagaagcagcttatataatttccatgcgtgtgtgtagttttgagggttccttttggagttaatttccaattttattccactgtggtctaagagagtacttgatatagtttccattttcttaaacttattgagacttgttttgtggcctatcatgtggtcgatcttggagaatgttctatgtgctgatgaaaagaatgtatattctgcagttgttaggtagaatgttctgtaaatatccgttaagtccagttgctctaggttatagtttaagtccattgtttctttgttgactgtcttgatgacctgtctagtgctgtcagtagagtactgaagtcccctactattactgtattgccatctatctcatttcttagttctagtagtaattgttttatacatttgggagctccagtgttcggtacatatatagttagaattgtgatattttcctgttggactaatcctttttatcattatataatgtctctctttgtcttttttaactgctgttgctttaaagtctgttctgtctaatataaaaatagctactcctgcttgcttttggtttccatttgcatggaatatttttttccacccctttaccttaagtttccatgagtccttatgcgttaggtgagcctcttgaagacagaagatacttttttggtggatttttattcattcttccattctgcatcttttaactggggcacttaggccatttacattcaatgttaatactgagatgtgaggtagtgttctgttcatcatgctcattgttccctgaattccttgggtttcttttttattgtgttattgttttataggccctgtgaaatttatgctttaaggaggttccagtttgttgtattacaaagttttattaccagatccagaactcattttagcatttcttgtagtgcttgtttggtagtgacaaattctcttaacatttgtcagtctgagaaagattttatctcccctttgttcatgaagtttagttttgctggatacaaaattcttggctgataattttgttcaaggaggctaaaagtagaaccccaatcccttctggcttgtagggcttctgttgagaaatctgctgttaatctgataggttttcctttatagtttacctgatgcctttgcctcacagctcttaagatttgttccttcaccttaactttagataacctgatgactatctgcccaggtgatgatcttttcgcaatgaatttccagggtgttctttgagcttcttgtatttggtcatctagatgtctagtaagaccaggggaggtttcctcaattattcccttcagtaagttttccaaacttttagatttcagttctttctcaggaacaccaattattcttatgtttggttgtttaacataatcccaaatttattggaggctttattcatttttctttgtctttgtcagattgtgttaatttgaaagccatgtcttcgagctctgacattctttcttccacctgtttgattctattgttgaaacttcccaatgtattttgcatttctttaagtgtgtctttcatttccagaaattgtgattatcttttctttacggtttctatttctctggagacattttcccccatggtccttcaagattttatttatttttattttttagctccataggttatttgggaacaggtgatgtttcatctcacgaataagttctttagtggtgatttctgagattgtggtgcactcatcactcaaacactatacactatacccaatttgtagtcttttatccctcactcccctcccaccctttcccccaagtccccaaagtccattgtatcattcttatgcctttgcatcttcatagcttagctctcacttatgagtgggaacatacaatgtttggttttctattcctgagttacttaacttagaataatggtctccagagaatttttcattcatatcctgtattttttttaatttccttaagttggtgttcatctttctctggtacttcattgagtagcttaatagtcaaccttctgaattctttatctggcaattcagagccttcttcctttttttttttttttttttttttttttttttttttttttttgagacagtctcactcagttgcccaggcttgagagatttcttcctttttttttttcttttttttttttttttccccctttttgagatagtctcacttggtcacctggacttgacagatttcttccttttttttttttttttttctttttgagacagtctcactcagtcacccaggcctaagtgcagtgccacgatctcaattcactgcaacctttgcctcctgggttcaagtgattctcctgcctcagcctccctagtagctgggactacaggcatatgccaccatgtctggctcattttgtatttttagtagagatggggtttcaccatgatggtcaggctggtctcaaactcctcacctcaagtgatccaccctcctcagcatcccaaaatgttgagattacaggcatgagccaccgtgcctggcccagtaatttcttcttggtttgggtccattgctggaaagctagtgtgatcttttgggggtgttatagaaccttgttttgctatattaccagaattacttttctggttctttctcatttgggtagactgttttagtggaaaaatctggaactcaagggctgctcttcaggttcttttgtcccatggggtgatcccttgatatggtgctctcccccttcccctagagatggaacttcctgagagtgagactgcagtgattgttatttgtcttctgggtctagccacccagcagggatactgggctctgggctggtgctggggaatgtctgcaaagagtcctgtgatgtgatctgtcttcaggtctcccagcagtggatacaagtacctgctctggtggaggtggcaaagagtgaaatggactctgtgggagtgcttggttgtagtttggtttagtgcactggttttctcaaatgctggtcatgctagcagttaagctgtcacatggacaaactcaggatctctggttgaccagggtgttgcaaacagtggaatgagatattgttttctccttctttggagcaggtttgttccttatgagttgctgtaatggctttagattgttggcccccagccaggaggtggcactttcaagagagcaccagctacgatagtagaagggggatataagcttgccctacattggccaggataaataatggggtttctcaggtgacggttggggccacagagctcccatttatgtcttttgtctttggctaccagggtgggtagagaaaaaccatcaggggaaggcagggttaggtgggtctgagcacagactctccttgggcagggcttgctgcagccactgtgggggacggaggggtggttctcagaccactggagttatgttcccagggggaatatggctgcctttgctgcatcatacatatcaccagggaagtggggaaaaccagcagtgacaggtgtcacccagcttccatgcagccagaaaggccagtctcactcccatcatgacccaccaatagcactgagtttatgtccaggcagcagggctgagatcttcccccaggctaccagcctccccactgagaaagcaagcagggctatcaggtcttgcctctccctgcctgccttattacagaggtcagctagaagcttccttcaccctttggcccctccccaattctgctggctgcctttcccaaggatccctgtgagataaggccagggatggcttccctgggcttggactggagaccaggggtgcctacagggctctttctattgcttcttctacttttatattttgctcggttccttaaatctgctttagctctaggtaaggttaaatccttctctcccatgatctgattttcaggttccctagtggggatgtgggtttggaggcagacttttctccctctcacacattgaaaactcagtttttcagctgccttgcagagtttgcagcggcaagctgcttctttcaaagggtatgtgaattcttttggttttgcttgtatcttcctgtagtgattcttgtagagaaagttcacaatgtgagtctccacacggtgttctgtccaaccaagggggagctgcatgttagtcccgtctcctaaccgccattttcctagcatttcccagcctcagtttggtcatttataaaatgaaaataataatgccctacttcatgaagctgttaggaatattaaatgacaatatataagcaataaaggcaatgtctggtaggtgttcaataaagggtagctgctatcattattattgttgcttattttattagctttattctctctcttccttaatgggcccacattctttgcctacctcactgagactgtaagtggaagagaccattttggccctgagatttatccccaaagactccttcaggcgtttgttcctcgggctttagatgaatgggtttggcatggccatgactactacgtacagcacgggggctgctgagtctcctctaccaagctgttccattgaccagggagatgacaccaaggtgagggctgcaggcacttctctggggaaaagaagactctgaggatagctgagaccatacagataaagaaaaagatgatataatccagtatgacagggccagtagaaaggctaaaattaaaaattgataataccaggtgttgacaagaatgtcgagaaattggaactctcaaatattccaaaggggatgtaaactagtctgaccattttggaaaactatttatcagtttctaagaaagtgagacatataaccaccttttgacccagcagttctgttcctaggtatataacaaggagaaatgaaaacataacaaggagaaatgaaaacataacaaggagaaatgaaagcaccatctgattggctgaatggtcatcaatgaggttcgcacaccaggctgctgacttcacctggaaccggcagcctggcccccaggcttcaggccatccctggcttgaaggtggggtttcaccaggacctgccccttcccacctaggaacctgtctgcctttaacatgctgtctgtggtacccaggctgtccacactgagaggcatctgtaggcccatgccaagctgccctcacaccgccctccccagactcccctcccacactctttggtgtccaaagtctggagggggcagaggcagcagggggctggcacgtcagccccctgagtgtgtgcacacctggctgggttgcaacaatgcccaggctcggccacaactttgctctgccctggagcaggtgccaggagtagggagaggccagagcagagcaggcactttcaagcccgtgggggcagggggcttcctggacccctaagagtgcagggatgcttgggtccagagccacggctgggcagctgcatgcgcctaggagtgtggggctcctgcctcaccaacttggtagggggtggggctcccacctcttcccagcccctgccagctccaccgagcacgcagccctggccgcaccttccctgctgcagctggcatccccgcagcagctgctccagatgggccaccactatcacttctgcataaactatggttcccaggtacttcccacatgcccaaatccttccacttttcttcttgtttaaataccacttccccccggaagttctccctgaacactcaagccacaggtgcagtttcatttcagtacctagggcacttattgccaagcactgtaacttgctgtgcccaagtcttctccccgcaacctgttaactatgaaatgtgcatcctcaaaactttataccctcaaacatgaaagaatcatcagtttactcctctcaatttaccagggagaaagctgagactcacaggggagaaatgcctcacctagggtcaaaagctagtggggacttgaatatctcactcattccacaacttctctgacactcctcagagatcaacaaggctgggaccccatatgctgagtaaatattatcaagtgaatgaatagtcaagctagagaagttcattccatgggacgtgactatcagttccacaagaactaaaaggcatatggcccaggtagagaaaggaaagatgagagaacaagactgtcctcaggagaaactggtccagcctgggaagttaggttggcccctccagatccaggagggctactctgccgaggccaatgaggacacgacagtcaaaaggcttcagaacaaggaacagaagtcattttgctctgacaccagctggacaaggctgagatccccacaactccaacctgagcaaaggagtaacagagagcgccaaccctgaagtccacaaagaacagctccacatggggtgtgaggctcggctgccacgatccctgaacctactgtcctggagcaaatctgctggcaattccagcccttcctctcctcccccaggttctgggtgaggtgggacctcagaggttgaggcaggcctggagctcagggaagggcacccgcagctccacttcactgctcacagtggaattaggaggaagagctcttccccgagcagaggaatcacatggtgaggtcgcagctttaggggtgatggttgtagctcagggtgggaaaaaccagggagaagaggccagggtcactaacacaccccgtccctcacatgccatcctgcatagaaggggcaggggagtgacagcatcatcctctgagcacagcagaccagcacagccagtcaccacactgagaggcatctacctcagttctggcttcccacacacctcgatgccccctctcctactcagttctctagcacaagagaggaggggaggctgcactagctgaggactgaggagtcctcaaggggccagtggtttcagaggccaccataactctccacagaatttccaggctaatcaattagtgggtggcccctctcctcccagcctgcaggccactcctcctgcctttggctgctgaggccaatcttcctctccagggcacacctgctgtaactccccctttgcctgaagcagattagcctctgtgggtgagctgtggagggcagagctcgttaatgcttgcagacttgctgggaggaagcagaagaatcatggcagaaagggaaggggagtaaatcaagcgtctgagggagagcaatacacgagaacgacctgccaacgtgtggcacgcagcacagggaagtggatgaaccataggtgggttcggagcccaggatctggactctgactgatcccctgattactgagcgactgcagacacagttctccgggtgctgctttccctgtctatgacatgggtgttgggtggaatgatatctaggaatcattgccagctgcctgataccaggatagaatggtgagttctttgtctttgtcttactcatctccgaatgcctcccccaccagtgctcaagtacctgcctggcatggagtagatacaacagttaagatgtttgaatacattattgaagacaaatgagtaagaagttggcagaaggaagtagaggagaagagatccttggaatacaaagggctcatccaggactaagactgtggttaaagagaaagctactgggcacaccatcaagagaagaatctgggctggccaaggagagactggatttaaggaattggatagaaacccccaggcctgagagcgtgggggccactgatggtttccctgtttaccactgcccactctccactctgttgaggcaggcggacttgaggcaagagagagcgagaggaaggagggaaccggtatgtggatgtttgcgtgtaagattcacgtgtgtgcctcagtgtgtctgggagcatctattgaggttttatgtctctggcatttgtttgggggcagggcatctttgttgggtgttgcatgtgtatgtggcatatatgatttatgtttttctctagtgcacggatctctgtaggtgtctacgtctgtgtgtaagggactgagtgtttgtatgtgcccatatattcatatattcctgtcccggtgggtgtgcgtgtctctggcatgtctgtgtgcctggacatatcgggatacatccgtgtgtgtctgtgtgcaagcgtgtatccctgtgcacttccgtgtcttggggcatctgaatgtgcgctccaaaagtgaccattttagcatggagttgaaggcagtgagctgcctcaaacatagggttttttttttttttttaaattctagatcctaagcatccctgcctcattttgcgaccttaaataatcaatccttcctgcccaattcaaagcagacacctgcctgacctgggcctgaggaaagggctatgtgtccacaacagcagctcagcatccagggagcccagccctgtgcctcgtgtttcaacaggagctgacacaaactcagtcatcatatctccccatcgcctgaagtcgtcaggagatggggaaggaaactgacatttatgaagcacctactatttgcaaagtgtttataagcaaactgtgaggatggtatttttatcctacttttggagaaaaaaaaatgaagctcaaagaggttaagaagcttcctggagtttctcttgtatttcctttgtacgtggaaaggaattctttctagaattctctcctactcctatgtgtccactgaatgccttgtccttcaagctcgccctgctcaaatgccacctcttctgtggagtcttccctgactttgccaggaaagttaggacaaaaccttgtgccgagcctgaggtcagatgaggaaagacaaacatttgtcttcagaaggctcatcatctagcagggaagatcagcattacagaaaaaacaaaaacaaaacaaaaaacagaaaagaaatcctcactttataccagcaaatgagggccaagttcccaatgagagatacaagaagcaggagtgaggtgttcgtgtgggctgggaagtcaagaaaggaggtggggtttcctggaggagtggagctgggcggggtactgggatagggtaggaagagtatttcaggtagggaggagcatacagggaaggcatgtgagaaggtgggggccatgctggaaagctctggatgtgtggctgagccaccggcactctatctaacaggcaacgggatatttgtatgagtgcaaacggctcagccctgcatccagtaggcaagagggaaactggcaggaaagtaaagttgagtgggaaaactatggctcaggaattcccagagcccttatagctgtggcgttctctctatatacagcttctgtctcagcccacaggaaacccactgaagtctctgggctgagatggatgacaacacatttgccttcaagactgggtacctctggctgggagggagaccagccaacaatctctgcagagagtactgagttctggcatgctgcccttcaggtgagaaaacccaacatttctctgctatcttcttttcctcatgtcctattttcctccctgaccccacgtccaaactctgccttacagcactagggaggaagaggccacattttagctctaagcaacccacaaaacatcttcttataccttcacattctctttcccctgcctgaaatgccctttccactcccaagcatctgtatatctggtggtctcctactcattcttccaaaatcagctcgaattccacttattctttggaatcttctccaaatcgtctagcagaggaaaccactcccactttgttcatgcagttagtgtagtgcttattacattgtgcctagctggaggtcaaggacaacgactggcctttcttcagagccccggaacccagcacaatgccggacccaataaaggcactcaataaaggggcatgaattgtacggctgagccatcatacggctagagcattgtgtccaactcctgttaacatggacaaagcagagagtgaccagaatggaaaaggacctaaaaatatggctctataagaaaagatctaaggtactaggggtgtttgggttgaagaaaagaatagtggaataggttcctttggccactatgtgaaaagctgcagagaaagcaggcttggcatgtgtagctctgaggccaaaattggaatcatttgtagaagtcacaggaaagcagacttcagctgagattaagaaaaagacttaaacaactacagtcctccagcgctggactggcctatctcaagaagccatcagggaacagagagaaaccatcagaagctgaggaaaaaggaactaacatctattagcatccgttccctgctacacttctgtatgtgcattacctctttaatcttgacatcaaccgtgtaagagaggcctcaatatccccattatagatgaagagactgaagaggaaatgaagtgggtccacgtttccacagccagtcaggatgaaaatccaggtggctctaaagctagtgctcttctcactgcatcacacaacctgcctaagaggagtttggggagtgcaggttaggagtcagttgagaagaatcctacaactgaagagaatggattggaggggtgccaacgtcctggctctctgatgctactactctatactggggcaaggggtggggttggaaggggcatagcagatgatttccctgggacggcaactgggtgacaatgatagagaagcagcaaaatataaaaaatgttatatatctggttaccttaggaagttgacagcagtttgccttggagtttgtccatcaccctctccttcacggtcccttcacctctgttttcattcattgctcttccaaaagcttcattcaacaaatatttattgaataaatattgtatacaaatatttattgaataaatattgtatacaaatatttattgaataaatattatatacagatcactgcacaagacagtgagatgtagctccttcctgcaaggagcttccctgctaagacctgacttagtccatcctccaggatttcaccaaagcctggagctttcctggcaaagggtaggtgtgctagattggttgaacactgctagaaaccttggagcaatgggagaaaagaatgtggtgttttaaggaagagattaaatgggggacaaaatgagtacattgtttctgagataactgaagtcacttggttaactgagaaatttaaaagtgttttctccagttgattttgtgcactgaggacagagcaaggacaagcctttcccagtgtcatgtgcggatgttttactctcttcactccatgcctcctctgccaacaactccacacaatctcttcatgcagtctgcaatgccctccctgtcccacacaacatcatgtctgtttggtgaacctgattcattcaccaagacccagttcaagtctctcctcttctttgaattcttcccaaatttctctaggaagaataatttactcctgcttggttcatgaaattaataaagtattaaacatgctgcaagctactgcacatcaaactgtttgggggcagaagctaagactcattcatcttcctgctctctacagtatctagtacaggggtcagcaaattgtccaaatccagaccaccacctgttttgcaaataaagttttattggaacagtactgtggccattcatttactttttgttgatggctgcttttgcactgcaacttctgagctgagttgttgcaacaagaccatatggaccacaagcctaaaatattaactatatgattctttaccaaaaaaaaaagcttgtctggccaggcacagtggctcacgcctgtaatcccagcactttgggaggccaaggcgggtggatcacctgagatcgggagttcgagaccagcctgaccaacatggagaaacccggtctctactaaaaaaaatacaaaattagccgggcgtggtggcgcatgcctgtaatcccagctactcgggaggctgaggcaggagaattgcttgaacccaggaggcagaggttgcggtgagctgagatcatgccattgaactccagcctgggcaacaagagtgaaactccgtctcaaaataaataaataaataaataaatcttgtcaattcctgaagaaccatataatgtgcggtcaacaaatgaatggtaaatgcagtaaggtgctttatgaagaaatttagactggtactcaaatggcctgggtccgaattctgctcctaattgtttaaacaaataatgatgattaagtaaatagatgttagatagattacacagatgatacacagatcacatagacagcaaagacagatggatagatgatagaggaggatagatagatagatagatagaggagtttggatagatagatgatagaggagttttgagtgcttattatatgccaggcactgtgcgaagtattttaaacttattcactgtatccaacaaccaattccatgggtagccactaatattttcctcattaaagaagaagaaactgaggctcagaaaggtctcaacacctttgtggtagagccaggattcaaagcaggtctgacctacaccaaagtctgagagttacccactacgctagaacactcttctgagattccgtttcttcataaaattaagattattggatgagcaacgtgattttcaatccatttagcaagcagaaatttgtatatttataaacatatattaaaatgtatatctggaacctcaacatgcaggaagtctacccggagttctagaatttctgccggctgcctcctccctcccctcggcattcccacctgtcagtccactccatggctccgaccaacctcacatctgcccccgtgttcctcctcctcggcctggtggacggaacagacagacgcccacccgctgctgttcctgctctgccttggcatctatctgctcaacgccctgagcaacctgagcatggtggcgctggtgagatctgacggggccctccgctcccccatgtattacttcttgggtcacctgagcctcgtggacgtctgctttaccaccgtcacggtccccaggctgctggccggcctgctccacccgggccaggccatatccttccaggcgtgctttgccgagatgtacttcttcgtggctctgggcatcaccgagagctacctcccggcggccatgtcctacgaccgcgcgacggcggcgtgccggcccctgcgctacggcgcgctggtgacgccatgggcgctgcgcctcgctggtgcgtgcgtcgtgggccgtgacgcacctgcactcgctgctgcacacgctgctcctctccgcgctctcctacccctaccccacccccgtgcgccccttcttttgcgacatgacggtgatgctgagcttggcgacctcggacacgtccgccgcggagacggccatcttctccgagggcctggccgtggtgttggccccgctgctcctcgtgttccttttcctacgcgcgcatcctggtcgcggtgctcggcttgcgcgcggccggcgccgcgccttctccacctgcggggcccacctagtggcggtggcggtggcggtggcgcttttctttggctctgtcctctccgtgtatttcccgccgtcgtctgcctactcagcccgctacgaccgcctggccagcgtggtctacgctgtcatcacgccgaccttgaaccctttcatcaacagccttcgcaacaaagaggtcaagggcgccctgaaaagggggctcagatggagggctgcaccccaagaggcgtgagggcaaatctggctcactggcattttcatgataacagttacagaaaaaaaaaaccttgttttttggctttctaaagcactattaatttcgatctaccctgtcttatttctgttaaataagaaattagacccgaagtaaatatgacaaagtgtttactgtagtgatagatacatagtaggttgaattcgtgtgttgtctga

SEQ ID NO: 982 - protein, 473 aa, Homo sapiens
MSCWVHLPDGVVARQRGSSLPSRGGRAEAPLTSRVGRLARRGADLLTSLPDGAAGRAEGLLTSQRGGCRAEGLLTSHTGRLPGGGAPHFSDGAVARRRVSSLLRRGGQAETLLTSQTGSRPAPASSTEHAALAAPSLLQLASPQQLLQMGHHYHFCINYGSQSTPWLRPTSHLPPCSSSSAWWTEQTDAHPLLFLLCLGIYLLNALSNLSMVALVRSDGALRSPMYYFLGHLSLVDVCFTTVTVPRLLAGLLHPGQAISFQACFAEMYFFVALGITESYLPAAMSYDRATAACRPLRYGALVRASWAVTHLHSLLHTLLLSALSYPYPTPVRPFFCDMTVMLSLATSDTSAAETAIFSEGLAVVLAPLLLVFLFLRAHPGRGARLARGRRRAFSTCGAHLVAVAVAVALFFGSVLSVYFPPSSAYSARYDRLASVVYAVITPTLNPFINSLRNKEVKGALKRGLRWRAAPQEA

SEQ ID NO: 983 - DNA, 1195 bp, Homo sapiens
  source (1)..(1195)
  CDS (201)..(995)
ttaatcactctattttacctattctgttgcctcctctctgtctctttacaagcagcaggaaaatgggacctgtctggtgacagaattcctgatgatgggattctccaacctcccacacctgaggaacacactcttcaccctgttcttccttacctacctggtcaccctcggtggcaacgtcaccatcatcaccatcacccatgcggataggtcccgccacactcccatgtaccacttcctggtggtgctgtccctctcggagacctgctatacacgctggtcaccatccccagcatgctggctcatctgctgatggagaccaggccatctccatccctggctgtcaggctcagatgtttttcttcctgggtctgggatgcagccactgcttcctccttaccctgatgggttatgaccgctatgtggccatctgccaccccctgcgctactctatggtcatgagacccaccgtttgcctctgcctgggagccctggttttctgctctgggttctcggtggccttgatcgagaccagcatgatcttctcatcgcccttttgcggcggagaccacgtggagcacttcttctgtgacatcgccccggtgctgaagctcagctgcgccaagagtgccagcaaggcgctgggcatctttttcctgagcgtcctggtggtgctgatgtccttcgtcccgatcctcttctcctatgccttcatcgtggctgccatcgtgaggatttccttggcagccggccggcgcaaggccttctccacctgtgtggcccacgtcaccgtggtcgtagtacattttgactgcgcctccatcatctacttgcgtccggagtccggggccaaccccgaccaggaccgcttggtggctgtgttctacacggtggtgatgccactgctgaaccctgtggtgtgcactctgtggaacaaggaggtgagagtggctctgaggaggaccctggcgtggagccgtggggtttttaaataagaatctgcttggctgggcacggtggctcacacctgtaatcccagcactttgggaggccaaggcgggcagattacctgaggtcaggagttggagaccaacctggcaaatgtggtgaaacaccgtctctgataaaaatacaaaaattagccgggcgtgatgatgcaggcctgcaattccagctactgcggaggctgaggcag

SEQ ID NO: 984 - protein, 264 aa, Homo sapiens
MRIGPATLPCTTSWWCCPSRRPAIHAGHHPQHAGSSADGDQAISIPGCQAQMFFFLGLGCSHCFLLTLMGYDRYVAICHPLRYSMVMRPTVCLCLGALVFCSGFSVALIETSMIFSSPFCGGDHVEHFFCDIAPVLKLSCAKSASKALGIFFLSVLVVLMSFVPILFSYAFIVAAIVRISLAAGRRKAFSTCVAHVTVVVVHFDCASIIYLRPESGANPDQDRLVAVFYTVVMPLLNPVVCTLWNKEVRVALRRTLAWSRGVFK

SEQ ID NO: 985 - DNA, 46130 bp, Homo sapiens
  source (1)..(46130)
  CDS (201)..(592)
  CDS (12705)..(13269)
  CDS (21811)..(22246)
  CDS (22328)..(22614)
  CDS (32554)..(32811)
  CDS (38155)..(38192)
  CDS (38338)..(38740)
  CDS (45757)..(45930)
attattgatgctgtgctgtattagcttcaagttttgtaaaagcagtaaagtaatatcaatacaaaaggcaacacttatttattttcttcccttagaatctaccccttttcaagatggtgtttgcctctgttgacgttgctcccgcagtctagaaaacacatttgattgtctaattatcccattttttgatcatcaaaaacatgggacccagaaaccaaacagctgtttcagaatttcttctcatgaaagtgacagaggacccagaactgaagttaatccctttcagcctgttcctgtccatgtacctggtcaccatcctggggaacctgctcattctcctggctgtcatctctgactcccacctccacacccccatgtacttccttctctttaatctctcctttactgacatctgtttaaccacaaccacagtcccaaagatcctagtgaacatccaagctcagaatcagagtatcacttacacaggctgcctcacccagatctgtcttgtcttggtttttgctggcttggaaagttgctttcttgcagtcatggcctacgaccgctatgtggccatttgccacccactgaggtacacagtcctcatgaatgtccatttctggggcttgctgattcttctctccatgttcatgagcactatggatgccctggttcagagtctgatggtattgcagctgtccttctgcaaaaacgttgaaatccctttgttcttctgtgaagtcgttcaggtcatcaagctcgcctgttctgacaccctcatcaacaacatcctcatatattttgcaagtagtgtatttggtgcaattcctctctctggaataattttctcttattctcaaatagtcacctctgttctgagaatgccatcagcaagaggaaagtataaagcgttttccacctgtggctgtcacctctctgttttttccttgttctatgggacagcttttggggtgtacattagttctgctgttgctgagtcttcccgaattactgctgtggcttcagtgatgtacactgtggtccctcaaatgatgaaccccttcatctacagcctgagaaataaggagatgaagaaagctttgaggaaacttattggtaggctgtttcctttttagcgatctttgtcctctgctttgaattggagcttctaaaataaatcatcataacaggattccttggtaagccagagtgcctgactcttgcatcgagatttacttttttttttttttttcgaggcagaatctcgctctgtcgcccaggctggagtacagtggcacgatctcggctcactgcaaactccgcctcccgggttcatgcaattctcctgcctcggcctcccgagtagctgggattacaggcacacaccaccacacctggattttttttgtatttttagtagagatggggtttcaccaggttggccagggtggtctcgaactcctgacttcaggtaatccacccacctcggcctcccaaagtgctgggattacaggcatgagccactatgcctgacctactttcttttttgtgatctttgtgctctgctttgaactgaagcttctaaaaggaatcaacatgacaggattccttggtaagccagagtgcctgactcttgcatcatgaagattttctttttctttctttctttttttttttttttgtgacagagtctcgctctgtcacccaggctggagtgcagtggcacgatctccgctcactgcaacctccgcctcctgggttcacgccattcccctgcctcagcctcctgagtagctgggactacaggcgcccgccaccatgccaggctaattttttgtatttttttagtagagatggggtttcaccgtgttggccaggatggtctcaatctcctgacctagtgatctgcccaccttggcctcccaaagtgctgggattacaggcgtgagtcaccgcgcccgacctttcaagattttcttaaagtgactagtctgcatcatggatgtgtgtgtgtgttttttgttgttgttgttgaaatcttgcctcttttggagctctgtcatgtgtcaaaaatgaattctattctcaaagctcagtttctttgcatgcggtgtttaaaaagttaacctgtggcaagtgttacagtgatttggttggtaaatattctcagaggaagaaaagcaggaggcgtctcacaggtcagggcaagaatccaaagaaggctgtgttcgcaacacagaattgatactgcctgattgaatatttagggccatatgaaatgcatgccagagtgaaacctattgtgcaaaatgggagctgattgttgataccagaattctgtaattttagagcccggtcactgctaaactgtctgtgcaggtcaacatcaacgtctacttactaccctcagttttatcatcaataaaattgctatcattagattatttcagtggtgagattttctttctttctttctttctttttttttttttttttttgagagacagagtctcgctcttgtcacccaggctggagtgcagcggtgcaatcttagctcactgcaaactccacctcccagattcaagctattctcctgcctcagcctcctcagtagctgggactacagacagctgccaccacacctggctaatctttgtatttttagtagagatggggttttgccgtattagcgaggctagtctcaaactcctgacctttggatccgcccacctcagcctcccaaaagtgctaggattacaggtgtgagccactgtgcccggcctagtggtgagatattctatcttgatcagtgaagaagtcggctttagtgaaagaaatgttgattataatatactcaaataataaagagagctacatttctttgcaaatatatcagaggtagggaatgtagagaataattcacttactccttcttcttttggctttcttttttttttagacagcctggctctgtcacccaggctgaagtgcagtggcacaatctcagctcactgcaacctctgcctcctgggttcaagtgattctcctgcctcagcctcccaagtagctgggattacaggtgcacaccaccacacctggctaagttttgcattttcagtagagatggggtttcaccgtgttggccagggtgctcttgaactccggacctcaagtgatttgcccacctcagcctcctaaagtgctgggattacaggcgtgagccaccgtgcccggctgtggctttcttttagggctggttcccctcatggacccagatggctgtagcaaatacagacgtaatacccagacatgatgcccagagacagaaatctgactcttcttcccagatctattgataaatgggattgcatagagtaatccaaaagatatcacctttaatctcaccacagagagatagatcatatattttttcttaatctaattcctggtgagggggaaatgattagtatgagagccttagactgaccatataaagtataattcctattgggaagtccactctggtgttttttggtggtttttttggttgtttgtttttttgtttgtttttgagatggagcctgtcacctgggcaggagtgcaaaggtgcaatctaggctcactgcaacttccgcctccctggttcaagagattctcctgcttcagcctcctgagtagctgggattacaggcatgcgccaccatgcccagctaatttttgttcttttttttttttttagtagagatggggtttccccaagttggccaagctggtctcgaactcctggccacaggtgatctgcccacctctgcttcccaaagtgctgggattacaggcgtgagccaccacacccggctgggaactccactctgataagcactacaaacacttaattcaatgcccagcacctcctaagtattcagtataataatgtggaatcattgtgttccataaccagtctataatcataaatcctataatgctattgttctcacatatttttccctcttgttttagaaattagaattgttccccttgttgcatttatcatccacttattaaacctgaattgtagaataaaataaataattattaggtaggaaggacaaaggttgatcatctttttttgacatcttacttggtttagaacagtcccattgatttatttgtaagaatgttatctaagttctcgctttccccctcagtcatcttcccttgctatgattctaacccatctcctttggagaccaaaagaaaaatcttacttggctgggcacggtgactcacgcctgtaatcccagcactttgagaggccaaggcagggggatcacctgaggtcaggagatcgagatcagcctggccaacatggtgaaaccccatctctactaaaaatttaaaaattagctgggcatggtagcgggcaccttgtggtcccagctgctcgggaagctgaggttgtggtgagccaagatagtgccactgcactccaacctggcaacagagcgagactccgtctcaaaaaataaattaaaaaaaaaaaaagacaagaaagaaagaaagagagagagaaagaaagaaaaggaaagaaagaaaggaagaaagaaagaaggaaagaaagaaggaaagaaaggaagaaagaaagaaagaaagaaagaaagaaagaaagaaagaaagaaaaagaatcatcattgaataaaagtaattctatcattgccgtgttagaggactcactgctgccttggggctgtcatgaaaacctttcgaatgtttctttacaaggacagttctaccatggagaagtactttagttagagaagaagatattgagtgtgaaataagacaggagaaaagaaaagttagcaaggtagtgacatcgcttatttcataaccacaaaaaagcaggaagagtatatgtatatatatgtcctcctttgactgatttaatggttttgactttattctgtcttctgatattagtgcagcctccgcagctgtcatctgcatactatttgcatgaaatacatctgtctatccatactcttactgttaccctgttttgtctcgagtctaaaacaagtctcttctaaatatagttgaatcaatttttagtatttatgctgacaaatactgccttttgtttggatagtttaatcctttatctttttttttttttttttagtctcattctatcacccaggctggagtgcagtggtgtgatctcagctcactgcaacctcggcctccagggttcaagcaattctcctgcctcagcttcccgagtagctgggattacaggtgcatgccaccacgcctggctaatttttgtatttttagtagagacggggtttcatcatgttagccagattggtctcgatctcctgaccttatgattcacccacttcaatctcccaaagtgctgggattgcaggtgtgagcaaccgcacccggccaatccttttattttttaacatgattgctgattaggagagacttaattctgccattgctgtgttctatgtgttttatacgtttcagttttctgtttcctcgattactgccttgttctgtgtccagttgatttttctgtcgtgaatcctagtttcagtcatttggagacattctccatggtgggattagtggatcacatcgtaattccatttttagttttctgaggaacctctatactgttttccataatggctcttctttgtggttcttgttctataaagcactgggagagaccagagaccagatctccctgcttccagtcactgacctttgttatagattaactgcctcctttactgtcctgtacctaactcagaccagatggtacacaggaccccacgactgttatgtcatcattgtaaaatgttaaatacaccttccctaaaagaaaaaaccacccagactaatcagttgcattaaaatgcaacacaatgcaattgttactgtttagaagaataataccaaatattgtaactatgcattaagccttaaagatgttgaaattctgttaaactgggcttcatgcagtagttcacacctgtaatcccagggctttaggaggcagaggcaggtggatcacttgaggtcaggagtttgagaccagcctgaccaacatggcaaaaccccatctctactaaaaatacaaaaattagccggacgtggtggcaggtgcctgtaatcccagctactcaggaggctgaggcacgagaatcacttgaacctggaaggcggaggctgcagtgagctgagatcacaccactgcactccagccctgggcaacagagcaagactgtgtctcaaaaaaaaaaaaaaaaaaaatagaaaaaagaaattctgttaaacttccctgaattttgcctacataaacaatctcaaacttttgcaccttgaaacactcacttcccttctttggaagctgtgcttccctggtgacttgtctcagacatcgtgcttgaataaactgtctttagactagattctggctgggtgtggtggctcttgtaataccagcactttgagaggccgaggtgggaaaatcgcttgagcccaggagttcaaagccagcttgggcaacatagagagacccccatctctctgaaaaaaaaaataaaaaattactcagacgtgttggtgcacatctgtagtcccagctacatgggaggctgaagtgggaggatcgcttgggctcaagaagttgaggctgcagtgagctatgattgcaccactgcactccagccggggcaacagagccagatcctgtctctaaaaataataaaacaaactagattctgacccttttgattattttagattgacagatcaactgggggaacacagattattattactggcataatggacataacatcttgaaatctcaggttgaatactgttgcttgccagatactacctgtgtggtcagagattgaagaaccttaaaagacaggtaacgaagcaaggaaaattggggcagcttacacattttttttttttaagatggagtcttgctctgtcgcccaggctggagtgtagtggcacaatctgagctcactgcaacctctgccttctgggttcaagcgattctcctgtctcagcctcctgaatagctgggattacaggtgtgcgccacctcggctggctaatttttgtatttttagtagagacggagtttcaccatgttggtcattgtggtcttgaactcttgacctcgtgatccgcctgcctcagcctcccaaagtgctgggattacaggcgtgagccactgtgcccagctagtttacatgtaagacccaaacttgcagatggcttacaggttaagggttttttgtttttgtttttgtttttttttttgagatggagtcttgctctgtcacccaggctggagtgtagggacacgatctcagctcactgcaacctccacctcctgggttcaagcgattctcctgcctcagcctcccgagtagctgggactacaggtgcctgtcaccacgcctggctaatttttgtatttttagtacagacaaggtttcaccatattggccaggctggtctcaaactcctgacctcaggttatccacccacctcagcctcccaaagtgctgggattacatgcataagccaccacgcccagcatcaaatctcatctctactaaaaatacaaaaattagccaggtgtggtggcactcgcctgtaatcccagctactctggaggctgaggcacaagaatcacttgaacccagaggcagaggttgcagtgagctgagatggcgccactgcattccggcctgggtgatagagtgagactgtctcaaaaaaaaaaaaaaaaaaaaaaaaaaaagaataagaaagaaagaaagaagaaaaaagaaaaccttcatgttggttatacctgtcttctggcacagctgctggcattcacctacgcaggctttcagcttgcttacctatgcttgcagcttgatttttcaggctactttttgcctgaaaagaaatgatttgggggctgctttttattaaaaagaaaaaccttacccaggacttctgtaccctcactaactgcctaaataatttctttttaattcatatgctattattaggttaatttatagctacttgtggcaacagcaagcagttttatgagatgaatgcatagttcaaaggaggggaggaggggtgtggtttctgtctcattttaatgtctttccgggtctgacaatgaagagaactcacattcttcagatcaaaatccttttttttactagacgaatggtatgtgttctgggagcaagattcgtgaagtggaggtgagcagaaacaatggagagatatggatggtgtacacgtggcctcaggggacagggactcagccatcccgaattcctcactcctctagtcttggtctttaaggatgtgcactcctgggatcagaacgatggtaaaatagccagtgtaatgaggagcgttggatattgaggtcccagggatatagacagtgcaacaagtcaggctgtaagcacctcactgaacatctcttacccagctcggaagctgcatcagaacctccttccagacatgatatttttgaccaggactcgagtctgtctgcacttcctgaggatagatcatcctctgcaatatccatgtgagttgttgagcatcatttttgttgaagccaatcagttaacccaaagtcctttagttaattaatgctttggaaatgagggcaggtggttttgttttttggggtttttttagagacaaggtctcactctgttgcctggaaggagtgtggtgactcgatcatagctcactgcagtcttgaattcctggatcaaccaatccttcagcctcagcctactgagtaactgggactacaggtgcatgccattacactttgcaaatttttaaattttttttgtagacacaggttctcactacgttgcccaggctggtcttacactcctggcctcttgtactcccgcctcagcctcccaaaggacccggattatagatgtgagccacagtgcctggctatataaagcttttaaaatgcaacacaatgccattgttattatttggaagaataatatcaaatataatgaaaggtatagaagaataatatagatcaagtgtgtgtactggttcccctagggaagggaaaaaaaatcaaaaacatgaagcggtggttttgaaatatgcacttttttttttttttttttgagatggaatcttgctctgtcacccaggctggagtgcagtggcatgatctcggctcactgcaacctccgcctcccaggttcaagcgattctcctgtagagacggagtttcaccatattggtcagctggtcttgaactcctgacctcagatgatccacctgcctcagcctcccaaaatgctgggattacaggcatgagccaccatgcccagcctcaaatacacactttattgcaataaaaatattttttactttttgcaataaaaatatctaatcaaggatggtgaattgtgtgaatttttttttttttttttgagacacagtctccctctgtcacccaggctggagtgcagtggcacgatctcggcttactgcaacctctgcctctcaggtgcaagcgattctcctgcctcagcctcccaagtagctggggttacaggcgtgcaccacaccaccacacccagctaatttttttgtatttgtagtaaagacggggtttcgccatattggccaggctgatctcaaactcttgatctcaggtgatccacctgcctcagcctcccaaagtgctgggattataggcttgagccaccacgcctggccttgtgtgaatcttatatcgttgactgatgggtagccagcccttcattattctccgtactttctgaataattcacacatgaataatctataataaaaatgaatatatctgtgcaggttcaaaaacgtttagaatttttctcacactgtacactgtttatcatacaaaaattttcttcctttcttcctttctttctccttttctttttctctctctttctcttcccttctctcttttttttgtgaatcatacatcagttgttaaaaaacaagctaaactttttttttttttaagacagagtgtcactctgtcacccaggctggagtgcaatggcacaatcttggcacactgcaacctccatttcctgggttcaagagattctcctgcctcagcctcccaagtagctgggattgcaggtgcatgccaccatgcctggctaatatttgtaattttaatagacatggggtttcaccatgttggctaggctggtctcgaactcctgacctcatgatccgcctgccttagcctcccaaagtgctgggattacaggcgtgaaccaccacgcacagcctgttgagggtttttaacataaagcaatgttgaattttattaaaagccttttttgcatctattgagataataatgtggtttttgggtttagttctttttatgtgatgaatcacatttattgatttctgtatgttgaaccaatcttgcatcagagggattaaagtctatttgatagtggtggataagttttttgatgtggataatcatgttttataccttgttttattctcagcacgtagaagaagaaatgaaattgagttagtgtcttataataatttgtttcaataaagaaaatggagaggccaggcgcagtggctcacacctgtaatcccagcactttgggaggccgaggcaggtggatcacaaggtcaggagttccagaccagtctggctaagatagtgaaacccgtctctactaaaaatacaaaaattagccgggtgcggtggctggcgcctgtaatcccagctactttggaggacgaggcaggaaaatagcttgaacccgggaggcggaggttgcagggagccgagatcgcgccactgtattctaacctgggtgacagagcaagactccatctcgaaaaaaagaaaaagaaaaagaaaaaaagaaaagaaaatggagggaacaggaggagagagaaaagaaatgtaggaagaaagtaagcaaggggaaggatttgaatattcacttgggttcacagtgcacactagagaatttaaaaatttgtttgtttgttttttgagatggagtctcgctctgttgcccaggctggagtgcagtggcgcgatctcggctcactgcaagctctgcctcctgggttcacgccattctcctgcctcagcctcccgagtagctgggaccacaggcgcccaccaccacgccccgataattttttgtatttttagtagacatggggtttcaccgtgttagccaggatggtctcgattgcctgaccccgtgatctgcccgcctcggcctcccaaagtgctgggattacaagcatgagccaccacgccccaccaagaattttaaaattttttaaatgtcaagttttatcatttttaaaagtttaagaatgacacaaactgacaaaatgttagcaatgttgcagtatgtttctatattcatttgttttgggtaacattgaaaattggatgattgtcttagaaaatcacatgtgaaagatgacaaataggtaatatttagcatgctaactctgactttctgtctatctctagcgctgtttggagctctatgctgataagaatcccaaaggtacatgtggtcttagcaggaaagagcactagactagactagaagtgtctgccatgggtaagggaacagcagaaagaataaagataaaagatttccacattctttggccgagcgtgatggctcacacctgtaatcccaggacttcgggagcctgaggcaggcggatcacttgaagtcaggagttcgagaccagcctgacctacatggtgagaccctgtctctactaaacatacgaaaaaaaaaatttttttttaattagccaaatatggtgctgtgcacctgtaaccctagctacttgagaggctgaggaaggagactcacttgaacctgggaggtggagcttgcagtgagctaagatcacaccactgcactccagcctgggcgacagagtgagaccctatctcccgaaaaaaaaaaaaaaaaaacatttccacattttttgattaagaaaactccactcctgggccaggcatggtggctcaagcctgtaatcccagcactttgggaggctgaggcaggtggatcacttgaggtcaggagttcgagatcagcctgaccaacatggtgagacccccacccccgccgtctctactaaaaacacacacacacacacacaaaattagccaggaatggtggtgtgcacctgtaaccacagctacttgggaggctgaggccagagaatcacttgaacatggaggtggagcttgcaataagctaagattacaccactgcattccagcctggtggacagagtgagaccctgtctcaaaaaaaaaaaaaaaaaaaaaaagatttccacattttttgattaagaaaactccattcctaagtaaatgttttgaactgtttctcaaaattcagcatctatcaaaaacatctacaaggcttgtgaaagaataaactgtcggttctcatccccagagtttatcagcaagaagtctggggaggggagcaagattttgcgtttctgtcatgttctcgagtgatgccgatgcagctgctgcttacagattttattatcttttccatcagattcatcatcaacagcatggaagcgagaaaccaaacagctatttcaaaattccttctcctgggactgatagaggatccggaactgcagcccgtccttttcagcctgttcctgtccatgtacttggtcaccatcctggggaacctgctcatcctcttggctgtcatctctgactctcacctccacacccccatgtacttcttcctctccaatctctcctttttggacatttgtttaagcacaaccacgatcccaaagatgctggtgaacatccaagctcagaatcggagcatcacgtactcaggctgcctcacccagatctgctttgtcttgttttttgctggcttggaaaattgtctccttgcagcaatggcctatgaccgctatgtggccatttgtcacccccttagatacacagtcatcatgaacccccgcctctgtggcctgctgattcttctctctctgttgactagtgttgtgaatgcccttcttctcagcctgatggtgttgaggctgtccttctgcacagacctggaaatcccgctcttcttctgtgaactggctcaggtcatccaactcacctgttcagacaccctcatcaataacatcctgatatattttgcagcttgcatatttggtggtgttcctctgtctggaatcattttgtcttacactcagatcacctcctgtgttttgagaatgccatcagcaagtggaaagcacaaagcagtttccacctgtgggtctcacctctccattgttctcttgttctatggggcaggtttgggggtgtacattagttctgtggttactgactcacctaggaagactgcagtggcttcagtgatgtattctgtgttccctcaaatggtgaacccctttatctatagtctgaggaataaggacatgaaaggaaccttgaggaagttcatagggaggataccttctcttctgtggtgtgccatttgctttggattcaggtttctagagtaagtcaaagtgacaggattcctggtgagctagaatgcctgactctttgttttgttttgtttttttctctgagatggagtctttctctgtctcccaggctggagtgcaatggcacgacctcggctcactgcaacttccgcctccgggttcaagccatcctcctgcctcagcctcctgagtagtggggattacaggcgcctgccaccatgcctggctaatttttgtatttttagtagagatagagtttcaccatgttggccaggctggtctcaaactcctgacgtcaggtgatccacccgcctcggcctcccaaagtgctgggattacaggcgtgagacaatgcgcccagcctgcctgactctttcatcaccaagttcttctaaaatgtctagatgacataaaagccaactacatttccactccggcttgaaatctgactttgctttttatgtctggatctgtgatgatggacatgtgattttaattctctagactcaatttctttgctcaggccatagactcagaggctgagcccaagttatttatttatttatttagagacagagtctcgctctgtcggccaggctggagtgcagtggtgtgatctcggctcactgtaatctctgcctcccaggttcaagcgattctcccgcctcagcctactgagtagctgggactacaggtgcacgacaccacacccggctaatttttgtacttttagtagaggtgaggtttcatcatgctggccagggtggtctcgatctcctgaccttgtgatccattcgcctcggcctcccaaagttctgggattactgggattagaggcgtgagccaccgctcctggctaagtgatttttttttaatggattagtctcagaagaagaaaagttgtggaaggtagatagttcaggaggataggtcaggaaaatgtatttttggttttttgtttagtttaggttttttgttttttgttttgctgagacggagtcttgctctgtccaccaggctggagtgcaatggcgcaatctcggctaactgcaacctccgccttctgggttcaagcgattctcctacctcaggctcccaagtagctgggcagttttgttttttgtttctttttttccatagacagggtcttgctttgtcacctaggctggaatgcaatgacatgatcatagctccctgcagccccaaactccaggactccagggctcaaactccagggaccctcctacctcagcctcctaggaagctaggactccaggcatgcaccaccacgtccagtgtggggtgtggtgtagagatggactctggctatgttgcccaggttggtctcaaaacctaggttcaagtgatcctcctgccatggcctcccaaagatctgagattagtggtgaagtcactgtgcgctgccaggaaaaggatttaagcgaggttgttgttatatctggagacaagcttccaccttattgcgtatttagggtcttgtcaattgcaccccagtgtagacctacagtgggtcaagggagctaagttttcatacccaatttagtaactactgggaccagtcactggtaaactatattctccctagacaacattagcatctattatactcagttttatcatcaaaaaattagcatgattagattatcttagtgatttgagattattgtgagatatttgaacttcataagtgaggataccttaggttccagtttaaagaataggagccctgggctgggcacagtggctcacacctgtaatcccagcactttgggaggccaaggtgggtggatcacttgaggtcaggagttcaaaactggcctggcccacgtggtgaaaccccatctctactaaaaatacaaaagttagccatgtgtggtagctggagcctgtaatcccagctactcgggaggctgaggcaggagaattgcttgagcccgcgaggcggaggttgcagtgagccgagattgcaccactgcactccagcctgggagacagagcaagactcaaaaaataaataaataaataaataaataaatagcacccctaactctaatatgctcaaacagtaaagacagttctctttcattacaaggacctcagaattaaggaatgtgcacgaataggagagggcttcattcagtccttcacgaggttccctccccccagcactggttttcctctgactgcaacaggtagttgcagtcaatgcaagagacatatctagacctgattcccagagacagaaaatggagaacccttccctgggtccattgataatagataactttcatggagtcaaccagaagacatttctgtcatgagttggctcatggccctcagaagactatatccacattttaatcctctcgcttgtgaatctgagcttttatttatttatttatttatttatttatttatttatttatctatctatctgagctggagtcttgccctgtcgcccaggctggagtgcagtggcgtgatctcggctcactgcaacctccgcttcccgggttcaagagatcctccttcctctgcctcctgagtagctgggattacaggtgcctgccaccacagcctgctaatttttatatttttagtagagatgggtttttgccatgttggccaggctggtcttgaacttctggactcaagtgatacaattgcctcagcctcccaaaatgctgggattacagacgtgagccaccgcacctggccttaaatcatatgacaaaagggtgaatgtgacttatttgggaaaagggtctttgcagagaagcagcttaccctggattacctgggcaggctctaaatgtaaccacatgttttcttataagataggcagaggtggaggccaggcgcagtggttcatccttgtaattccaacacgttgggaggctgaggcaagagaattgcttgaggccaggagtttgaacccagctgggcaacaaaatcagaccctgttacaaaaaattttaaaaattagcttggcacagtggtgtgtacctgtagtcccaattacttgagaggctgaaatgggaggatcgcttgagcccaggagttggagactgcagtgagctatgattgcaccattgcactccagcctgggcaacagagtgagattcagtctcaaacaaaaaaaaaaaaaaaagaaaaaaaaagacagaagtggaggaaacacaaagaaaaggaagaagtaatgtaaccatggagacaggaattttattgatgctgtatttgattagtgatttttttattaattagtatttgattgacagtcttgtacatttttgccctacaaatctgtccttttaatatgcatgttgtttatagccctagacaatttattaatcaaattttattctttttgacattgtaaaagttgaaacttcatgaacgaattttgtgccctgattgttgtttccttttttatttttttttgagaagggtcttactctcacccaggctgggaggctgaggcagaagaatcgtttgaacccgggagacggaggtttgcaatgagctaagatcataccactgcactccagcctgggcaacacagcaagactccatctaaaaaaaaaaaagttgtcatgcttttcatcatctggtggcattctcagaatgaaagagacaatttgaatgcaagagaaagtaataccacatattcttatgcaggaatgtaaaatttttaaaaatacacacatccttatgaattaattttatttttaagctgaaatgtagtattaatctttctgatattgtttgctaaagtgaggacacctttaaaggtatgtagagaaagaggtgttgaatccagtacagaaggaagatgaggccgggcgctgtggctcatgcctgaaatcccagcactttgggaggctgaggcaggcggatcacctgaggtcaggagctcaagaccagcctggccaacatggtgaaaccctgtctctattaaaaatacaaaaattagccgggcatggtggcacatacctgtagtcccagctactccggaggctgaggcaggagaatcgcttgaacctgggaagcggaggttgcagtgagctgagatcttgccactgcactccagcctggcgacagagcaagactttgtctcaaaataaataaataaataaataaataaaataaacaaggatgagagtttcctactaggcaatttatgtgtgtgtgtgttttttttttgttgttgtttttttgttttgtttttttttagcaggatctcactctgttgcccaggctagagtgcagtggtgtgatcatggctcactgcagcctcaaccaccccaggctcaggtgacgcatcctctcacctcagcctctggagtagctgagactacaggttcacaccaccacatctggctaatttttgtattttttgtagagagggggtttcactatgttgcacagggtagtctcaaactcctgagctcgtgcagtccactcgcctcagcttccaaagtgccaggattacaggcatgagccactgcaccggccttttctccctgtggatctcacctctcagaaacccatttctagagtgtcatcattccactaacatgccagctacttcggactttaagctgtgaaatatacaaaagagaaattcataatgaatgatccggaaaacctgattaaggtcttcaaatacaagagaagatcatcatggttaagggtgagaatttggaatcagaccaactggctttgaatcccacctgtgctttgtaaataaccgtataattgttgacactttatttcactgttccaagctctatttgctcccctataaagttagcattatcggccaggcgcagtggctcacacctgcaatcccagcactttgggaggccgaggcgggtggatcacctgaggtcaggagtgcgagaccagcctgggcaacatggtgaaatgctgtctgtactaaaaatacaaaaaagtagctgggcgtggtggcacacacctgtaatcccagctactcgggaggctgaggcaggagaatcacttgaaccggggaggtggaggttgcaatgagccaagatggcgccattgcactccagcctgggtgacacagtgaaactccttctcaaaaaaaaatttttttaagttagcattatcatatttatttacgtatttaggaagacttctatatcagtgtttgtgttgctacaaggaatacctgagtctgggttatttatttatttatttattttgagacagagtgtcgctcttgtcgcccaggcaggagtgcagtggtgcagtctcagctcactgcaacctctgccccctgggttcaagtgattctcctgcctcagcctctccagaagctgggattacaggagtgcgccaccacgcccagctaatttttgtatttttggtagagacagggtttcaccatgttggccagactgcttttgagctcctgacctcaggtgatctgcctgcctcagcctcccaaagtgctgggattataggcgtgagccactgagcccagcctagagtctgggtaatttataaagaaaagaggtttatttgtctcacagttctgcagactgtacaagaagggtggtgccatcatctacttctggtgcagacctcaggaagcttccaatcacggtggaagggcaaggggagctggcaagtcaaatggtgagagaggaagagagagaggggaggagtgccagggtctttgtgaagtagtagagcaagaacttcctcattactatggggagggcactaaattcttcatgatgaatctgcccccataatcaaacacctctgcctaggcctcacctccgacactggggatcacatttcaacataagatctggaggagagaaacatccacattatatcaacttgagacacttcaacttatttatttatttatttatttattttgagacagtctcgctccatcccttaggctgaagtgcaggttgcagtggtgccatctcggcccactgcaacctccgcctcccaggttcaagtgattctcctgcctcagcctcccgagtagctgggattacaggcacgccccaccacacctgactaatttttatatttttagtagagatggggttttgccatgttggccaggctggtcttgaactcctgacctcaggtgatctgcctgccttggcctcccaaagtgctgggattacaggtgtaagccacagcacccgggacacttctgctttattagtgactcatataaagacaaggggtaaaaacaatgattgggccaggcgtggtggctgatgtctgtaatcccaacattttgggaggccaaggcaggtggatcacctgaggtcaggagttcaagaccagcctggccaacatggtgaaatcccgtctctactaaaaatacaaaaaaactagctgggtgtggtggtgcgctcctgtagtcccagctactggggaggctgaggcggagaattgcatgaacccaggaggtggaggttgcagtgagctgagatagtgccactacactccagcctgggcaacagagtgagactctgtctcaaaaaaaaaaaaaaaaaattttggccaggtgtggtggctcacacctgtaatcccagcattttgagaggctgagatgggaggatggcttgagctcaggagtttgagagcagcctggacaacatagtgagaccccatctctaccaaaaaaatatatacaaataaaaataaattagccgggcatggtgctgcatgcctctggtcccaactacttgggaggctgaggtgggaggactgcttgagcccaggaggtcaagactgcagtgagctataatcatgccgctgcactccagcctgggcaacagagccccagaatgattatctttcctaacggagtttggagacagagtcggtccagccacagaaccacatggcggcatttcactccttcacgtgttgacatcttcctaagactcctcccctcacagtcactgtgttattcggccagggctggttataacaaaacaccgcagactgcgtggctaaataagtgaagtggattgtctcatggttctgagggtcagaagcccaagatcgacgtgccgttgggattggtttttggtgaagtctttcttccgtggcagatagaccccctttcgctgtgtcctcaaatggcctttccagccaggcttggtggctcacgcctgtaatcccagcactttgggaggccaaggtgggtggatcatttgaggtcaggaggtcgagaacagcctggcccacatggtaaaaccctgtctccaccaaaaatacaaaaattagccgggtatggtgatgggtgcctgtagttccagctagtctggagggtgaggcaggaggatcacttgaacccagaggcggaggttgcagtgagcagagatcatgccattgcactccagcctgggtgacagaatgagactctgtctcaaaaacaaaaaagaaaacaaaaagaaaaacagttaccagaccatcctgagacttcccgtgaaacttctgcggctgggtagtatggcaaaaccctgtctgtacaaaagatacaaaaattagctgagcatggtggtatgtgcctatggtcctagctactcggaaggctgaggtgggaggattgcttcagccagggaggtcaaggctgcaatgagccgtgatcatgccactgcactccagcctgggcaacagaacgagactctgtctcaaaaaacaaaaacaaacaaaaaattcaaagtgaggctcggcgtggtagctcacacctgtaatcctaggatgttaggaggctgagggggaagtactgcttgagcccaggagttccagaccagcctggccaaattagtgagaccctgtctctagtaaaacaatgcacacagagagagaagtttgaagctgcagtgatctatgatcacgccactgcactccagcacgggcaacatagtgagaccccatctctaaataataataataataataaaattcaaagtgcctactcttcaactcatgcaattccagatgttagcccaagactcccagatgtatatattctaccccccagaagttcctgagtcctggtggtcaggaagatgaggtgatctttctgttgaccagcttcctgagagcccctttcaggtctctgttcctcaagctgtagatgaagggattcagcatgggggtgactgctgtgtacatcaccgcagaagctttctccttcacagtggtgaggaccgaggagggacacagatagacgccaatggtggtcccatagaagagagcaaccacagacaggtgggagctgcaggtggagaaggctttcttcctgccgcctgcagaggggaccttcatgatggccacaaggatgcgagcataggaggccaggatgcagacaaagggcgtggctatcaccatccctgccacaatgaggatgaagatcctattcacagaggtgtccgtgcacgaaagtcggaggatgggagtgaggtcgcagaagtagtgaggcacctcatggctgccgcagaaaacgagacgggccatcaggaggatgtgagtgagtgagatgaagcaggaaaacgcccagagggcgccgaccagcaggcgacagaggcgtaggctcatgatcttggcgtagtgcaatgggtggcagatggccacgaaccggtcataagccatcatggcgattatgacgctgtccacgatgccaaagaaatggaagaagtacatctggatcaggcagcagggataagagatggccttgctcccggtttgaaggctcaccagcatcttagggatggtgttggtggccagacagaaatcaaccagggacaggttggccaggaagaagtacatgggggtgtggaggtgggagtctatgctgatggccaggatgatgagcaggttccccacgaccatgaccaggtacatgcagaagaacagggaaaagagaagcgtctcctgctctggcttttctgagagtcccaggaggatgaattgagatgcactggtttggtttcttggttccatgggtgtgattcctctggaagtatggaaaggggaggttataggaatgacagggagatggttttggaaagttagatgcgatcacatcccagttctcatttgggctaattatgagaccagatgtgtatatatatatatgtgtgtgtgtgtgtgtgtgtgtgtgtgtgtatatatagaatatatatgtgtgtgtgtatatatatatatatagagagagagagagagagaatatatgtaaatatattccacacatgtacggtgttgtaactttagagaccctgtctctaaaatagaaatattatatatattattacatattatgtatatatacatatatatatatttttgagacagagtcttgctttgtcacccaggttggagtacagtcgtgcaatctctgctcactgcaacctctgcctcctgggttcaagtgattctcctgcctcagcctcatgagtagctgggactacaggtgcccaccaccacgtccggctaattttttgtacttttagtagaaatggggtttcaccatattggccaggctggtctcgaactcctgacctcgtgatccgcccacctcggcctcccaaagtgctgggattacaggcgtgagccaccacgccaggctaaagatattattttttagagacagggtcttgctgtgtcacccaggagggagtgcagtggtgcaatcatagttcattgcaaccttgaactcctgggctcaagccagcctcctgccacagcctctctagtagcggggtctacaggcacacaccataagtaagcctggcttatttatcttttcttgtgtgtggtggagacaggatcttgctatgttgtccaggctggtcttgaattcctgagcttgagtgatcctcccatctaggccttccaaagtgctacaattgcaggtgtgagctaccgcacttggcctgacaacagcttatatataggttgcactttaaaccatggatgaagtatttatagcaactcttcttcttttttgattaattaaaaaatgttagggccaggcacgatgggtcccatctgtaatcacagcactttgggagggcgaggtgggcagagagcttgaatgcaggtgttcaagagcagcctgagcaacatggcaaaaccccttctctaccaaaaaaaaaaaaaaaaaaaaaaaaaaagccaggcatgatggtggacacctatagttccaagtactcgggaggctgaggtgggaagattgcttgacccttggagcagaggttgcagtgagccaagatcacaccacggtactccagcctggtgacagagcaagactacatctcaataacaacaacaataataatagggttatacaaagcattctttccctcttttctttcttcctgacatggcaaactcaacatataaaaaaataaagtctattttctcccggagccactatgtccatgaatggaatcaccatccttccagatacctgtgtttgaaattttcagtcttcctcctttctacctccaccgtcaaaggcaatccatcaatgagtgttacatcctctacaagtcgaacttccttcctttgtttttttttttccttttgagacggggtcttgctctgttgcctaggctggagtgcagtggcacgatcttggctcactgtaatctctgcttcccaggctcaagcaattctcctgcctcaccctcccaagtagctgggattacaggagcacgccaccatgcccagctcacttttgtatttttagtagaaatggggtttaacccagctgagtatctggacactaaaataaaatagcaacgtgctccttagttcacatccaacagctttattcttagcatgtgtggcaattcttgattaattggaattaaaataaacaatagcacctgtggtgcaaatactatttaaaaaaaaaaaaagaaatggggtttaaccttgttggccaggctggtctcgaacgcctgacatcaggtgatccgcccacacttggcctcccaaagtgccgggattatgggtgtaaaccattgctcccagcctgaactttccattttttattttatctatttgttttttttgagacagagtctcgctctgtcactcgggctggagtgcggtggcacgatctcggctcactgcaagctccgcctcccaggttcacgccattctcctgcctcagactcccgagtagctgggactacaggcgcccaccaccacgcctggctaattttttgtactttttagtagagacggggtttcaccatgttagccaggatggtcttgatctcctgacctcgtgatctgcccgccttggcctctcaaagtgctgggattacaggcatgagccaccgcgcccgtcctgaactttttatttttatagtcatttccagtcatctcctctttccagacaccctaaatgaaaggctcttattacttctgagttgccaagttcactaatcttaagctagcctcatgcatccaattatcttcctttgaaacaatcctgaagtcggccgggcgcggtggctcatgcctgtcatcctagcactttgggaggccgaggcaggcggatcacctgaggtcgggagttcaagtctagcctgaccaacatggagaaaacccgtctctactaaaaatacaaaattagccgggcatggtggcgcatgcctgtaaacccagctactcaggaggctgaggcagaggttgcagtgagccccgattgcgccactgcactcctgcctgggcagcaagagcgaaactccatctcaaaaaaaagaaacaatcctgaagtcactaaattaatcttcctgcattacagttctgatcatgttacttttatatttttattttttatttttgtgatttctaatgaacaccttgcagatgtcacttttattcactcacgcattcgttcattcattttgtaaaaaattattggtaattgcaatatatagtgacaggatctggcctgagttgtggggacaaatatatgaaaatacacagaccctgtcctcaagacatttgaaatcaggaattgtttgtctttgttcatttttgtgaccagcatcttgtctgggatacagaagacataaacataattgttccatatacgcatgaatcagtgatggttatcctgtattgccaggcactgatcgaaggtctctgctaatttgctactcacgacaacagaataatgttagtgctatttcatgcaggaagaaatggaagcacagaagattaatacaatcaaatggggtttaactgagagcaggtggctggattagcccaagcattctaaatctagagcatgtactcttaatctctgtaattcatgaagcacgcatggattcatgaattcacagtttagtgagggagatgaactccaggcagcatttatcagattatgaggagcttggattaatagagaatcacaccccacacacagcacccctgaggattgtaagagcactccgaaaactgttgaggcagccagggatttttggaaaatgtgttggctttaggcagggcacagtggctcacacctgtaatcccagcactttgggaggctgagacaggcggattgcctgaggtcaggagttcgagaccagcctggccgacatggtgaaaccccgtctctactaaaaatacaaaaaattatccgggcgtagtggtgggcccctgtaatcctggctacttgggaggctgaggcaggagaatcgcttgaacccaggaggcggaggttgcagtgagctgagattgtgccattgcactccagccggggtgacaagagcgaaactctgtctcaaaaaaaaaaaaaaaaaaatgtggtagaaatacacaatggaaaactattcagccataaaaatgaaggagatcttgtcatttacagcaacatggaaagaattggagcatattataaatgaaataagccaggaacagaaagttaaacactgcatgttctcactcacatgtgaaagctaaaagaaaaaaaatgatttcatagaagtaaaaagaacagaggatactagagtctgggaagggtagagggagggggcagataggaagagatttgttacagcatacagaactacaggcaaattggaagaataagttctagtgttctatatccctgtaggatgaatacagttaacaataatatgctatatagctaaacagctagaaggaggatattgagtgttcccaacacagagaaatgataaatgtttgtgataatagatgtgctaattacccagatctgatcactatacattacatatatggaaacattactatgtacctcataaatatatacaattaaaacattttaaaaggagtcagagtattttttttttttttgagacagagtttcgctcttgttgctcaggcaggagtgcaatggtgcaatctcagctcactgcaacctctgcctcccggatataaatggttctctggcctcagcctcccgagtagctgggattacaggcacccaccaccacacctggctaatttttttgtatgtttactagagatggggtttcaccatgctggccaggctggtcttgaactcctgaccacaggtgatccgcccgcctcggccttccaaagtgctgggattacaggtgtgagccaccgtgcctggccgagtcagagtatttttccatctcaaggaagccagtgaatgctctgtgattaaactactaatggaatcaaggaactgatctcagacatcctcctgccctgacacctaagctttcactgaattactctgtcactcctcattcttccacagctcttgggaaaaatttaagtatcaggaacccgaagattcatcccttaagcttcttgatgagcctctctccaaggaagcaccagtcctatcctatctggacctctgcactctgtgtctaagatctctcagcctggaatacttgggaatctccaagggcttccaagacccaacatggggaataacacaaacttctgcctacagaagtactgaggaggaagccatctgttccttcaggcactcaagtgggcttggaaaagaaagtccaggctgggcgcagtggctcatgcttgtaataccagaactttgggaggctgaggcgggtggatcacctgaggtcaagagttggagaccagcgtggccattatggtgaaaccccagctccactaaaaatacaaaaattagctgggtgtggtggcgggcatctgtaattccagctacttgggaggctgaggcaggagaatctcttgaacctgagagatggaggttgcagtgagccaagatcatgccactgcactgcagcctgggtgacagagtaagactccatttcaaaaaaaaagtctagttacgaagaaaaacagtgctacaaataatcatggtttttaggtaaaggactggtagcatcacaactaaaccaggctgagctagtttggtaagaagagccattggattctgggctgacaagtgggtgctgattgaccagacagaatcttccagtgtcggccgagcacagtgaattccagtactttcggaggctgaggcgggtgatcacctgaggtcaggtgttcgagatcagcctgaccaacatggtgaaaccttgtctctactaaaaatacaaaattcacaaggcatggtggtgtatgcctgtaatcccagctactcgggaggctgaggtaggagaattgctcgaacctgggagtcagaggttgcagtgagccaagatcgtgccattgcactccagcctgggcaacaagagcaaaactccatctcggtgggggaaaaatgttcaaaaaatcagctgggtgtggtggcacatgcctgtagttccagctactctagaggctgaggcaggaggattgcttaagcccaggaggtagaagctgcagtgagctgtgattgtgccactgcactccagcctgaataacagagcaaggttctgtctctaaaataaataaatcagtaaatcaataaataataaaaaagaatcttccagtgtatctgagatcattgagcttggcttcattaattttaccaacattcgttcagtctctctctctctctctctctctcagctcactcactgggctatctttcctcttcttgacaccatcacccaggcatgagttaaactggctcagtgtcctcccagcaggtactagatgatgaagttagatgtttgggccagcagatgctacatagaaatactgggaagttgtcctcctggtccaaagaagaaaagctagggtgggggataagttgtaggaaccgagggaatatttacaatttctgggccaataagaagtcaattccccaagctccttgttacacaaattgtccaatttcatctctagtccctgaatagttctgtttcctatgggggctgggacgtggcagtaagaagcattttatgtcttcatgaggcaacttaggggtaagttgcatgattcctaactttctctgcaccctctcttccaggaacaaactctccctgtcttctaaactcagtctttccaatgcccagggcttcttatatcagaaggttccattcttattggaagccaatgttcctcatcacttaaagaattaagaaatggccgggtgtgatggctcacgcctgtaatcccagcactttgggaggctgaggcgggtggatcatgaggtcaagagattgagacaatcctggccaacatggtgaaacactgtctctactaaaaatacaaaaattagttggcatggtggtgcacacctgtagtcccagctactcaggaggctgaggcagaagaatcgcttgaacccaggaggcagaggttgtggtgagccgagattgcaccattgtactccagcctgggcaacaagagcgaaactccatctcaaaaaaaaaaaaaaaaaaaaaaagaaaagaactaagaaacactccaaacattttcccacgtccacccagtgatctgtcaccaagacccagggctgcctgctttcatcactcaacctcaacagaacaactctctataaagggatcatggctttcattcagttctgcaaaaggagaaactagagcctaccctaatggatgtacatggagagagtggttggctgactaagtctgcagccagattctcactgagtattgggaccatggtggcattactgggaattttcaggaatttggttttataaggtcatgcccagattattgggttgtgtctactcagtaaacactcatgaaactgatggatacatgaaggctcagtttttcaaagcctttagctatgtaaagagcaaaatactaggttgagccatatgcaattgtcaatattctaccatttttgatcaacaaaactggcatttttttttttggtatgcctcagcttcatataatgaaatcctgtgtgcccaatcactcagcttccacacctaccaagtcaagcctctgttgaatctgtgtcctacctactttgacctctctcttcccagagataatttcagagcaaattccatatgtataatgattttggtatgtcttcaaaaaacaaaaagctctttttgaaagcataaccacaataccattattattattattattttgagatggagtctcgctctgtgatccaggctggagtagagtggtgcaatcttggctcaccgcaacctccgcctcccgggttcaagcgattctcctgcctcagcctcctgagtagggaggctcccaagttgtatttttagtagagacaggatttcaccatgttggccaggctagtcttggactcctgacctcaagcgatccacccacctcagcctcccaaagtgctgggattaccgatgtgagccactgcgcctagcaattattttgattcaaaatattaataataattatataacattttcaaatacccaattattattcaaattacccaaattgcctcatatatttttagttttttacatcagaattcatataatgtccatagattgcagttggttgattactgttttaagtccttttaatctataggtttttctgttttcctttcttatttttgaacagggtgtcattctgtcacccagggtagagtgcagtggtctggtcataacccactgcagcctccaattcctgggcttacataatcctccctcttcagcctcctgagtaactgggactacaggtgtgtgccatcaatcctggctaatttttaaaaaatttttaatgttttatagagatggggtctcgctaggtttcctaggctggtctcaaactcttggccccaagggattcttctgcctcagcctcctaaatttttagaaatttggttttatgaggcaatgcccagattatggggtaatgtgctcactcaataaacactcatgaaataaaaacctttcatgataaaaattctgaagtgctggaattacaggtgtcagccaccacacccagccaaaagctcttgtttctcttttacctattacttctttaatgcttttcctttatttacgtagatctgagtttctgacctctattatattcttctctataaattacttcttttaacatttttttttctttgagacggagtttcactcttgtcgcccaggctggagtgcaatggcacgatcttggctcactgcaacctctgcctcctgggttcaagcaattcacgtgcctcagcctcctaggtagctaggattacctgtgtatgccaccacgcgcagctaatgtttttgtatttttagtagagacaggatttcactatgttggagagtctggtcttgaactcctggcctctagtgattcgcccatctaccatagtgctgggtttacaggcatgagccaccacacacagtcctgaagcagcttttcaggttaactttagaatgcctttggccaagaggaggggtcccttcagatggatgggggtggttatttttggcttacaagcacttgctgggtttgtttggagagtcaacagttgacagtagcatcaatattaatggttatattacttttttatttttttgagatggagtttcactcttgttgcccaggctggagtgcaatggcatgatctcagctcagtgcaacctctgcctcctgggttcaagtaatcctcctgtctctgcctcccaagtagctgaaattacaggcgcctgccaccacgcccagctaatttttgtattttcagtagagacagggttttgccatgttggccaggctggtctcaaactcctgacctcaaatgatccgcccgccttggcctcccaaagtgctgggattacagccgtgagccaccacgtccaacctaaaattttttaattaataaaaaaagaagaagatgagttgctgtaaacatttcatccatggttcaaggtgcaacctatatataagctgttgtcaggccaagtgtggtggctcacacctgcaatcgcagagcttcggaagtcctagatgggaggatcgcttgagcccaggagttcaaggccagcctggacaagatagcaaaaccctgtctccaccccccaaaaaagaagataaataggccaggcatggtgatgtgtgactgtagaccctgctactagagaggctgtggcaggaggatggcttgagtccaggagttcaaggttgcaatgagctatgattgcaccactgcactccatcctgggtgacagagcaagatcttgtctctgaaaaataatatatatattatagcatatataatatttatattttagagacagggtctctaaagttaaaggttaaaattaaaggttagagttcatctaaccttccaaaaccatctccctggcattcctataacctcccctttccatacttccagaggaatcacacccatggaaccaggaaaccaaaccagtgcatctcaattcatcctcctgggactgtcagaaaagccggagcaggaaacacttctcttttctctgttcctctgcatgtacctggtacagtcctggggaacctgctcatcatcctggccatcagcatagactcccacctccacacccccatgtacttcttcctggccaacctgtccctgattgatttctgtctggccaccaacaccatccccaagatgctggtgagccttcaaaccggaagcaaggccatctcttatccctgataatgcaaacattcctgggctctctatggggaagctgtggccctgtgcctgaccccaaggcactgggagagaaagcctttcctgaccccaaggtgttacaggaaaggggtccaatccaaatcccaagagagggctcttggatctcaggcaagtccacaaagtgaaaacaagtttttaggaaagcaaaggaataaaagaatgactactccatagacagagaagccccgagggctgctggttgcccatttttatggttatttcttgatgatatgctaaacaaggggaggattattcatgcctcacctttttagagcatctggggtaacttcctgatgtcgccatggcatctgtaaactgtcatggtgttactggtagaaggtgtttaggttcttggattcccaaacaaagaattggacaaaacacaccaacaaagcaaaagcaaaagcagccatgagccacagtgcccggcctcaagctgacatgatattaagcagaatggctttgaataatcaaacctctgatttatttgtgttacttttcttccaagagaattaaattttaatttctcaggtgaacaaacagacctccagatgtggccctgctgtagatttctataagtaagtacacaggttggaaagacgaagaaaatctgctttctggtgactattctggtgaatgaaacacagaatttgaccggggatggtggctcatgactgcaatcccagaactttgggaggccaaggcaggtggatcatttgagatcgggagttagagaccagactggccaacatggtaaaaccgcatctctactaaaatacaaaaattaactgggtgtggtggtgggcatctgtaatcccagttacttcggaggctgaggcaagagaatcacttgaacccgggagtcgaagattgcagtgagctgagatggtgccaccacactccagcttgggtgacagagcaggactctggcaaaaaaaaaaaaaaaagaatggccaggtggcacggtggctcacacctgtaatcccagcactttgggaggcagaggcaggcggatcacctgagatcaggagtttcagaccagcctggccaaggtggtgaaacccggtctctactaaaaatacaaaaatttgccaggcgaggtggtgcgcacctataatcccacttacttgggaggctgaggcaggagaatcacttgaacccgggaggcgggggttgcagggagccaagatcccaccactgcactccagcctgggctacagagagagactccatttcaaaaacaaagacaaaaacagaatttaagataattggaagttgggaggattgcttgagaccaagttcaaggctgtagtgtgcaatgattgtgcttgtgaataaacactgtgctccagcctgggcaacatagcaagacccttgtctcaaaaaaaaaaaaattaaactaaaaaaataaagtaagcctgggcgcaatggctcatgcctgtaatcccagcactttgggaggctgaggcggctggatcacgaggtcaggagttcaagagcagcctggccaagatggtgaaacctcgtctctactaaaaatacaaaaaaatcagccagacatggtggtgcacacctgtagtcccagctactcgggaggctgaggcaggagaatcgcttgaacctaggaggcagaggttgcggtgagccaagatcacgtcactacactccagcctgggcaacagagcgagactccatctcaaaaaataaaatacataaaaaataaaataggccaggtgcagtggctcacgcctgtaatcccagcagtttgggaggccgaggcaggtggatcacctgaggttgggagttcgagaccagccatgaccaacatggggaaaccccgtctctactaaaaatacaaaattagcagggcatggtggtgcatgcttatagtcccagctactcgggaggctgaggcaggaaaactgcttgaacccgggaggtggaggttgtgatgagccaagatcatgccatcgcgctccagcctgggcaacaagaacaaaactccatctcaaaaataaataaataaataaataaacaaataaatataaaataagatgagagtttgccatggagagtccatgattctggtcagggcctttttggagtaaccagaaaccatgggaaagcgaaactacagctctctctccttgcaagttccctaaactctcttgccataggcacgcaggtgattacagtgctaattgacagaaggctggaattgccagagacttgggaagttattacaacctgggggctgctagaaatttgggaaaatccctccctctgtatccagcttgagctgaagcatttatttagacccctccctcccctgtgaaatgagaaatgcctcaggcaccaataaatctcttaagattctgtcagccaaacaaaaacatctccaacttgctctgtgttaagaaataaaggtttcctaaagtgctggctctacaggcatgagccaccatgcccagcagaggtgggtagattgcttgagcccaggaggttaagaccagcctgggcaacatagtgagatcccatctctaccaaaaaagaaaaaaaaagtagccaggcctggtggtgcacacctgtagtctcaactacctgggaggctgaggaaagaggatcagcagaggccgggaggtccaggctacaatgagccataattgcaccactgtactccagcctgggtgacagagcaagatgctgtctaaaataataataataataataaacttaaggccgggtgtggtggctcacatctgtaatcccagcactttgggaggccgaggcgggcagattacctgaggtcagcagtttgggaccagcctggccaacatggcaaaactccatctctactaaaaatacagaaattcaccaggcgtggtggcgggcacctgtaatcccagctactcggcaggttgaggcaggcgaatcgcttgaacccaggaggtggaggttgcaatgagccaagatcacaccattgcactccagcctgggcggcagagagagactccatctcaaaaaacaacaaaaacctagacttgggttactgcagttcccaatggagacacacgagggcagaagaaacacgcagcgaggacgtctcaggtgctccagtccctcgggcacttttcacagacagcatctcccgcctagcacagacattttgcttaatcctggtccctttccccacctgacctcagtgccttttgccactggggagccagaagcctatagcccaggggcttcccaagttaaggcacactgggaaagggttgaaagtggccttacgttttccaaatttcccaccccagcccctgggctcggtgaatatcttcccacctaacccaggactggcgccatctggtttctgttgtccacagagagatactgaagttatgcaagaaaaagagagagagaagaccggacctggtggttcacgcctgtaatcccagcactttgggagtctgaggcaggtggatcacctgaagtcaggcgttcaagaccagcctggccaacatgacgaaaccccgtctctactaaaaatacaaaaattagtccaggcgtggtggctcaaacctgtaatcccagcactttgggaggccgaggcgggcagttcaagaggtcaggagttcgagaccagcctgaccaacatggtgaaaccctgtccctactaaaaatacaaaaattagctggacatggtggtgcacgcctgtaatcccagctactcggcaggctgaggcaggagaatcacttgaacctgggaggtggcggttgcagtgagccgagattgcgccactacactccagcctgggcgacagagcgagactccatctcaaaaaaaaaaaaaaaaaaaaaaaaaaaattagccaggtatggtggtgtgtgactgtaatgccagctatttgggaggctgaggcaggagaattgcttgaacccgggaggtggagattgtagtgagccgagatcacaccattgcactccagcctgggcaacaagagcaaaactccgtctcaaaaaaaaaataaaaataaaaaaaaagaaaagaaaaatgaaagagagagacagagggagcgctacagagagagagagagacagagacagagagatactgcagttatgcaagaaaaagagagagggagggaaagagagacagagagatactgtgacaggccaggtctcactaacacaggcctctctaacaactgtttcagcactgactgcgtggttaagttaaatatttaaagatgatagcgccagtgcccttagacaaaggctggaacgtaacaaaagcacaccaagagttttgcccaggcctttcctgggccttgaagcatgacaagataatgaaggaattcttaatggacctgtttaggattaaacaagttttattgggagtctgaagaaactctctagactctaaaatttagcaggagacaagataagggtaactatccctggcacctggacccatctagattaagtaaatttactgaggctcagaggaaggtcttcaggactcagaccttagttacagattaggagaagttaattggcctggtgcagtggctcacgcctgtaatcccagcagtttgggaggccaaggcaggcagatcacttaaggccaggagttcaagaccagcttggccaacatggcgaaaccccatctctactaaaaatacaaaaattaaccaggcatgatggtgcacgcctgtaatcccagctacttgggaggctgaggcaggggaatcgcttgaacctgagaggtgggggttgcagtgagccgagattgtgccactgcactccagactgggtgacagagcaagacttcatctccaaaaataaataaataaataaataaataaataaataaaaattaaactacaagccaggcacagtggctcgcacctgtaatcccagcactttggtaggccgaggtggggggatcacctgaggtcaggagtttgataccagcctggccaacatggtgaaaccctgtctctactaaaaatacaatagctgggcatggtggtgcacgcctagataatcccagctactcgggaggttgaggcagaagaatcgcttgaacctgggaggcagaggttgcggtgagccgagatagcgccactgcactccaacctgggtgacagagtgagactctgtctcgaaaataaataaaactacagcagccacaagcactgacagagtcaagtatcaggcacccacaggacaaggtgggacacagtgtctactcatctgcagagtggggaccagggcaggattgggagaagagagccagggtaagggggaagaaacaatattgacagaataattctgaaagattctccccgcggcctgaaaacttgggaggataaacttggggggatgaataactcctcccttctcaggcccagtcccaaggtgcaaggctacttgccccagcagcatgcgccagcaagatagcagaagcaggaagagagatggccggaagacatgtaccctggccggaagacacgtaccctggccggaagacatctaccctggccggaagacatctaccctggccggaagacacctaccctggcaggaagacatgtaccctggccggaagacacgtaccctggccggaagacatctaccctggccggaagacatctaccctggccggaagacacctaccctggccggaagacatctaccctggccggaagacatctaccctggccggaagacagctaccttggccggaagacacctgccctggccggaagacacgtaccctggctggaagacatctaccctggccggaagacacatgcccctgaagatcaagagacgggccatccgggtaccatgtagcagttacgtcagactgggacacttgctgtttacgggagactataaaacccctgccccgtcctcacttggggctgacgccattttaggcctcagccgtctgcacccaggtgcacattaaaacagcgtgttgctccacaccagctcatgttgtttgttggcttgctctcggggttcgaaacgacacaagagccttacaaattccatgcttggctcactcggcatttccttaacagatgttcattcagtgcctgcatgcttgacaagccccaggtctgagaatacaacggatcagtgaatgaaccaacatgcaaaaatccctgacattctagtgttaagagtctacaggtagaataaataagtaaatttaaaaagatgttagatcccttttctttttgagacagggtcttgctgtgttgaccaggctggagtgcaggggcacaatcatagtaagggaggacaccacccctcatattatgcccaatttctgcctccaaagaaagaagaagtaaaaactaaatggcagaaatcaaatccataggcagacagcccggcaccgcaccctgggcctggttaaagatcgacccctgacctaaccggttatgttatctatatattccagatacctcaaggaaaaggtaattatttgattcaagaccttcaaaacgaggccaggtgtggtggctcacgactgtcatctcagcattttgggaggccaatgcagtaggatcacttgaggtcaggagttcgagaccagcctgggcaacacagcaagaacctgtctcttttgagtttttttgtttgtttgtttgttttgtttttgagatggagttttgttcttgtcgcccaggctggagtgcaatggcataatttcggctcactgcaacctccacctcctgggttcaagtgattctcctgcgtcagtctcctgagtagctgagactacaagcgtgcaccactacgcctggctaatttttttgtatttttaatatagacggggtttcaccattttggccaggctggtctggaactccggacctcaggtgatccacccacctcggcctcctaaagtacagagattacaggcatgagccaccgcacccggccaagaccctgtctctgaaaataatttttaaaaattagccgggtgcctacagtcccagctactcaggaggccaaggttggaggatcgattgggcccaggagttggaggctacagtaaactatgatcgcatcactgcccttcacctaggggcagagtgagaccttgtctcaaagaagaaagaccttcgaaaatgaaacagggaaccagaaggagggcaaggtggcagccagggcaaaatccctatgatgagggcatgcggctatgtgcaaggaattgctctgagaataaagatggggacattctagccgagctaaagaatgatccatttacttatcattgtaagaaaattggagccgttcccagagatgactaagacctaggcctgcaaagtgtgaagcctgcagggaggtgggggaaggaggcgaagaacaaagaacgcaaggggggccgagtgagtcatgggcagtgggaacggcggtgcggtgcatggctgggtgcagataattaccctcgggtagcagccaggcccaggtggggtgggtgtcagcaggagatggacagagacctccctccgcttcagaaagtaaaaccggtgttgccccagcctggaactcccccaggagagttggaatcctgcccatcccctcccctcttcctccagtcttttcttccagctcaggcctgagctttaaaaatcttgcttcccagccacggccaagacatgtccctgcctcccccagcagaatgcagatttcaggtgtcattcatgaactatttaagggtttctggaatgttagatttgcctgctagtctgggagtcttggagggggagaccagctgtcacacgtcctgcccatggccgtgattggagcacccggcaagcttaggagacaatgttcacatggacagactttctctctgaatgcctttgtcagagatgtttaaaccagagtgactccatcttgtgtaggggctgggtaaaataaggccaagacctgctgggctgtgttcccagacaattaaggcattctaagtcacaggatgagataggaggtcagcacaagatgcaggtcataaagaccttgctgataaaacaggttgcaaaaagaagccagtcaaaacccaccaaaaccaagatggccccaatagtgacctctggttgtcctcactgctacactcccatcagtgtcactgagtcaggaaaacaaggtctggaggccaagaatataaggtcgattcacacttcacctatggcaggaagggcggaagccaagtcaatgactgtaaccttacttcatcctctccatttacatagggcgtaccccaagtaaagggtatttaaactccgaaaaattctgtaatggggactttgagcccctatgctccagcccactcccacactgtggagtgtgctttcattctcaataaatccctgcctctggctggggcgcggtggctcacacctgtaatcccagcactttgggaggccgaggcagccggatcacctgaggtcgggagttcacctgaggttgggagttcgagaccagcctaaccaacatggagaaaccccgactctactaaaaaaaaatacaaaattagccgggcatgggggtgcatgcttataatctcagctgctcggaaggctgaggcacgagaatcacttgaacccgggaggcggaggttgcggtgagccaagattgcaccattgcactccagcctggatgacagaggaagactccgtctcaaaaaaaaaaaaaaaaaaaaaaaaatccctgcttctgccttccttgcttttgctttgttggtgtgttttgtccaattctttgtttgggatgccaagaacctggacaccttctaccagtaacaccatgacagtttacagatgccatggcgacaccaggaagttaccccagatgctctaaaaaggtgaggcatgaataatcctccccttctttagcatattatcaagaaataaccataaaaatgggcaaccagcagcccttggggctgctctgtctatggagtagccattcttttattcctttactttcctaaaaacttgctttcactttacagacttgcctgagatccaagagccctctcttggggtttggattgggacccctttcctatgacaccttgcggcccggaaagactttctctcccagtgccctggggtcaggcacagggccgcagctttcccatagagagcccaggaatatttgcattaccaggagagagtcaggtttcagcgagaatctgaggaaaatcctccagagagtatctaaaacgaggtgaggaaaggggaaaaggcattttcctttaggacgaacctgaattccttaggatacagctggtgaacaataacatctgtaactccctcctaggtttttcaaagggaaggaaggaaggtagaaggccctcttgagaaatgtctttttttttttaagggaccaggtctccctctgttgcccaggttgaagtacagtggcgctatcatagctgactgcagccttgaactcctgggttcaagcaaatcctcccacctcagcctcccaagtagctaagactacaggcaagtgattctcctgcctcagcctctcaaggattgcaagcaccagccaaaaagcccagctaatttttgtattttttgtagagatggggtttcaccatattggccaggctggtctcgaactcctgacttcaggtgatccaccctccttggcctcctaaagtgctgggattttcccttaacaagcatctatgggtcgggcgcggtggctcacacctgtaatcccagcactttgggaggctgagatgggaggatcacttgagcccaggacttcaagttcatcctggggaacatatatagtgagattcggtgtctacagaaaactttttttttttttttttttttttagacagagtctcactttgtcgtccaggctggagtgcagtggcacaatcttggctcattgcaatctctgtctcccaggttcaagagattttcctgtctcagcctcccaagtagctgggattacaggcgcgcgccaccacccccagctaattttgtatttttggtagagacggagtttcaccatgtcggccaggctggtctcaaactcctgacctcaggtgatccgcccgcctcggcctcccaaagtgctgggattacaggcatttgccactgcacccggcttctacaaaaaaatttaaaaattagtcaaacgtgatggcacatacctatatagtcccagctacttgggaggctgaggtgggaggatggcttgaacccaggaggtagaggctgcagtgagccactgcaccccagcctgggcgacagaatgagatcccatctcaaacatataaccataaactttggatgttaagcatttgctggaaaaaaagaaaaaagataaattaaaacaaaaaaatcccccataaactaaatgccatgatatttaaatacaaatcaagtaattctgatgaaagttatggccaagacattttacattctttttttcaaaatcagtcttcaaaatctcatctcatgtgtattttacatgcaccacacatctcttctggtttttgttttgttttgttttgtttttgagacagagtctctctctgttgcccaggctggggtgcagtggcacaatctcagctcactgcaacctctgcctcccgggttcaagcgattctcctgcctcagcctcccaagtaggtgggattacacacatgcgacaccatgcccagctaatttttgtatttatagtagagatgaggttttgccatgttggtcaggctggtctccaactcctaacctcaggtgatccacccaccttggcctcccaaagtgctgggattacgggcgtgagccaccgtgcccggccataataatactttttttttcattaaaaaaaaaaaaactaaaaacaagaaggctgggcacggtggctcatgcctgtaatcccagcactttgggaagctgaggtgggcaaatcacgaggtcaggagttcgagaccatcctgaccaatatggagaaaccccatctgtattaaaaatacaaaaattagccaggcgtggtggcacgcgcttgtaatcccagctactcgggaggctgaggcaggagaatcacttgaacctgggagacggagcttgcagtgagctgagattgcgccactgcactctggcctgggcgacagagcgagactctgtctcaaaataaataaataagaaaaaagaaagaaaaatgaggctcagagaggttaggtgacttccccaaggtcacacagcaggatggaaacccacaccttcctgtcccttgtccactcccctaggctttgtgcctcactggcttcagggagagcagccatgtcataaaacaggttctgccatgggccctcagcctggttgtccatgacaccagcactgactggaggcctggttctctgagccccagtttgctttcgtgcaaaatgactttgcaataggctgtgccttccctcgggtatggtgagaaattaaattgttaaataaattcccaggaataaggacaggaagtgtagagtttctttcttttccttctttttttttttttttttttctgagatggggtttcactcttgttgcccaggctggagtgcaatggtgcgatcttgactggtctggtctgatggtctgggtggtgtcagctgatccatcgagtgcagggtctgcaaactatctcaagcactgattttaggttttacaatagtgatgctacctctgggagcaatttggggacgttcagactcttggacccagaggctgcatgactcctaaactgtaatttctaatcttgtagctaatttgttagtcctgcaaaggcagactggttcccaggcaagaagtgggtcttttagggaaagggctgttatcagttttgtttcagagtcaaaccatcagctgaattccttcccaaagttagtttggcctaagcccaggaatgaacaaggacagcttaaaggttagaagcattttagaactttaaagagggccgggtgtggtggctcacgcctgtaatcccagcactttgggaggccaaggagggctggtcacctgaggtcgggagttcaagaccagtctgaccaacatggtgaaaccccgtctctactaaaaatacaaaaattatctgggcgtcgtggtgcacgcctgtaatcccagctactccggaggctgaggcaggagaatcgcttgaatctgggaggtggagtttgaggtgagccgagactgtgccattgcagtctaacctgggtgacaagagcgaaactgtctcaaaaaaaaaaaaaaaaaaaattaggccgggcgtggtggttgaagcctgtaatcctagcactttgggaggctgaggcgggtggatcacctgaggtcagaagttcaagaccagcctggccaacatggtaaaaccctgtctctactaaaaatacaaaaattaggtgggcacagtggggggtgcctgtaatcccagctactagggaggctgaggcaggagaatcgcttgaacctgggaggtggaggttgcagtgagccgagatcgtgccactgcactccagcctgggcgacagagtaagaccttgtctccaaaaaaaaaaaaaaaggaggtttcaaactctggcaccaggctccagaaactgtacgcttaatcactgggcttatttggtgggggggcggctatgatgtaggtagtacatgcattagaatttgtggcgaccacccaaacccggggtatccatttccctttggcctgaccctggggtcccagcttatggaacacagagcaggtgtttacttcagcaggagctgagcagtcccaacacccctcctcctcctccattctgagcacctctcctccaccctccaggaccttttccgtgatcactgggggaagacaatggaatggcagcttagggacaaagggagagctcagttactaatgccacttctgggcagggttcctgcattccttagtggggaagggagcaaccgctgctggattccccgtgggttcaaggagctggaggacccaggagcctaaatctctgctcagatcctctgagctctgagtctggttttcccaaaaaactagatggttttccttaaaaaaaaaaaaaagttaccagacacaagtcagccgtgcccccgggagctgcctttgaaaagaggaacctggccaggagcagtgcctcacatctgtaatcccagcactttgagaggccaaggtgggcagaccacgag

SEQ ID NO: 986 - protein, 850 aa, Homo sapiens
MGPRNQTAVSEFLLMKVTEDPELKLIPFSLFLSMYLVTILGNLLILLAVISDSHLHTPMYFLLFNLSFTDICLTTTTVPKILVNIQAQNQSITYTGCLTQICLVLVFAGLESCFLAVMAYDRYVAICHPLRFIINSMEARNQTAISKFLLLGLIEDPELQPVLFSLFLSMYLVTILGNLLILLAVISDSHLHTPMYFFLSNLSFLDICLSTTTIPKMLVNIQAQNRSITYSGCLTQICFVLFFAGLENCLLAAMAYDRYVAICHPLRYTVIMNPRLCGLLILLSLLTSVVNALLLSLMVLRLSFCTDLEIPLFFCELAQLPESPFQVSVPQAVDEGIQHGGDCCVHHRRSFLLHSGEDRGGTQIDANGGPIEESNHRQVGAAGGEGFLPAACRGDLHDGHKDASIGGQDADKGRGYHHPCHNEDEDPIHRGVRARKSEDGSEVAEVVRHLMAAAENETGHQEDVMQWVADGHEPVISHHGDYDAVHDAKEMEEVHLDQAAGIRDGLAPGLKAHQHLRDGVGGQTEINQGQVGQEEVHGGVEVGVYADGQDDEQVPHDHDQRNHTHGTRKPNQCISIHPPGTVRKAGAGNTSLFSVPLHVPGTVLGNLLIILAISIDSHLHTPMYFFLANLSLIDFCLATNTIPKMLSGDQGRIGRREPGMRQQDSRSRKRDGRKTCTLAGRHVPWPEDIYPGRKTSTLAGRHLPWQEDMYPGRKTRTLAGRHLPWPEDIYPGRKTPTLAGRHLPWPEDIYPGRKTATLAGRHLPWPEDTYPGWKTSTLAGRHMPLKIKRRAIRDLFRDHWGKTMEWQLRDKGRAQLLMPLLGRVPAFLSGEGSNRCWIPRGFKELEDPGA

SEQ ID NO: 987 - DNA, 1250 bp, Homo sapiens
  source (1)..(1250)
  CDS (201)..(555)
  CDS (842)..(1050)
tctctctctcttttttttttttttatagtcacctctaccacatggaaccagagaatgatacacgaatttcagaatttcgacttctgggattttcagaagaacccagactgcaacgatttctctttggtaaaaggcaaaagatttatacaatttgaagagaaaccagagcataacgatttctctttggagtgttcttatccatgtacctcatcattgtatttggaaacttgcttatcatcctggttatcattttatgctcccacctccacacctccatgtacttctttctctccaacctgtcctttgtagacatctgttttgcctccaccagggtcccaaagatgctggtgaatatccaggcacagagcaaagtcatcacctctgcaggctgcatcacccagatgtactttttcatacattttgtaggattggacagcttcctcctgactgtgatggcctatgaccggtttgtggccatctgtcaccccctgtactacacggtcatcatgaaccctcaactctgtggattgctggttctggtatcctggatcacaagtgtcttgcattccttattacatagcttaatggtgctgcagttgtccttatgcagagagttggaaatcccccactttttctgtgaacttaatcaggtcatccaccttgcctgttctgacacctttcttaatgacatggtgatgtatctggcagctgtgctgctgggtggggggatgtctcgctgggatcctttactcttactctaagatagtttcctccatatgtgcaatctcatcagctcaagggaagtataaggcattttccacctgtccgtctcacctctcagttgtctccttgttttactgtacaagcctaggagtgtaccttagctcggctgcatcccacaactcacactcaggtgcaatagcctcagtgaggtacactgtggtcacccccatgctgaaccccttcatctacagcctgaggaataaggacataaagagggctctgaagaattctttgggagggaaactagaaaagggccagttgtcctagggctgaagctatatccatgattgcaaggctcaaagcctcagagccagatattgctgttgtttaatcagatcatggaagtggaaactgctcttttttttttttttttttttttttgagacagagttttgctctgctgcccaggccagagtgcagtggcgccatctccgctcactgcaagctccacctcctgggttcatgct

SEQ ID NO: 988 - protein, 187 aa, Homo sapiens [sequence omitted]

SEQ ID NO: 989 - DNA, 1340 bp, Homo sapiens
  source (1)..(1340)
  CDS (201)..(502)
  CDS (759)..(1140)
tgaacaggggttagtcaacgttatgaaatgttgcctataacaaatgacagaatgtaggattcctaagttttgctattttaaagcttttgtatccaattattcacctcaagaaataaaaaagcagagagattttggagcctgttcagcatctatttcatgtttcttcccttccttaactgtctagctgatgtgtcagcaacatggacttgggaaatcaaacaagagtttcagaatttttactcctgggattttcccaagacctagaggatcaacagttgctctttgcactgtttctgtccatgtacctggtcaccgttctggggaacctgctcatcatcctggccatcagctctgactcccacctccacacccccaggtacttcttcctctccaatctgtccctggctgacatcggtttcacctccaccgcagtccccaagatgctggtgaacatccaggtgcagagcaatgccatcagctatgcagactgcatcgcccagatgtatgtttttcatggtttttggaggcatggacacatttctcctcaccgtgatggcctatgaccggtatgtggccatctgtcaccccctgtactactgtgtcaccaggaacccctgcctctgtggcctgctggttcttgtgtcctggttcctcagcttgtcatactccctgatccagagtctgttggtgctgcgggtgtccttctgcaccagttgagtcattcagcacttttactgtgagcttgctcaggtcctcaggcttacctgctcagacacacatgtcaattacatcctgctctacgtggtggccggccttctggactttgtgcccttctcagggatccttttctcctacacccaaattgtctcctacatcctgagaatctcatccacagatgggaaacacaaagccttttctacctgtggatctcatctgtttgtggtttctttattctatgggacaggccttggtgtgtatcttagttccaatgcatcgtcctcttcctggtggggcatggtggcctcggtcatgtacactgtggtcacccccatgctgaaccccttcatctattgcttgcggaacagggacatcaagaggaccctagaaacactgcttgggagaatgctgtatgctcaatgacggggacattggtcctgggcttctgagttggcagaggtagcagcagtgagctaaagaaattctggaccagcctgggcaacatagcaagaccctgtctctacaaaaaaaatataaaatttagccaggcatggtggtgtacctgtggtcccagctactcaggaggctgaggtgggaggatcccttgagtccaggaggctgag

SEQ ID NO: 990 - protein, 227 aa, Homo sapiens
MDLGNQTRVSEFLLLGFSQDLEDQQLLFALFLSMYLVTVLGNLLIILAISSDSHLHTPRYFFLSNLSLADIGFTSTAVPKMLVNIQVQSNAISYADCIAQMLTCSDTHVNYILLYVVAGLLDFVPFSGILFSYTQIVSYILRISSTDGKHKAFSTCGSHLFVVSLFYGTGLGVYLSSNASSSSWWGMVASVMYTVVTPMLNPFIYCLRNRDIKRTLETLLGRMLYAQ

SEQ ID NO: 991 - DNA, 1069 bp, Homo sapiens
  source (1)..(1069)
  CDS (201)..(869)
  modified_base (55): a, t, c, g, unknown or other
  modified_base (88)..(187): a, t, c, g, unknown or other
  modified_base (819): a, t, c, g, unknown or other
  modified_base (866): a, t, c, g, unknown or other
  modified_base (895)..(994): a, t, c, g, unknown or other
gagttaatgctaaaatgagtaacgactttgggggactaagggaagggtttctttnaacccaggatgcagtttattccaccagatgccnnnnnnnnnnnnnnnnnnnnnnnnnnnnnnnnnnnnnnnnnnnnnnnnnnnnnnnnnnnnnnnnnnnnnnnnnnnnnnnnnnnnnnnnnnnnnnnnnnnntgtgactccaaggatgctggagattttcctttcagagaagaaaagcatttcctatcctgcccgtcttgtgcagtgttacctttttatcaccttggtccacgttgagctctacatcctggctgtgatggcctttgaccggtacatggccatctgcaaccctctgctttatggcagcagaatgtccaagagcgtgtgctctttcctcatcacagtgctttatgtgtatggagcactcactggcctgatggagactatgtggacctacaacctagccttctgtggccccagtgaaattaatcacttctactgtgtggacccaccactgattaagctggcttgttctgacacctacaacaaggaggtgtcaatgtttgttgtggctggtttcaacttcacttatcctctccttatcatcctcatttcctatctctacatatttcctgccaccctaaggatctgctctacagaaggcaggcacaaagctttttctacctgtggctcccatctgacagccgttactattttctattcagctcttttcttcatgtatctcagacgtccatcagaagagtccatggagcaggggaaaatggtagctgtattttataccactgtcatccccatgttgaatncccatgatcctacagtactgaggaacaaagatggaagggggtttctntagcccaagaggcgttttgccccagattnnnnnnnnnnnnnnnnnnnnnnnnnnnnnnnnnnnnnnnnnnnnnnnnnnnnnnnnnnnnnnnnnnnnnnnnnnnnnnnnnnnnnnnnnnnnnnnnnnnntttcgagttttttccagcagtaacccactcctggcatcaatttactgtattagtctgttctcaccgctataaaga

SEQ ID NO: 992 - protein, 222 aa, Homo sapiens
  MOD_RES (222): Variable amino acid
MLEIFLSEKKSISYPARLVQCYLFITLVHVELYILAVMAFDRYMAICNPLLYGSRMSKSVCSFLITVLYVYGALTGLMETMWTYNLAFCGPSEINHFYCVDPPLIKLACSDTYNKEVSMFVVAGFNFTYPLLIILISYLYIFPATLRICSTEGRHKAFSTCGSHLTAVTIFYSALFFMYLRRPSEESMEQGKMVAVFYTTVIPMLNXHDPTVLRNKDGRGFX

SEQ ID NO: 993 - DNA, 1195 bp, Homo sapiens
  source (1)..(1195)
  CDS (201)..(995)
  modified_base (88)..(187): a, t, c, g, unknown or other
  modified_base (230): a, t, c, g, unknown or other
  modified_base (232): a, t, c, g, unknown or other
  modified_base (245): a, t, c, g, unknown or other
  modified_base (274): a, t, c, g, unknown or other
  modified_base (1045)..(1144): a, t, c, g, unknown or other
cctccttcgatggactgccctgtccagtgagagcaatagtttagacggggggctttagagtcgccagaaggcgtttagccaagatgtnnnnnnnnnnnnnnnnnnnnnnnnnnnnnnnnnnnnnnnnnnnnnnnnnnnnnnnnnnnnnnnnnnnnnnnnnnnnnnnnnnnnnnnnnnnnnnnnnnnngaagtaaccttcaatggccatgtattcttcctctcaatgctgncngtcatggacatcntgctgtctaccacactgtgcccaaggccntagcatcttttggcttcaagcacataacattgcttttgatgcctgtgtcacccaaggcttctttgtccatatgatgtttgtgggggagtcagctatcctgttagccatggcctttgatcgctttgtggccatttgtgccccactgagatatacaacagtgctaacatggcctgttgtggggaggattgctctggccgtcatcacccgaagcttctgcatcatcttcccagtcatattcttgctgaagcggctgcccttctgcctaaccaacattgttcctcactcctactgtgagcatattggagtggctcgtttagcctgtgctgacatcactgttaacatttggtatggcttctcagtgcccattgtcatggtcatcttggatgttatcctcatcgctgtgtcttactcactgatcctccgagcagtgtttcgtttgccctcccaggatgctcggcacaaggccctcagcacttgtggctcccacctctgtgtcatccttatgttttatgttccatccttctttaccttattgacccatcattttgggcgtaatattcctcaacatgtccatatcttgctggccaatctttatgtggcagtgccaccaatgctgaaccccattgtctatggtgtgaagactaagcagatacgtgagggtgtagcccaccggttctttgacatcaagacttggtgctgtacctcccctctgggctcatgaatcgggggtcttctagagtcgaccagataggggtgtcaagcccaagtatnnnnnnnnnnnnnnnnnnnnnnnnnnnnnnnnnnnnnnnnnnnnnnnnnnnnnnnnnnnnnnnnnnnnnnnnnnnnnnnnnnnnnnnnnnnnnnnnnnnnaaaatagccgggtgtggtggcacccacctgtaatcccagtacttgggaagg

SEQ ID NO: 994 - protein, 264 aa, Homo sapiens
  MOD_RES (10)..(11): Variable amino acid
  MOD_RES (15): Variable amino acid
  MOD_RES (25): Variable amino acid
MAMYSSSQCXXSWTXCCLPHCAQGXSIFWLQAHNIAFDACVTQGFFVHMMFVGESAILLAMAFDRFVAICAPLRYTTVLTWPVVGRIALAVITRSFCIIFPVIFLLKRLPFCLTNIVPHSYCEHIGVARLACADITVNIWYGFSVPIVMVILDVILIAVSYSLILRAVFRLPSQDARHKALSTCGSHLCVILMFYVPSFFTLLTHHFGRNIPQHVHILLANLYVAVPPMLNPIVYGVKTKQIREGVAHRFFDIKTWCCTSPLGS

SEQ ID NO: 995 - DNA, 1033 bp, Homo sapiens
  source (1)..(1033)
  CDS (201)..(833)
  modified_base (46): a, t, c, g, unknown or other
  modified_base (48): a, t, c, g, unknown or other
  modified_base (57)..(156): a, t, c, g, unknown or other
  modified_base (251): a, t, c, g, unknown or other
  modified_base (776): a, t, c, g, unknown or other
  modified_base (888)..(987): a, t, c, g, unknown or other
ggtgctgtacgcagggggtatttccaccacacagatgacagtttananccagatgcnnnnnnnnnnnnnnnnnnnnnnnnnnnnnnnnnnnnnnnnnnnnnnnnnnnnnnnnnnnnnnnnnnnnnnnnnnnnnnnnnnnnnnnnnnnnnnnnnnnngctcaactgtttctcctttctttgaccattaactgggtactttaatgggcaatgtcctcatcatcctggtcactaaagctgactctgcactacanagtcctatgtacttcttcctcagaaacttgtccttcctggagataggtttcacttgggtcattgtgcccaagatgctggggaccctgatcattcaagacacaaccatctccttccttggatgtgccactcagatgtatttcttcttcttttttggggctgctgagtgctgcctcctggccaccatggcatatgaccgctacgtggccatctgtgaccccttgcactacccagtcatcatgggccacatatcctgtgcccagctggcagctgcctcttggttctcagggttttcagtggccactgtgcaaaccacatggattttcagtttccctttttgtggccccaacagggtgaaccacttcttctgtgacagccctcctgttattgcactggtctgtgctgacacctctgtgtttgaactggaggctctgacagccactgtcctattcattctctttcctttcttgctgatcctgggatcctatgtccgcatcctctccacttcttcaggatgccgtcagctnggggaaacacaggcattctccacctgttccgcccactcttggttgcttctcttctaagcactgccagctcgagtttttccacccccgagcgagggttatataccacagtccnnnnnnnnnnnnnnnnnnnnnnnnnnnnnnnnnnnnnnnnnnnnnnnnnnnnnnnnnnnnnnnnnnnnnnnnnnnnnnnnnnnnnnnnnnnnnnnnnnnntatgtttagtctaccaaagtagatacttgaagacaaggtataacca

SEQ ID NO: 996 - protein, 210 aa, Homo sapiens
  MOD_RES (17): Variable amino acid
  MOD_RES (192): Variable amino acid
MGNVLIILVTKADSALXSPMYFFLRNLSFLEIGFTWVIVPKMLGTLIIQDTTISFLGCATQMYFFFFFGAAECCLLATMAYDRYVAICDPLHYPVIMGHISCAQLAAASWFSGFSVATVQTTWIFSFPFCGPNRVNHFFCDSPPVIALVCADTSVFELEALTATVLFILFPFLLILGSYVRILSTSSGCRQXGETQAFSTCSAHSWLLLF

SEQ ID NO: 997 - DNA, 1096 bp, Homo sapiens
  source (1)..(1096)
  CDS (201)..(896)
  modified_base (2): a, t, c, g, unknown or other
  modified_base (8)..(9): a, t, c, g, unknown or other
  modified_base (12): a, t, c, g, unknown or other
  modified_base (34): a, t, c, g, unknown or other
  modified_base (721)..(820): a, t, c, g, unknown or other
  modified_base (829)..(831): a, t, c, g, unknown or other
  modified_base (840): a, t, c, g, unknown or other
  modified_base (842): a, t, c, g, unknown or other
  modified_base (851): a, t, c, g, unknown or other
  modified_base (865)..(866): a, t, c, g, unknown or other
cngggggnnggnaaaaaaaccgacaatggtaagnacaaaatcaaagctgtgtggttgaattcatcctcttgggcttttctaactatcctgagctccaggggcagctctttgtggctttcctggttatttatctggtgaccctgataggaaatgccattattatagtcatcgtctccctagaccagagcctccacgttcccatgtacctgttcctcctgaacttatctgtggtggacctgagtttcagtgcagttattatgcctgaaatgctggtggtcctctctactgaaaaaactacaatttcttttgggggctgttttgcacagatgtatttcatccttctttttggtggggctgaatgttttcttctgggagcaatggcttatgaccgatttgctgcaatttgccatcctctcaactaccaaatgattatgaataaaggagtttttatgaaattaattatattttcatgggccttaggttttatgttaggtactgttcaaacatcatgggtatctagttttcccttttgtggccttaatgaaattaaccatatatcttgtgaaaccccagcagtgttagaacttgcatgtgcagacacgtttttgtttgaaatctatgcattcacaggcacctttttgattattttggttcctttcttgttgatactcttgtcttacattcgagttctgtttgccatcctgaagatgcatcaaccacnnnnnnnnnnnnnnnnnnnnnnnnnnnnnnnnnnnnnnnnnnnnnnnnnnnnnnnnnnnnnnnnnnnnnnnnnnnnnnnnnnnnnnnnnnnnnnnnnnnnggtcttttnnnagggactcngntacgttatntgcggatcgggggnnggaattaaacctttaaggccagtaatttgatacatttttgtgtaaaggatatgaccagacagctcacacacagacacacaaatgtgaaaagatgcttgatctcactgataaagcataaattaaaacgatgtcatttttaaaaatcagattcgcaaattttaaaagttgctaacactggaatggccagagtattatgaaacgtgacacaggcacagattgctggtagacat

SEQ ID NO: 998 - protein, 231 aa, Homo sapiens
  MOD_RES (174)..(207): Variable amino acid
  MOD_RES (210)..(211): Variable amino acid
  MOD_RES (214): Variable amino acid
  MOD_RES (217): Variable amino acid
  MOD_RES (222): Variable amino acid
MYLFLLNLSVVDLSFSAVIMPEMLVVLSTEKTTISFGGCFAQMYFILLFGGAECFLLGAMAYDRFAAICHPLNYQMIMNKGVFMKLIIFSWALGFMLGTVQTSWVSSFPFCGLNEINHISCETPAVLELACADTFLFEIYAFTGTFLIILVPFLLILLSYIRVLFAILKMHQPXXXXXXXXXXXXXXXXXXXXXXXXXXXXXXXXXXVFXXGLXYVXCGSGXGIKPLRPVI

SEQ ID NO: 999 - DNA, 1282 bp, Homo sapiens
  source (1)..(1282)
  CDS (201)..(1082)
  modified_base (292): a, t, c, g, unknown or other
  modified_base (303)..(402): a, t, c, g, unknown or other
  modified_base (440): a, t, c, g, unknown or other
  modified_base (454): a, t, c, g, unknown or other
  modified_base (513): a, t, c, g, unknown or other
  modified_base (589): a, t, c, g, unknown or other
  modified_base (632): a, t, c, g, unknown or other
  modified_base (636): a, t, c, g, unknown or other
  modified_base (678): a, t, c, g, unknown or other
  modified_base (735): a, t, c, g, unknown or other
  modified_base (742): a, t, c, g, unknown or other
  modified_base (798): a, t, c, g, unknown or other
  modified_base (869): a, t, c, g, unknown or other
  modified_base (876): a, t, c, g, unknown or other
tcatcatgtatgaaatgtcgataacaacatggtaggtcctttaatctttagcacggaactctctaatagggtatgactttaaaatatctggctacaaatctatactttggtaaagccttgacagataacagctcatttacactttaatttttgagtgtgtaaacctcccagaaaaatggcatcagtttgaagttttgaaaatgtctttgcagtgcaaatttaaaaagattttttcaaagagtgttatatcctggaatcccgatttttccaccccacgaattgagtctcttancccaagtctcnnnnnnnnnnnnnnnnnnnnnnnnnnnnnnnnnnnnnnnnnnnnnnnnnnnnnnnnnnnnnnnnnnnnnnnnnnnnnnnnnnnnnnnnnnnnnnnnnnnngggtggacacagtcactgtagtggggaacttgggcatnataataatcatcanactcaattcaaaactccatacaatcatgtgctttttccttagtcacttgtccttaacanacttctgtttttccactgtagttacacttaaactgttgaagaacttggttgtgaaatacagaaccatctctttctntggttgcatcatgcaattttgttttgcttgcatttttggagtnacanaaactttcatgttaacaacgatggcttatgaccgttttgtgncagtttgtaaacccttactgtataccactattatgtttcagaagctctgtgctcttntggtggntgggtcctatacatgggggatagtgtgctccctgatactcacatattttcttcttnacttatcgttttgtaaatctaccttcataaataattttatctgtgaccactctgtaattgtttctgcctcntactcanacccctatatcagccagaggctatgctttattattnccatattcaatgaggtgagcagcctaattatcattctnacatcatatatgcttattttcactaccattatgaagatgcgatctgcaagtgggcgccacaaaactttctccacctgtgcctcccacatgacagccatcacttattnccaggccttaccaccccctgattaacgctagtaacaaataccnggcaaaannnnnnnnnnnnnnnnnnnnnnnnnnnnnnnnnnnnnnnnnnnnnnnnnnnnnnnnnnnnnnnnnnnnnnnnnnnnnnnnnnnnnnnnnnnnnnnnnnnnngatttatatggcggatggaatatttttctaatatgtgtgtgtgtggccctttcagctttttctctaaanaatat

SEQ ID NO: 1000 - protein, 293 aa, Homo sapiens
  MOD_RES (31): Variable amino acid
  MOD_RES (35)..(68): Variable amino acid
  MOD_RES (80): Variable amino acid
  MOD_RES (85): Variable amino acid
  MOD_RES (105): Variable amino acid
  MOD_RES (130): Variable amino acid
  MOD_RES (144): Variable amino acid
  MOD_RES (146): Variable amino acid
  MOD_RES (160): Variable amino acid
  MOD_RES (179): Variable amino acid
  MOD_RES (181): Variable amino acid
  MOD_RES (200): Variable amino acid
  MOD_RES (223): Variable amino acid
  MOD_RES (226): Variable amino acid
  MOD_RES (238): Variable amino acid
  MOD_RES (250): Variable amino acid
  MOD_RES (286): Variable amino acid
MSLQCKFKKIFSKSVISWNPDFSTPRIESLXPSLXXXXXXXXXXXXXXXXXXXXXXXXXXXXXXXXXXVDTVTVVGNLGXIIIIXLNSKLHTIMCFFLSHLSLTXFCFSTVVTLKLLKNLVVKYRTISFXGCIMQFCFACIFGXTXTFMLTTMAYDRFVXVCKPLLYTTIMFQKLCALXVXGSYTWGIVCSLILTYFLLXLSFCKSTFINNFICDHSVIVSAXYSXPYISQRLCFIIXIFNEVSSLIIIXTSYMLIFTTIMKMRSASGRHKTFSTCASHMTAITYXQALPPPD

SEQ ID NO: 1001 - DNA, 1099 bp, Homo sapiens
  source (1)..(1099)
  CDS (201)..(899)
aggagagatttagaagatggcagaagtttgtttttgcttcatcagctacctacgaagcccaaaactcatatactgtatagccgagaaaaagtaaactacattctcttcctaattattcttttgaaaaatgacttcatgttcattatcttctcttcattcttaaaaaaggaacacattttataaaagagtcctgactgataatgtgtcccttgaccttgcaggtcactggcctaatgaatgtctctgagccaaattccagctttgcttttgtaaatgaatttatactccaaggtttctcttgtgagtggacaattcagatcttcctcttctcactctttactacaatatatgcactgactataacagggaatggagccattgcttttgccctgtggtgtgaccggcgacttcacactcccatgtacatgttcctgggagatttctcctttttagagatatggtatgtcttttctacagttcccaagatgttggtcaacttcctttcagagaaaacaaacatctcctttgctggatgttttctccagttttatttcttcttctctttgggtacatcagaatgcttgcttttgactgtgatggcctttgatcagtaccttgctatctgccgtcccttgcactatcctaatatcatgactgggcatctctgtgccaaactggtcatactgtgctgggtttgtggatttctgtggttcctgatccccattgttctcatctctcagatgcccttctgtggcccaaacattattgaccatgttgtgtgtgacccagggccactatttgcattggattgtgtttctgccccaagaatccaactgttttgctacactctaagctcattagttatttttggtaacttcctctttattattggatcctagactattgtcctgaaagctgtgttgggtacgccttcaagcactgggagacataaggccttctctacctgtgggtctcatttggctgtggtatcactgtgctatggctctcttatggtcatgtatgtgagcccaggactcggacattctacggggatgcagaaaattgtaactttgttctatgctatggtgaccccactctt

SEQ ID NO: 1002 - protein, 232 aa, Homo sapiens [sequence omitted]

SEQ ID NO: 1003 - DNA, 8400 bp, Homo sapiens
  source (1)..(8400)
  CDS (201)..(715)
  CDS (5183)..(5293)
  CDS (6024)..(6123)
  CDS (8087)..(8200)
  modified_base (2442)..(2541): a, t, c, g, unknown or other
  modified_base (8231)..(8330): a, t, c, g, unknown or other
agatgttccttgtgaattgcttgcatccagcattaagggctggtttttatcttttatttttccaatcctctttccttctcaaggtgtccaagacacagagagccacggaatctcacaggtgtctgagaattcctcctcctgggactctcagaggatccagaactgcagccgtcctcgctttgctgtccctgtccctgtccatgtatctggtcacggtgctgaggaacctgctcagcatcctggctgtccgctctgactcccccctccacacccccatatacttcttcctctccaacctgtgctgggctgacatcggtttcacctcggccacagttcccaagatgattgtggacatgcagtcgcatagcagagtcatctctcatgcaggctgcctgacgcagatgtctttcttggtcctttttgcatgtatagaaggcatgctcctgactgtgatggcctatgactgctttgtagccatctgtcaccctctgcactacccagtcatcgtgaatcctcacctctgtgtcttcttcgttttggtgtcctttttccttagcctgttggattcccagctgcacagttggattgtgttacaattcaccatcatcaagaatgtggaaatctctaatttagtctgtgacccctctcaacttctcaaatttgcctgttctgacagcatcatcaatagcatattcatatatttccatagtactatgtttggttttcttcccatttcagggatccttttgtcttactataaaatcatcccctccattctaaggatttcatcatcagatgggaagtataaagccttctccacctgtggctctcacctagcagttgtttgctgattttatggaacaggcattggcatgtacctgacttcagctgtgtcaccaccccccaggaatggtgtggtggcatcagtgatgtacgctgtggtcacccccatgttgaaccttttcatctacagcctgagaaacagggacatacaaagtgccctgtgggggctgcacagcagaacagtcgaatctcatgatctgttccatcctttttcttgtgtgggtgagaaagggcaatcacattaaatctctacatctgcaaatcctgccccttagtcacactatttttgtggcttgatggcttttattcctttccgcatttcctttgtgaatattgctctcttcgttatgcctttaactggaatgggtgaggattctgggatcctttgtttagcagaaacctcatgacaggatcctctctacctaggcggcctcttttagtttctgagcaataaccctgtcatccaggtggaatcacaaccatctttttatatacacaaagtcctcacttcgttttggaattccctgaaaactgactttatggaaacaatgtacaggaggtcctccaacaccattggttgttcaaagttgtggttatactcttgatgaaaaataagtggtttcactatacataattttgcttcaaggtgaagtttccaagagactttcaaaggtgttaagtgaggacgtactgtacatcaaattcatatcctcttccagagttcatgtggaatttctttataaactgcttctagagaatctatttaggcaggttatgtgtagagatccatgtcgccgttcctcagtcttggctttgagtcaaatcagctggggagcttacacatgatgaggcctgggtctcaatacccgagattctgatttccttgtacctgtgtgagtatgtggattttttttcttttaaagcaccagaggtggttccaatgacaaagtttttagaggcatcaagctccaatgagtaagaacagaaattaattgtaatatgatttcttcaaatattatcttcaaatgcattgtccatcaacaccatacaaatgtttattatgctgttttttcttaccatttcgcattttctatttctttcttccttttcctttttttttttttttgagtcagagtttcactcttgttgcccaggctggagttcaatggcacggtctcggctcactgcaacctctgcctcccatattcaagcaattctcctgtctcagccttccaagtagctgggattacaggcatgcgctaccatgcctggctaatttttttttttttttttttttgggattggaaagagagagacagggtttctccattttggggaggctggtcttgaactcccgacctcaggtgatccgcccgcttccgcctcccaaagggctgggattacaggcatgaacgaccgcgcccagacaccacttagcatttacattttacatttgttaaagttatagatttatacacacattgattgctgctttgttatacacttgcctatacataggatgggaaatagaaaagaataaaatgggcacagtatccctgaagtttcacattctgagacattttaaaaatatttgctctnnnnnnnnnnnnnnnnnnnnnnnnnnnnnnnnnnnnnnnnnnnnnnnnnnnnnnnnnnnnnnnnnnnnnnnnnnnnnnnnnnnnnnnnnnnnnnnnnnnnatacaccagctggtctcaaactcccgatctcaggtgatccacgcaccttggcttcccaaagtgctgtgattagagatgtgagtcactgttccctgcctgatctaatggttttataaaggggagctcccctgcacaactctcttgcctgctgccatgtaagatgtgactttgctcctcctccaccttctgccataatcatgaggcctccccagtcatgtggctctgtgagtccattaaacctctttttctttataaattacccagtctcaggtatgtctttattagcagagtgagaatggactaatacagtaacccttacatccccagaccccaaaatggagttgtcacaggatggcagtctgaaatccttgtgatgtccagctggcagaagggaatttggatgagtagggctagccaacttctggtattgctggtgggtcctgtcattgtgtgggtgactccttgcacccctggcccttcataggacgaaattctgggagggttcttgggaaaggggctagagaaggcaagaggacactaatcttcttccaggcagtaggagggcaagctggagaggccaagctcccaagtaaactgaggcacctccactggtccctttgtgaggcacgcttgacctgggttttatggaaagaaaatgccctcaccaaagggtgctaaacaaggccccaggctccgcacctcatcccaggtgcccccctctgccctgccctagactcacctaaagctgtactgcccagagtcatggcctcaggccacatgtggctactgggcacttgagatgtggccatcttaattgagatatgctcttagtgtaaaatatacactagatttccaagccttcataatcaaaaaaagaaaaaaaaaagaacataaaatatccattaagaatttttaagtattcattaatgttgaaataataatattttgaatatattggttaaagtttactaggagaattcatttcaccccttttactttttctaatgtggtgactaaattatttaatattacacatgtggattacattatatttctattggacagctctgttctaaagtctgcacgttgtccttttgtggcttatttccttgataattttattaaaattaaattgaagggccaggtgcagtgactcacacctgtaatctcagcattttgggaggccgaggcaggtggatcacctgaggtcaggagttcgataccagcccagccaacatggtgaaaccctgtctctacttaaaaatacaaaaattagccaggcttacgggtgcgtgactataatcccagctacgcgggaggctgaggtaggagaatcgcttgattcctggaggcagaagtagcagtgagctgagatcacgccactgcactccagcctgggggacaaaagtgaaaaatccatctctaaataaataaatagaaaaataaaactgagggcctggcacggtggctcatgcctgtaatctcaccattttgggcggcccgaggcagggagattacctgaggtcagcagttcgagaccagccctgccaacatggtgaaatcccgtccctactaaaaatacaaaaaatacctggcctttggggggggggccttgaaacccagctactccggaggctgaggcaggagaatcacttgaacccgggaggcaaggtcgcagtgagctgagattgcaccaaggcgctccagcctgggcgacagagggagaccctgtctcaataaataaagaaagaaataaaaataaattgaggaaggatttagcatgcaaaatagaatcagctttggaccctgaataccctgcagtgagaattcccctgtggttctcaggcttctgtaattccagcaaatacactcttccttcaggttcactaaaatgcagatattgtgagataatgctcatttctcacagcttgcttaaataataatgatcatcatagtaatttacaacttaatagtcaacactgcctttttaacccagtctgtgagactgaatcgtaaacgtgacattctttgaagtaaagctctcgattaatataccagactgcataaacgctaataacttacctttccacagaaagataatatgtgggtattctctttgaagacaaatggtggagagtagactctcatcaaagagcctctggcagtaatgagttgcattccagaaggttccagaaggttctgtggaaggctgcagtttgggattggttctcaggtgtctaactgctttctaaggatgaagacccctggttcgtgctttagcgacacccacaggagcaacagactaagacattcctccacacaataacagacccaggcagtgcagagccatgtgtgtcttatctgtcctgttgtccacagtctggttttatcttagacctagcctggtgcaatccatgttgtgtattggcactccacttaagtttccagtttgtaaaaagcccctttcattcggtgattcctcaggtctttaggggaaatttctggaaaccaggaagaaggaaataaaggttgttttgctgaggatgggtgacgttgggcatggaacccaaatgagtggtttgagcagaaagtagcctccatgctggactaatgcaatagccctgccatgatttcattgcagggctgtgaccgtctacgacaagccggcatctttctttaaagaggcacctctggacctgcagcaccggctcttcatgaagctgggcagcacgcactctccgttcagggcccggtaggcctcccaccctcagctgccttctctcctgctcgccactgccctggcctctccccttctcactgcagacctgggaacccactcatccagggattggcaaactaaggctacaggccagtctcctgcttttgtaaatcaagtttcactgggacacaacacactcattaacttctgagttgtctacagccgcctttgagctacaatagcagaatcgcgttttgcaacagagaacctgtggcccacaaagcctgaagtatttactctctgaccctttaaggaatgttaaagggtcttactctcctgccaatgggttcccaggcctgtggcaggatctgtggacctgtgtgtcccctggggtgtctcatggggctaaggaagggaactttgtgcaggtccacataccctgaggtgtgcccctgggtaagctggggtggtgtgggagggcgtcctagcagccctcatcttgggtccaggggatgacaagacagtaagtcctgtggagaaaaggaattagtcagtcttgtttgctgttgtaaccttagcacccagcaacaatattagagaaagcaagcccaggcctcgattggcaggggtggcctggtgctgctgatgcagccgggcaccccaaccgttgggagcctgcaggcctcaccatggcaggagatgcccgttctgggtcctgggcctgctctgtggcctctcacagggtttttttctgctccttcagctcagaacctgaggacccagacacagagcggtcggccttcacggagcgggattctgggagcgggctggtgacgcgtctccacgagcggccagccctgctggtcagcagcacaagctggacaggtctgcatgaccactggggcacttggggttggtgtgaagggcacctggccaacctgtattctcctcacccctgccagtcctgcatgccccaaccccaccacggtctcagtgagaaggggagggcgtgtgagctggaagagtggtgtctagaaacaggcccctgacattcaattcttctcatagaggacgaagacttctctatcttgctggcagctttagaaagtaggtgtgtggctgcggtgaggagctctgggctcgtcggggccactgagctgtgagctgcttgcctggtctgcagcatgttcctgtcctgggctactgggtggggcagcctggggacagtaggggtggtggaggtgggccgccctgaatccccagttgggtcattgagtgaccaggccctcaggctgaaatgccccctccaggagagtatctcacagaggctggtggcctccctgccagagcagtgcactttctccacctgaccaggggactctggctactgtttatttaaaaatttttttctgaatgggcatggtggctcacacctgtaatcctagaactctgggaggccgaggcaggcagatcacctgaggtcaggagtttgagaccaacctggccaacatggcgaaacctgtctctactaaaaatacaaaaattagctaggtatggtggtgggcgcctgtaatcccagctacttgggaggctgatgcacgagaattacttgaacctgggaggcagaggttgcagtgagctgagatcatgccattgcattccagcctgggtgacagagcgagagtctgtcagaaaaaaaaaaaaaaaaaaaaaaaaattaaatcagaaattccatgtagaattgtttctttttttaaacacagagtttgaacaactgactcttgacggacagaaccttccttctctcgtctgtgtgataacaggtactgcctgggaccctgggtgtctgtttggttgggggatggtggagggggaggggcacacagcctttaccctgtgcttcccacgatcttgtctccttaatcctcactgcagctctctgccatagggtcttacactgcttgacatgcgggaaactgaggctcagagggtttcacagcagggcagggagcccagatttgaatctgtagataccaagctttctactttttcagtagtttccaagcatcttttttttgttgttatgtcattggtgtcttttttttttttttgagacaaagactctgtcgcccaggctgggatgcagtggtgcgatctcagctcactgcaacctctgcctctcacattcaagcaattctcatgcctcagcctccagagtagctgggactaaaagtgcccaccacacccagcttatttttgtatttttagtagaaacagggcttcaccatgttggccaggctggtcttgaactcctgacctcaggtgatccacccgccttggcctcccaatatgctgaaattatagatatgaaccactgtgcccggccatgtcattggtgccttaaccaagcttcttttaatttttcaaacagaagagcccctgtcccagttactgctgctgagccctttcaagatgattcagtgaggagggagaaaagcggaagcggtgtgggaagaggcggggtctgggccagctgctggtcctgctctcctccctcctctggcctctaggctcccaggactggtttggaacccgcgccatgtgctctggaggctgtggcagggcaggtgcggcttggaacccgcgccatgtgctctgggggctgtggcagggcaggggcggcttggaacctgcgccctgtggtttgggggctgtgccagggcagagggagtcctcttgtcccctgtgcacaacacagacagaaggctgggcccacccagtgggtggtcgcgtgccaggccagtgcttaccccgccttgtttgcagcccgaggccagctggttgcaggtgcagggctatgcatcaggggtcagggtgcacatacccctgcaggtcttggggctcctgagttgcttctggaaaggcccagatagggcctgactgcagctgccgaggggtggagcttctggannnnnnnnnnnnnnnnnnnnnnnnnnnnnnnnnnnnnnnnnnnnnnnnnnnnnnnnnnnnnnnnnnnnnnnnnnnnnnnnnnnnnnnnnnnnnnnnnnnntatttagggtatttatcttctcacacaggactcctagttgaagactagaaaaggtaggaattagccaggt

SEQ ID NO: 1004 - protein, 279 aa, Homo sapiens
MYLVTVLRNLLSILAVRSDSPLHTPIYFFLSNLCWADIGFTSATVPKMIVDMQSHSRVISHAGCLTQMSFLVLFACIEGMLLTVMAYDCFVAICHPLHYPVIVNPHLCVFFVLVSFFLSLLDSQLHSWIVLQFTIIKNVEISNLVCDPSQLLKFACSDSIINSIFIYFHSTMAVTVYDKPASFFKEAPLDLQHRLFMKLGSTHSPFRARSEPEDPDTERSAFTERDSGSGLVTRLHERPALLPEASWLQVQGYASGVRVHIPLQVLGLLSCFWKGPDRA

SEQ ID NO: 1005 - DNA, 1063 bp, Homo sapiens
  source (1)..(1063)
  CDS (201)..(863)
  modified_base (754)..(853): a, t, c, g, unknown or other
tctactatcaaataaaagatttgttaataataaattttaaatcattaacacttaacgcattattttcagtcacactaagttgattccttcgtttctttcaggttgcttcagagtcttcccttctatctgattcagtggaccaagtaaatgactctctggtaacagaatttgtattacttggacttgcacaatccttggaaatgcagtttttcctttttctcttcttctctttattctatgtgggaattatcctgggaaaactcttcattgtgttcacagtgatctttgatcctcacttacactcccccatgtatattctgctggccaacctatcgctcattgacttgagcctttcatctaccacagttcctaggttgatctacgatctttttactgattgtaaagttatttccttccataattgcatgatacaaaagttctttatccatgttatgggaggagttgaaatggtgctgctgatagtcatggcatatgataggtacactgcgatctgcaagcctctccactatccaactattatgaatcccaaaatgtgcatgtttttggtagcagcagcttgggtcattggggtgattcatgctatgtctcagtttgtttttgtcataaatttacccttctgtggccctaataatgtggggagcttttattgtgattttcctcgggttattaaacttgcatgcatggacacttatgggctagaatttgtggtcactgccaacagtggtattcatannnnnnnnnnnnnnnnnnnnnnnnnnnnnnnnnnnnnnnnnnnnnnnnnnnnnnnnnnnnnnnnnnnnnnnnnnnnnnnnnnnnnnnnnnnnnnnnnnnntttattttaattgtactttaagttagataaatggtaaggtcaacagcttgttacaacccttaagtattattttcaggctgattgtcaatatgttttgtacaatgttctcacttataggtgggaattgaacaatgagaacacatggacacaggaaggggaacatcacacaccggggcctgttgtggggtggggggaagggggagggatagc

SEQ ID NO: 1006 - protein, 220 aa, Homo sapiens
  MOD_RES (185)..(218): Variable amino acid
MQFFLFLFFSLFYVGIILGKLFIVFTVIFDPHLHSPMYILLANLSLIDLSLSSTTVPRLIYDLFTDCKVISFHNCMIQKFFIHVMGGVEMVLLIVMAYDRYTAICKPLHYPTIMNPKMCMFLVAAAWVIGVIHAMSQFVFVINLPFCGPNNVGSFYCDFPRVIKLACMDTYGLEFVVTANSGIHXXXXXXXXXXXXXXXXXXXXXXXXXXXXXXXXXXLF

SEQ ID NO: 1007 - DNA, 1024 bp, Homo sapiens
  source (1)..(1024)
  CDS (201)..(824)
cttgtgaattgcttgtatccaaaatacacacacagcattaagtgctggtttttatcttttaattttccaatcctcttttcttctcatggtgtccaagtgacacagagccacagaatctcacagctgtctcagaattcctcctcctgggactctcagaggatccagaactgcagcccatcctcgctgggctcttcctgtccatgtacctggtcacggtgctggggaacctgctcattatcctggccatcggctctgactcccacctcgacacccccatgtacttcttcctctccaacctgtccttgcctgacatcggtttcacctcggccacggtccccaagatgattgaggagatgcaatcgcatagcagagtcatctaccatggggactgcctgacacagatgtctttctttgtcctttttgcatgtaaggatgacatgatcctgactgtgatggcctatgactggtttgtggccatctgtcaccccctgaactacccaggcatcatgaatcctcacctctgtgtcttattagttttggtgccttttttccttagcctgttggattcccagctgcacaatttgattgtgttacaattcatctgcttcaagaatgtggaaatctctaattttttctgtgacccgtttcaacgtctcaaccttgcctgttctgacagtgacatcaataacatatacatatatttagatagtactatatttggttttcttcgcatttcagggatccttttgtgttactatacagttgtcttccccattctaagaattccatcctcagatgggaattataaagccttctccacctgaggctctcgcctggcagttgtttgcttattttatggaacaggcattggcgtgtacctgacttccgctgtgtcatcatcccccaggaatgatgtggtggcgtcagtaatgtacgctgtggtggtcacccccatgctgaaccccttcatctgcagcctgagaaacagggacattcaaagtgccctgtggaggctgcacagcag

SEQ ID NO: 1008 - protein, 207 aa, Homo sapiens
MYLVTVLGNLLIILAIGSDSHLDTPMYFFLSNLSLPDIGFTSATVPKMIEEMQSHSRVIYHGDCLTQMSFFVLFACKDDMILTVMAYDWFVAICHPLNYPGIMNPHLCVLLVLVPFFLSLLDSQLHNLIVLQFICFKNVEISNFFCDPFQRLNLACSDSDINNIYIYLDSTIFGFLRISGILLCYYTVVFPILRIPSSDGNYKAFST

SEQ ID NO: 1009 - DNA, 1063 bp, Homo sapiens
  source (1)..(1063)
  CDS (201)..(863)
ttttactcacatacattgtgacagtggtggggaacctactcgttgcggtgactattattgtcagcccttccttgagctccccaatgtaattcttccttgcttgcctgtcattaatagatgctgtattatccaccaccatttctcccatattgattgtagacctactctgtgacaaaaagactatttccttcccagcttgcatgggccagctatttacagaccacttgtttggtggaactgagatcttccttctggtggtgatggcctatgatcgctacgtggccatctgtaagccactgcactatttaaccatcatgaatcgacaggtttccatccttctgttggtggtggccatgactggaggtttccttcattctgtgtttcaaattgctgttctgtacagtctccctttctgtggccccaatgtcattgaccactttttctgtgacatgtacccattattggaactggcgtgcactgacacctactctataggcctcactgtagttttcagtggtggagcaatgtgtatggtcatcttcgcccttctactaatctcctatggagtcagcctaaactcccttaaaacttatagtcaggaagggaggcgtaaagccctgtctacctgcagctcgcacatcaccgtggttgtcctcttttttgttccctgtattttcatgtatgttagacctgtctcaaacttccctattgataaattcgttactgtgttttatacatttatcacacccatgctgaatccttttttatacacgttgagaaattcagagatgataaatgctataaaacacctgttgtgtaagaagctaactatagttagaataagagtgtccctcctcatgtagataaggatgtatgtagacaagctcttcccagtgaaattttcagacttctaagggtaattcaaggatcccacaatggaagacaggatttaggtgctccgagctcaactgagaaatcatcccattatgacatctgtttgaatttcaagatctcaacctctatatccagactgagagtggatggggggctttggctcaggtcc

SEQ ID NO: 1010 - protein, 220 aa, Homo sapiens [sequence omitted]

SEQ ID NO: 1011 - DNA, 1790 bp, Homo sapiens
  source (1)..(1790)
  CDS (201)..(1009)
  CDS (1059)..(1172)
  CDS (1280)..(1394)
  CDS (1462)..(1590)
  modified_base (829)..(928): a, t, c, g, unknown or other
  modified_base (1611)..(1710): a, t, c, g, unknown or other
tccctttatcccacgggttaactgagatggttttaaagacctcggttgtcaggggggttgatttgcatttggatagactttcctttgactataggagattgaacctacaggccacagttctcacttcatcttctcctccctcagcactccatagggttcctccctggtccttaaacacagtacctgcgaatcctgggcccatgccacccttctgggaagcgccaccctgggccaatcagagccgagcacgcgagctggagttcgtgctgctgggttttgcacacgtgccctcactacgcccgatgcttgcagcgctcttcctggcagccttcctgctcacaatgtcagggaactcgctcatcgtcttgctcaccagcctggacttcggcctccgcacgcccatgtacttcttcctgcgccaactggcgctggtagagatctgcttctcactggacgtggcaccccgcctgctggtgaccctgctgcagcctggacgtggggtgtcccccacgagctgtgccctgcagctgctccttgtgctgtcctgtgtcacatctgagtgcttccttctcatggtcatggcctgggatcgctttctggccatctgcaggccactgcgctatggcgccatcatgagcccgcagctgtgctacctgctagctactacctgctggctggcgggaatccctgtggcactcgtcttcaccatctggctctttaacttccccttctgtgggccacgtggcatccgacacttcttttgtgacatagcacctctgctgagcctggtgtgtgcagacaccagagttttcgaggccaatgtgtttgnnnnnnnnnnnnnnnnnnnnnnnnnnnnnnnnnnnnnnnnnnnnnnnnnnnnnnnnnnnnnnnnnnnnnnnnnnnnnnnnnnnnnnnnnnnnnnnnnnnntctttcatcttgcttcgcccatagtcgccatatgttgcaagtgagctgccagcgcaacatcgcaagcgcggcgaccaataggtgatgcttactgcgattaatcagcttcatcatcactgcactcccaaagtggctacgacatcactcgctgtttcgcgggtactgcctttgctggatatagcccggcgagcactgacgcggtgcagattgaagccgtgctgttcgtaaagttcaattacgcgcggtgcggtagaattgctgatcaccacttttgccccccgctggtgggctgccacacagctttccgcaagctctacctggctatcccatgagaacccaccagccgcgtagttgtgaaaccagcggtgccgggaagcggctcataaggcggatcgcagtaaacgacgtcaccatcacctgccagcgcgagcgtgcgcctgaagcctgcattcatgaatacgcatgcgtgagccttccgcttaaatgccttgatctcttcttccgggaaatatggcgctttatatttcccaaagccgacgttaaaaaaaaccgtccaggttgtaacgaatcaggccgttgaagcagtgccgattgaggtaaaggaatgctgctgcacgctcgaccgcatccagccgctgcgcgttgaatgcttcacgaattaaccacttcaccccatgtattannnnnnnnnnnnnnnnnnnnnnnnnnnnnnnnnnnnnnnnnnnnnnnnnnnnnnnnnnnnnnnnnnnnnnnnnnnnnnnnnnnnnnnnnnnnnnnnnnnngtttctctgggaaagtctttatttctctttcatgtttcaaggatattttccactgcatatattattctacgcaagaaagg

SEQ ID NO: 1012 - protein, 388 aa, Homo sapiens
  MOD_RES (210)..(243): Variable amino acid
MPPFWEAPPWANQSRARELEFVLLGFAHVPSLRPMLAALFLAAFLLTMSGNSLIVLLTSLDFGLRTPMYFFLRQLALVEICFSLDVAPRLLVTLLQPGRGVSPTSCALQLLLVLSCVTSECFLLMVMAWDRFLAICRPLRYGAIMSPQLCYLLATTCWLAGIPVALVFTIWLFNFPFCGPRGIRHFFCDIAPLLSLVCADTRVFEANVFXXXXXXXXXXXXXXXXXXXXXXXXXXXXXXXXXXLSSCFAHSRHMLQVSCQRNIASAATNSGYDITRCFAGTAFAGYSPASTDAVQIEAVLFVKFNYARCETSGAGKRLIRRIAVNDVTITCQRERAPEACIHEYACPTLKKTVQVVTNQAVEAVPIEVKECCCTLDRIQPLRVECFTN

SEQ ID NO: 1013 - DNA, 1455 bp, Homo sapiens
  source (1)..(1455)
  CDS (202)..(522)
  CDS (590)..(1255)
ttgagagggcagctataggaattcttgtccaggaggcagcaaaaactgcactctttttctgaacaagtcagtaagacttccttgtgaggaggactgggggtggtgggctgggaatggacccatgaactgttgcgacctctctgcagccaccattcctggtccagcctctaccttccacccgactcctcctccacgcgcagggccagagcatgcgtacccgacaagctctgccctcctgtgcctctcttctacaggtgcctgtgggcgggctcgtgcatggacagtcccagcaatgccaccgtgccctgtggctttctccttcaaggcttctccgaattcccgcacctgagacccgtgctcttccttttgctgctgggggtgcacctggccaccctgggcgggaacctgctcatcctggtggccgtggcctcgatgccaagccggcagcccatgctgctcttcctgtgccagctgtcagccatcgagctgtgctacacgctggtggtggtgccccgctccctggtcgacctgagcacgccggggccaccgcaggggcagccctatctccttcctgagctgcgcctttcagatgcagatgtttgtggctctgggcggggccgagtgcttcctgctggccgccatggcctatgaccgctacgtggccatctgccacccgttgcgctacgcggccgtggtgacccccgggctgtgcgcgcgactggctctggcctgctgcctcaggggactggcggtgtccgtggggctcacggtggccatcttccacctgcctttctgcggctcccgcctgctgctgcacttcttctgcgacatcacggcgctgctgcacctggcctgcacgcggagctacgccgacgagctgcctctgctgggcgcctgcctggtgctgctgctgctgccctcggtgctcatcctggcctcctatggcgccatcgccgccgccctgcgccgcctgcgctgccccaaaggccggggcaaggccgcctccacctgcgccttgcacctggcagtcaccttcctgcactacggctgcgccaccttcatgtacgtgcggcccagggccagctactccccgcgcctggaccgcaccctggcgctggtctacaccaacgtcacgccgctgctgtgcccactcatctacagcctgcgcaaccgcgagatcaccgccgccctgagcagggtgctggggcgccggcggccaggccaagctccaggcggggatctgcgcgagctctgatggcaggcccgtaccaggcagagggggccgctccgctccgtagagttttccccatcatgaggggtctgcatggggaaagccaacaaggggactcaaggactgcatccaggaaagagaaagcctcccagaggttgccccatcctccactcttcccttgaatagctgggatcacagctattcgggaggctgaggcacgagaa

SEQ ID NO: 1014 - protein, 328 aa, Homo sapiens
ARACVPDKLCPPVPLFYRCLWAGSCMDSPSNATVPCGFLLQGFSEFPHLRPVLFLLLLGVHLATLGGNLLILVAVASMPSRQPMLLFLCQLSAIELCYTLVVVPRSLMQMFVALGGAECFLLAAMAYDRYVAICHPLRYAAVVTPGLCARLALACCLRGLAVSVGLTVAIFHLPFCGSRLLLHFFCDITALLHLACTRSYADELPLLGACLVLLLLPSVLILASYGAIAAALRRLRCPKGRGKAASTCALHLAVTFLHYGCATFMYVRPRASYSPRLDRTLALVYTNVTPLLCPLIYSLRNREITAALSRVLGRRRPGQAPGGDLREL

SEQ ID NO: 1015 - DNA, 27469 bp, Homo sapiens
  source (1)..(27469)
  CDS (203)..(377)
  CDS (17526)..(17665)
  CDS (26350)..(26853)
  CDS (26886)..(27269)
  modified_base (3826)..(3925): a, t, c, g, unknown or other
tatgtgcaagttgagcctgggctgaggtggtgggcagggagagggaagcagagagaaagtagagaagaagagggagggagccaggagagcatcattcccccacattctacacaccaactgtaagaaaacatccccaggctggccatgtccccgggcttgccccctggagtgtttgatcccagcctgcactcactccctaggtagcgaggaaaacctccagccaaggactctgcgaagtgatctggactgccagggctcacaggcacccgatagaagccagcccaagccaagaggcctgggcttctctttgctttcccatagaccagagcttctagactcatgtgccccagccacacagggcctcagatgggagacaggtgtgcagggattagtcccatcaacccttgaagtggctggctggcctggacagctggagccctctgggcctctcacctccagccctggcagctgcagacacttcccagtgtgaaaagggttgggaatccctgaggtggatgctgggggccttgggaaaattttaagcaaggggtagatgagactgggtggtacaaagggtgttctgggagctgcatggaggagggaccagatcggggaggcaggccaaggagcccatcatagagtgggcttgggggtggatggataaatgggtttagatttgaagttacttagcaggtggaatcagacaaaggcaagagagagtgagcacgtgagcacttagggttgggtgaccaggcactctccactggccggcagaaccaatgcacatgatgaagctgtgctgatccttcacacaagggtctgaagacccttcacacaagctgtgtgacccctaagtgcatatcatcttacactgcaggaaaagcggcccctgaacctccaactacaggctggagatacaatggagggacaagaaagggaaatgctaagcaaggttcctgggagagaggcatcctgcccctgctccttttctcagaagcagaggttgccaggatgaacgcaaaggctggaggcttcacttgggtttttcctcacccttcacttgggtttttcctgacccttcacattcatctaattccatggcaggaagtttttcttatgaatgacttcaatctttctgctgcctcagagtctcattcccccagagcattcagctccacacctgttcaggcgcccacctgccccaccttacctcattcactcatgcactcataagctgttactgagcagctgtgctgggcactgagccacccatccctgagccaagatgttcacaatccaaggaggcagacatgtcaagacacgattccaggccagtgtgacaacagtccctgagtgctggcccggtctcagctgcaccctcctccaaatactgcacctaaatccaagcctccgtgatgctccaaagagggggctggctgggaggccagggccttggtgcctagtcccagccctggtattgagactctgggcaatgtctggtcctttcctgggcctccatttctcatctgtacaatgggcgtaatagaaatgtgtattactgagtatttaaaattgcctaggcactgtgctatgtgctttcatggataacgttatgtggcgctttgcttactagttaatgaattcatccaggtaaagcatttattcagcacattcctgctctgtagtaggcacttaataatatctcccctattttacagaccaagaaactgaggcactagttaaataatttgcctaaggtaacagagtcagttagaggcctaagaaggatttgaatcggttcccatatccacaggagttcactgctccacctgccaaggcctgggggtctctggaagggctctcaggcccaggtggtgcctggctggcttctgaaggactatgcaccatcaacaggttcttctgcaccagccagtgcagcccaggtctctccctggaggagcctcaggtttagatgctgatgcccagcatgagggtgggaggtgggaggactctggagagagggagatgttgtcataacttctagcctgatgctgctgcccccacaaatcccccaagcttcactacagcctgggggcctgagaaggcagacattgtccctctttgtcattttggggaactgaggaaaaaggggaggaggaaccggctggtcttagccctcctaagattcagaatgcactgctgctgattacattgccttcatttccccactgggccccttggctctgagtcctcagctcccagaacagggcctggcacagaggaagagatcagtgaagtttgttgactgactgactgactgaatgctcgctagccttctgtgtcctatcctgtactctgctcacctgcccccacactatggcctcaagcgtgatcaaacacagatctgaacttgttactccttggctgaaaacccatccatggcttcccactgctctccagaaagtccccactcttggcctggcattcaaggcccctctttttctgggccctgccttcccttcatgaacccttgtgcttctgctccaacagaaacagtgtgtgtgcatgcttgcgcatgtgtgttccttcaaatctctgctgagcgcatttccccctgcctggaaagcccttccctcccaagtaaatgaatagtttacccattcattcttgaatgtctggcacaaatgccacttcccatgaaggcttctgggacccaaccccacccaggtgggatgtgtctcttttcatctttgtatgtgcttgtagggaccagttgttttacctatcagcacctctggaattcctgtgagttctttccttttgcatctcccctgcacagagatctggaagccagaatgattcacctctgtgccctgggcccaggctggcaatgaaagctttatttttattttttgagatggagtttcactcttgttgcccagactggagtgtaatggcatgatctcagcttactgcaacctccgcctcccggattcaagtgattctcctgcctcagcctcctgagtagctgggattacaggtgcacaccaccacgcctggctaattttttgtatttttagtagagatgggtttcaccagtctggaactcctgacctcaagtcatttgcctgcctcggcctcccaaagtgttgggattacaggcataagccactgctcctggccagtgaaagcttattgtgagaataatgttctacatctgccaacagagagagacagagagacgagagctacagagtgagagcatgcagaagtggagagtatgacaggcccacagagacagggcaggcagagtcctgaggggcagaggttgccacgagaggcctgactcacctggctgttgtccagagcatcctggaccacccagcttgagcagcctgcgtggcagggtgtgatgtattccacacgagtgctggggtcgcagacagggttaaagccgtccaatgggcaggagcaggcctccatgcagcttggagacagctccagcccagggtgggcactggtgggagagaagaccagtagggttggcctggcttccctcccttaggccactagctggggcatcctcggccctgtagccgagagcaatggccagagatttcagctccacacagaggattttcatcatcagggctgcccgatgatggcgtgatagtgagctccttgcaatgaaggtgggcaagtatggagacaggccccctcaatcctacaagcctttgagcttcttcaaacatctctgcacctcagtgacccttctacagggtatacaagataaattcctcccagaagttagtgtcagatgaggagnnnnnnnnnnnnnnnnnnnnnnnnnnnnnnnnnnnnnnnnnnnnnnnnnnnnnnnnnnnnnnnnnnnnnnnnnnnnnnnnnnnnnnnnnnnnnnnnnnnnttttgtatttttttttagtagagatgggggtgtttctaccatgttggtcaggctggtctcgaactcctgtccctcatttggaaaatgggcccagagtgctttgtcatcataaaagtgctgcacatggtcaggcgcggtggttcatgcctgtaatcccaacactttgggaggctgaggcagatggatcacgaggtcaggagttcgagaccagcctggccaacatggtgaaaccccatctctactaaaaatatgtaaattagctgggcgtggtggtgagtgcctgtagtcccagctactcgggaggctgaggcaggggaatcgtttgaacccgggaggtagaggttgcagtgagccgagatggcgccattgccctccagcctgggtgacggggtaagactctgtctcaaaaaaaaaaaaaaaaaaagtactgtacacatgattggggttataatgaatgttcccaggacacagattctctgggccactgaagcagggccacttcctcctcagatactttctatagctcccaattgcctttaagaaaaagtccatgtgcctaacctggcatacaagttccttgtgactgggccccatcaacttctttggcttaacttcccaagatgttgcccagtgacccccgctcctccaacggtactgggcagcttactagctccacagacatgcaggtgtagtcacttttctaagcatttgcagtgctatctccttccctggccatgctcaccctgtgtgggattggtggaagggaagagaaaccacaagggcaatggcacggagaggaagagctctggtaccaggcagacctgggggctggcctccactctgctgtttactttggggtgagcttggaccttgcttgccccctctgagcatcagtttctcacctattgaaaaggggaaggacatttcactgagttctcttaaagccagtgatgcagtgctggaatttgaacctgggactgctggttctttccctcgccccacctgtctgccctagaatggcttacatttgaacacagttgggctggagagaggaagagcaacaccggaaacaaggagggatgaacctcaaagagaaggtcatcaaacagcatatgggagaggttacccccagctggaagaatctggaacggcttcctggaggagttggcatttggaagagttggaaaacagggcaaatgtcaccagaatgggatgtgggcaggggcttcctgagcaaaggtgaacaggtgggaagatgaaatctctgagtcagactgtgtgtgtgtgaatggctgccccagcacttgcagggaaactgctgcctaaggggtatgtggtgagtgggtggaggggctctgctggagccggatctgaacttcactcctctctggtgtctgccctgactgggacagcttcccctctcccttggggactcttcccaggctgcaggctctgtgtcctaccccacccacattcccacacccctcagagtagtgtggtgagcctggccacagcccagaatgggtctcgggaagcaaggctagagatggcacccaatggcccaccaggcagatgctggggtcagcttcctgctgtctgtgtggaaggtcagtgggcacctggagaatattccagagctgggccctgcaggggtcagaaaaatagtactggggggacttgtggggaggtgtagtgcagccaaagtctctagttagttcccacactccccgctctccatccctcccatccatactgagccaaggctgatggggaatttggtttgtcaatggcccattcacaccgcccccccaaccatcccacccaaatctgacctcattctcatctgtcctgtgaggtgccccgagaggaggcatccatcccacccttcctgccgtactgcagtccccaagccatggctgcgttctcctggagtccctgcagctgctcctcagctgggtctgtctccatggcctatgaagctctccctgctgggcttctgggagcaagtggggccttgcccaaatggctgtgaggctcacacagcccaggggaggatcaacagctgggaaagaggccaaaggtgactgctatagggcgtctaacctggagttctcccagtagaaagatcctttgtttcttctacccatactgccttcccagaaagtgttgggccaggtgctctgttcccagaaacactgccctcgctacaaggcgattccttgtcaccctgcaggcagagcttcaagacctttttcctccagcctcctccccactctatagtaagagacctcactgcacagagacccatgcaggtctctgcaggtcactctcaatctcctggtcttctgggtggatcttctgatgctgcctgcaggtctgtctgtagctctccgtcacctgtccccgtctgattctctttcctgctctgtctcctgcctctttgtctctcccagtctctgctgcagccctctctcccggtttgacctccctacctttccctgcattctctcactgatacctgttgatattgcgttctccgacctcctgtgtgcctcttcgtttgagcctgcctgtctgcactgtctgactacacttttctctttttctctgctctgtctgtctctatctttgtctcctttgagaggggaaacggcttgaagagggggtcaggggcctgtctttctgttgtcctctaagtctcggtctcatcaacgaggtttggctgggttccctggctccagctgagtaaatcgtgtcccttcctgctcctccagtcattcactcattcatttaacacaccttcactgaactccggccatgtgcctggctctgtgccaacagctgtgagcacccatcccacccactctggctctacggcctcacccttttctctgggaacatgtcccccaggcttgctctccatggcccttccttaatttgttcggacttacctatcctgggtcccatgactgctggagtgcagtgagctccagcccctaattcaatctcaggacctggagcttagcaggggagaggaggcaaatcttctcaggggctcctggagacagcagcaggtgagccacagcagggatgcaataacggtgggagctccagacacggggtcagttcttcttgggccacacaggacatcagacttgtccagacacaggttagggagtcttgctcaaactcagccccaagtatctccaagtgtttgtctccctgggtcacttgctccttctgtctctcccttgccctggctccacggttgtatagaaggctgggtttgttcaagtccagcctctctgtgaagaggaagctgcaccccgcctccctgaggctcagcctcagcctgtccttttccagcctcttgcctcagcatttcccttaggtattttcccctgctctgttagcagcagagaggtgggggcacaggggggatgctgatgggtctccccaagctccccaaccttccacattcatcccccagtctcctcactgcactcccattttccacctgagcccttctcctaccaagctcttgttcccttcacagaacttttgttgccctcccttgataggagggccccatagagagcccttgttcccccatctagcagttgtcctctttcactgaacccctgtccccctcaagcccacgtgccctctcactaaatccctcatcttctccctgagctccaaggatccacagcaagaaggggctctgtccactaagtatccagtggcagcctgcctgggtggagctcatggtagaaggtccatcaatttcagccatctaggcaaaggaggaggggaagagaatggaaaatatgaaattctcagagtttcctggactgaggactgaggatggaggttcaggagccagagagatctgggtcccacctcagttgttatttgctggtcaagtgatctcaggcaagtcccagcatctccctgagcatccattctctcatctataaagaagggacagtaatcccttgcagagccactgtgaaggttcggtgaaggacagagaagccaagcctgcaggcctggagctcagagcagggagtggcagaggtggggctccgaacagggcagcaagggaaagcaaatccactttgcctttcccagcttgcacagcactttcacacacaaggccccactgggtcctccccttgacactgtaacatcaggttatttattccctgattttacaaatgaggcatggagtctcagtaacttgccagagatcacccagctagtaggtggtgggtgccttgaacctctaatgatagaaccaggcttttccctccacccaggatatcttctctgaggaagatctgggtttccccaaatccaagatgcagaagtgaacctgaccctgtctctggaataaagtctttgcgtggaatgaggatgtgggtttggagtctaactttcagggtgcaataacagagaaacatacaccagctccacttggctcctatttgctgtatgagggtgctagtaggatgtagggaatgtgtgaaataatcacagatctccctggcactcaggaggcactcaatagatacttgttacatgaataaatgagtctttgagaaaccagaaatgtgagtacatgaccattccactgagaaaggtcaagaactggcttggattaatagaaagaccagaccctcatgggtttgacccagggtctgacctgatcagaccctacttgagaaaaccaaattgggtctatctctccaaatccttctgacgaacgtcagcattgtgaatcctcatgaagactggcaggggtgcaaccttccagactccaaattacaggtatgaagatccctttaaactttctggaagcccagttacccccaccttggccccagggcctgaagaagttctgtgcatggaatggtcttggtagggggaccagcttgtctggctaagtttatctgattgatctttttctttttgtttgtttgtttgtttgtttgtttgtttgtttgtttttgaaatgcagtctctctctgttgcccaggctggagtgcagtggcacaatctcagctcactgaaacctcggcctcccaggttgaagtgattctcgtacctcggcctcccgagtagctgggattacaggcacgtgccaccacacctggctgatttttgtatttttagtagagacagggtttcaccattttggccagactggtctcaaattcctggcctcaagtgatccacccaccttggcctcccaaagtgctgggattacaggtgtgagccactgtgcccgcccggcctatctcattgatctttgagtcaagcaatgcacaataccccccagggcatggtatatacagtagcctctggcatgagcagctttcatttattacctcaacttccccaggctggcaaagcctggtccaagaatattcctgaacttgagctgtggaacttgagcaagggtcaggtacccaggagcctctgagacataggctaacatgccttcagaccagctccctggtgaaccccatagtcggctcctgctatgagtggcccaggtctgaggtttgaccacactggtttgcacctgggctttgccatttgccagtgtatggtgtttgctgtgctttgttcaagtattatatgaaggtgcattttacagagcgccacgatgcgtgtggatcacaacaccatctgtggattcccacagtttacaaaacttgatgccttttttagagtcctgttgccgttggcaaaagcctagcacagtctgcaaacctcggctgcttccagggccccataacattcacagagccctgtgtctcatgctaagcctgatgctgttcataaaaccctgggctgtttgcagaacccaagcccttaccttcttcaagccaacccacttaggaaaatgccttctgataaaccaggaaaaataggagactcttcattttatagaactatctgctctggggtacaaaggaagagggctgggcccagattaaagacctcaaggctggtctcagctctgtcataatcctgctgtaggactttgggctgatcctttgtcctctctgggtctctgtcttcccatctgttaaatggagatcctgacatccaaccctccacctcaggcctgtcctgaggatcactgtgagatggctcagaagacggggtgtgggcggggtgaaaaggggaagagtgcccagaggcttcttcctgaaaacggctccaaactaccacctcagcatctttgttcccacttcccttctggcctggcagccaggaaggggatatctaaaaatgagccatgggccaggcagacaagcgagggcctcagccagagcctcagccttccctgcccgctggatgctgccttggagtcagaccgtcgctgtgcagacacactcccgtgtatggctcgttgactctgctcaaggaaggcaatgtcctccttatttcacccatgaggacactgccgctcacagaggcctcatgtcttgcctgaggctccatgtcaagtatatggcaggggctgggatctgagccaagggcagcaaggatggatgcctggtcctcagaagtcggaggtggaaggaatatggagctcatttaattcaacctttccttttttcagattggtagactggggccaggagagtgtggagatcacgggggagtcactgtttatctctccctagataagcaggcttcagtctctctagctggttgatgagaaacaggccccatcctgccaagcattcagggcttcccctgcctttgttggcacaacttctccatcaggacacagctcatctcctaactgcgaggagaggagcaggtgtgcaggccgggtgggtgtccaggttgcacagccacctaacctcaacacagcccctggctcttccagtgccccacccttgtatagcccctgccgtgctccctgtagcagcttaaaccccatctggaggtttctccctacctccaaccactccctttggaagctgcctcccccagccaccacctccaggctctttcgccccacagcagccttcccctgattccaactccctccatctctcagcagtttctccctccagcctatgggaatacacactgtgttggaaactgcatccttccctgaaagtgacagctctgggccccagaaagagcatgagcttgggtgtcagttcaaccctgacccagtacaaagctctctgaggctgtttcttcatctgtgaaatagagatgaaacgtgataactgaaaaatcatgagatctataaatttggagagaagactttatttcttttctttcttcctttttttctttttcttttttagagacaatgtctcactctgtcccccaggctgaagtgcagtgatgcaatcatggcttactgcagtctccatcacctgggctccagcgattctcctgcctcaggcaccccagtagctgggactacacgtgcatgccaccccggctggttaattttgtaagtttttgtagagacagcgtctcactatgttgcctaggctggtctcaagcagtcctcccaccttggccccctgaagtgctgggattataggtatgagactttatttcttatgaagagttacagcctacaaggtggccattctgatgggctggggagctcagtctggcagagtccagagacagacacttcaagggaggaggggttggacagaaatttaagctgaacgcattgaccaaatatacatattcaacaggttataggaggagctatgaatattcatgaggtgatcctaatgtatgcatatggaataaacatgcatgtttcataagacccatgttcaccttgggttggagacttaacattcaaatgcatatatacatcaaaaggtgaagcaaggacatgaagggctcaagtgcggtgtctataaactggccagaacccatccatggtcggtggtctcttatcagaaaaaattcctgaaacagtctctagtccaatcagagctatagttatggctggtggaacggggatcagttagttagtgtctggcggtggaggagctgcaaattgttttaccactgcttatctcaagaccagggcttatttagctgctagagaaaaagagaaatgttgtggcagtgagaacatagtttattctttagtgtatgggtgtgggacttaacccttgcctggcgtgaccctaggtcatgtttatagtttggcatcttattgccacaaagagtccattctgtcagtcttatgatctctgttttaacattaatgctgctcaggtgtagtgtctaagccacaaaagggaggaggataaacgaggtgtgtctcttgtcccttcatggccaagaactcagtttttaaaggtttctctggggtccccttggccaagaggtgggttgtccattcagtgaattgaggggcttagattttagttttagttgacacaagaagcctcctggcaggactgtcctaaaccctgttatcttgcccgatcttctcctaagtatgtggtacagcttcttcctcctgggagaccgcccccagcctcgcccagtgacctggggctggtcacttgccctctctgatccttagtgccattgtctgcaaaacaccttcccagagctgtcatatggcttggatgagctgatggatagattagtgcttccaaaattctgagagctgagcagatatgagccattattaatacagcagtgatggtgatggtgatgactcttataattctggaagcagaggatgaggaggaagtaaatcatgacacgtacgtgccaggtcagcctgatctcactgacaacccaggagaataaatcactaggaaggccccctgaggtaggaggaagctcaggagaaaaatggggactctgcaggtgggcggggggaccacggttcacagctgttgttctacaggtgctgcagggctccagcttgggcactggctggccttcagcccccagccctggctctgccactgacatgctggtcaggtctcattccctgcctggtcctcagtttccttattataaaatggtggagggtggggggtgcaggtgcagtggctcatgactacaatcccagtgctttgggagaccgaggcaggaagattacttgaggccaggagttcgatgcaagcctgggaaacatagtgagaccctgtctctaccaaaaatttaaaaattagccaggtgtggtggcacatgcctgtggtcccagctactggggaggctgaagtggggaggatcccttgagcccaggagttggaggctgcagtgagctatgatcgcaccactgtactccagcctgggcagcagagcgagaccctgtctctaaaaaaaaaaaaaaaaaaaaattttaatggtggttggggatgggggtggtgggggttgggggaagagtctcattctgctctgcccctgtcttttggagtctcattctgctcatggcccacatgagctaatggctgcgccactgttttcctaaagtgtcaagtgtgggattacagttattaatgtgtctccttggagagaggacacgggagaggggtggtgcagcaaaggctgggagggatgccgagggtgggagttggggatggggtgagtgggggtggcaaatgcgcgatgggagcaagcccctgccaggccgtggataatttggaagaagggccctgctccctaaagactttgcaacactgccccctgggggctggagaggaagcctgtgccctgacttttcctctgaggcttcagtcagggaggggaccttgaaggaccactgtccagaggctgaactgggtgggccagaagaaacccagctagggcagtcattgcctgcccgcgttccccacctgtccattccacttcacgagcctctcaaatctgcagccctgtcctggcctagcccaccactgctcttgtctgggccatgccccggcctctttcctacctccagtttcacaccagcccatcttcttgcaagccagagggaactttctgacccttaaatcctaccatgcccctttctgtgtaaaaccctgacccagctctcagtaaccccaggagagaccatccttctcagcctgacactgagtggcccctgtctctctgtccaatcacatcttctgcaggtcactatcctcacttgcagatgagacattacaggagtgtttagagcaaggaaggcgctggggtaggacttctcgggtgtgactgctggcttccccccttagtagctgtgttatttaattcttagtttgcggtttttttttttttttttgagacagagtcttgctctgtcacccaggctggagtgcagtggcatgatctcggctcactgcaacctctgcctcctgggttcaagcaattctcctgcttcagtctcctgagtagctgggactacagctgtgcaccaccacacctggctaatttttgtatttttagtagagacaaggtttcaccatgttggccaggctggtctggaactcatgacctcaggtgatccgcccatcatggcctcccaaagtgctgggattacaggcgtgagtgcccagcctgcagtacttttttaaactgtaaagtatatataacataaaatgttaacgtaaaattcagtggcatgaagtacatctacactgttgtacaaccatcctcaccatccatctccagacctccctcatctttccaaacggagactcagattcatatgttcttcattccacctctgttttctcatctgacggatagaactaatcactgaatgtgttttgcatgtgcttacaggtgggtaataggtactcaggcaatgttacgattgttttcttctcttgaggaagctgctctggaaagtcagtgcagcagcaccacatggagtgatctctagaaacccacagcctaccgctgcccggcttcatttctgtggctcgggcagattttctgagagctgctggggaagcatgccgcccatctcatctgggaagatgagtcacttcctctgctgctgggttatgagcctagggatggggaaggcaggaagcagaacacaagcagctgcttctcagctgggcggggcctccgcagtggctcacataagaaccacgtggcaaggtggattctctctggtgtctggaccagggtaggacaccctaacttgcctgtgtgccagctctctcaggaggggctggagcaggctaacttgcttccatcagtgttgcttattcagagcacaacagtttgcgttttgcttgattctctccttttcacatcatgctcccaacacatcatccgccccccacattctgtgcacacacttccaagattcactcactccaactgttcctggcatgcgcgtctaaaatcatctcaccttccaagtggcactgtcctcatttaaatgcatgtcttttttttgtcccctaggtggaactaggggagagaccaggcctcaggcctccctgatggatcctggtttctggcctgctctctggccaggggagcaagtggatctctccagcaaacaagctgaatggtggtgtcagaatcagagctgggtccagacaggatgcttagagggccacagaatctcctcctaagagtccttcagctggggactctagtcttttcagttaaagacatcaaccatcctccagaaagagccagcggtggcaagcagttagcttaagcaaaccagtcaagtctttggagtagcttaggctggaactcggccaacattagttgtgtggcatggggcagatacttcatttttctaagcctcagtttcttcttcaaaatggatgcaatgatcatgactaacactcattatttgccaagcactgttctaagcacttgtatcagctcagttaatgctccaaacaacctattataatccccaatttacagatgaggaaactgaggtacagagagacctgccaaggtcacacagttggtaagaggcagatcaggatcttaacctagacaatctggccccagagtccaagcccctaaccatggcacttaaccgtctcagagggcaaatttgaggactcagtcattatccactggtccctaagccatgaggttgaatacagaatgatccaagtactaagctgctgcctttgactgaccctgggcattttactttccttgtcaaatctcaggtttccctcctacaacaggaggggcttgaaccccagctccggctcagcagagagctcaccatttgcctggaaacctgcccctccctggtccctgttctgagcccctcccatctcctcagagtcagcccccatccctgcagcctgtgtggcaactctgccttcatatttctctgtctgtcttattccctcttctccctaaattcaaagaccactccttgttcctgtagaacccttgcacagcctccttaatcatctgtgactcccgtctccctagttctaatccatcctccacattctactggagccatctttccaaacactaatcttttttttagacaggatcttactctgtcattcaggctggagtgcagtagtgccatcctagctcactgtagcctcaaacaagcaatcctcccacctcaagctttccaagtagccgggaccacaggcatgcaccaccatgcacagctaattttttttatttttatttttgtagagacagagtcttgctatgttgcccaggctggtctcagactcctgggctaaagtgatcctcccaccatggcctcccaaagtgctgggattacaggtgtgagacaccttgcccagctcccaaccctaatcttattgtgcccagccattctcctcagagcaaagcctatttcttagcctaacatttgctgctcatcaccacacacctataacctaccttttgcactttcatccctggcgcctgcatatgcacagttccctcagctcaaatgcccttcctgccttttaccactggataagcacagatccatccttcacctgataaggacgacctccaatccctcccagcaccacccaagtgttccctgcttcctcctgaaagaatacacacgtgctcacagtcataccctagttctccacgtgtccttggctgaccagcatcgagcaggctggccattcactcgaggagcttcccatcagccagttcctctgcctgcagccttcctcctgttcactcatctgagctgctccaatgctccaatgcaaatggagtttttcttccccttctcagacactggactaagaatgggggcaacccagggtcacctgtcacaggactggcataatcccaaagagaaactgagtgcaagagtctcaggctttgcagggtgagaaacctcagaggggaaggcatccagcgggtggaatctctgtggctgtggtggcgattgcactgaggcacctgatgatttgcaaagagctctcacatagagtagctcactaaacctcactcgagccaatgttgccattattattacccccattcccaaagaggaaacagaggcagagagaagtgaagtcatgcgcgcccaaggacacacaggtggtacgtggaactgagatttgagaccaggtgcgtttggcccccaaagctgatgcccttgcgctggggccacactgccccctggtggcagcgaggatggtggcggtgatgagtatgccggaggcccagcactggggacacattctggactctcctaccctgagctccatggcctcctctgcatggtcggtaaggtggcccaggttctctctggacatattcataacctccctttggcactttccttttccagcctctcgcgtctgtcggagcctcgcacacctgggggagtgagggcggtaggggccagacagagagacagagctccaccgttcccagtgtttccagggcagagcagcgccaggacagggcacaggcagccagcctctggtttagggggaacttcaagggttgggctatttttttgttcttagcttaaaagtattcctgaaatacacgggctcctgctgaagacatttccgtgcctctccgatttctgtggagggagacagtggatggactgtgagtgtctggacttccccatggtcccaggagagggacagtggcttgtgcaacctggatgaaatgtttatgacgtctgcttgtgactgttacctcttctcaacctgcactacaccagctcagagcttgcacttaagaaatacctgatgatgaggccgggcatggtggctcacgccagcatttgggaggccgaggtgagtggatcacgaggtcaggagttcaagatcagcctggtcaaggtggcaaaaccccgtctctactaaaaatacaaaaaaaaaaaaaaaaaaaaaaaaaaaaagccaggcgtggcggcaggtgcctgtaatcccagctactcaggagtctgaggcagagaattgcttgaacctgggaggcggaggttgcagtgagcagagattgcactactgcactccagcctgggcgacagagcaagactccatctcaaaaaaaaaaaaaaaaagaaaaaaaaaaaaagaaatacctgattatcaatcctccattttgcagaagagaaaacagattctcagagagctaaatgccaggcttgaatccaaattagtctggcaccaagatcggagcatttaaccactatactgcctcccagtcccgttcaatggggaacaaacacttctacagtctcaatatcttcacaaaattctcctaccactccagtcttaagtgaggataggccgtccccctgcagcgccagatctgcacactgacctttactgcactctttctactctcttgtctcccactcccactgggagcccagacactggcttcagaagctctcctcctcctcctctattgaccatcctcttcatcctctcactctctactggctgcttcctacccacgaattgtgggaaatatgctaaaatatctccaatttttaaagtacaacaaaattccccctgatttcttgctatggtctgaatgtttgtgaccttcaaaatccatatgttaaatcttggccaggtgtggtggctcacacctgtaaccccagcgttttaggaggccatggtgcgagaactgcttgaggcccagagttcaagaccagcctgtgcagcatagtgagactctgtctctacagaaatggaaaacactagccgggcatagtggcatgtgcctgtaatcccagctatatgggaggctgaggcgggaagatcacttaaccccaggagtttgaggcagtgagctatgatggtgctactgcgctccagccagtgcaacagagtgagaccctgtatctaaaaaaaaaaaaaaaatgaatgcatgagtgaataaataaattaaaatttaaaaggtcaggcatggtctcagctcccagctacttgggaggctaaggcaggaggattgtttgaggccaggggttcaagacaagcctgggcaacatagcaagatactgtctctacaaaaaaaattttcttttttttaataaagcaaacctaacctctagggtgatggtgtttaatggtggggcctttgggaagtgattagtttgtaagggtaaagccctcttgaatgagattacatcccttataaaagaggcctgagagagcttgttggtcccttccaccatgtgaggacacagctagaaagtgccatctatgaagcagagagcagccctcaccagacactggatccactggcaccttgatcttggacttcccagcctccagaactgtgagcaataaatttctgttgtttacaaatgacccagtttaaggtattttgttataaaaccctgaactgcctaggacacatctcatcagcctccaaccatccacatctcttttcagctaaacatcttgaagatgttatctattctctctccatttactcactcccaaccttccacgctcactgttccactggcctgttcacacctggggcaccagtgatcccctcatcactggaccccacagacacttttcatccgattcttgtcctcttgggcacatcagcaacatttgatgctgctgaccacagctgccctagggagcttctgtgatataacactctcctggttttgcttcacgctctctggctgttgtttctcagtatcttttacagaaatttcttgttctgcctcagtcttatgttgtttccccccatggttctgtccttctcacactacactctctccctaggtgatcttgttcactatcataagtatatgcctcccaagtctttgcctgcatccactctctctcctgagctccagacatcagtcaacatcaccaccatctgtctcgtcacccaaaccagaatactgggcatcatcttggacctttccataatcagttgtcaaattctgactattctacctcttgaagattctccaaattttttttttccttactctgttgcctgggctggaatgcagtggcttgatcttggcttactgcaacctctgcctcccaggttcaagagattctcctgcctcagcctcccaagtagctgggattataggcatgtgccaccacccctggctaatttttatgtttttagtagagttggggtttcaccatgttggccaggctgatctcgaactcctgacctcaagtgatccacccgcctcagcctcccaaagtgggattacagacgtgaggcaccacgcccagccagattctctaagctttgatagttaagaggcatggctttggagatggattggactctacactaactcactatttatccagcagaatgaccaaagcaggcttagttacttaaccctctgagctccctcatccataaaacaagggtaatggaaattgctccttggattaaatgaaatgaagtatgtgactaccagggcacagccattagtacaagtaagctctcaataaagggcagccatcatctgctatcattgtcattaatactcctctctattcctctcctcaccaccaagcttcctggctggttgccctgcctctggtctctctctcctactcgaagacattccccgtgccacagtgggtatgagctttctcaaacatgtagctgactatcttagccctctgtctgagccctggttctggctttccaatgtcctcatgctgagggttgttcttggcttcaagactctcctccctctggcccctgccaacctctttagcctcatctttggagactcgcagtctctccttctatattgcagcccaaaccaacttctatctcccctctaacacacctcctgctttttctacacttcatgactttgtttaccccctcctttgtggcctgcactctattcatctgcttgaaatttatgacccatttaagagatgtcttccatgatgcaagtcgctttgtttcctcctctgggcccttcagctctatggtagcacagatcacagtggatatgatggacagggttttggctggctaccccactagactgtgtcaattccctgtgaccatgcacccagtgcaaagccagccttattcaatgtggaatgaaaaacgaacctcagttatcttaatctttaaaatggcagcattggcagccaggcctggtcaatccagaggagagaaagagcactggagcctggaggaagatgaagtcacagaaggctccctggaggaggtcgggcttagaattataaggcctctgtattagtctgttttcacactgctgatacagacatactcaagactgggcaatcttctgagccctccaaactgttccaacctgtgcctgttacccagttccaaagtcgcttccacagttttgggtatcttttcagcaatgccgcactctatcggtaccaatttactgtattagtcctttttcatgatgctgataaagacatacctgagactgggcaatttataaaaggaagaggtttattggacgtacagttccacttggctggggaagtcacacaatcatggcagaaggcaaggaagagcaagtctcgtcttacatggatggtggcaggcaaagagagaatgaggaagattcaaaagtggaaacccctgataaaataatcagatctcatgagacttgttcactaccaagagaacagtagaggggaaaccacctccatgattcagttatctcccactgggtccctcccacaaaacgtgggaattatgggagtacaattcaagatgagatttgggtggggacacagagccaaaccatatcagccgctaagaacgatcaagagtgagcaagagagtgaggatttgggagactgagtggctctctgttctgtcatgcttgttcctccagcttcaatacacttgaggggtcccaccaaccaatagcacagccttttacatttacacggaaaattttcactaactttttcatttgtgtcattggtgcagaggctggagtgagggttaggaaatctgagacttcctatcctgacttgtgtttggattgctgtgtgactttgggcaatccctttcacctctgagcctgtttcctcatctgccacatgtggataccaatggttgctccacacatgggaaagtccccatagaccataaagttctgtgtcccactaagcactattaatcttgttgttctaattatcagcaaagcccatggtagctgctaaccagccacctgggggtccccagaaaatattattcagggccccagtaaaagggaacctctgggggtcaaggccccagcaggccaggaaggggtagagcttgggagtttaatggaaataggctcagctccaacctggttcttcccactgaggcagcactgacttcgggagaggaaggagcagctggcatggcctgggttgggcagatgagctgggttgacctgcagaggtctcgggcatgaaggctgaaagtgaagtgcccaaagccagccatagccaaggaggggctaggctctgggagggcagcgtctggggaggtgggcagttagggaccctcatcccgctaggagaggggctctaagagaagggatctgggccaaactctttgtgctctgatttagagcattcctggcaggcaggctatgctgctggtttgccatctgtgtgactgtggctgggtcagaactcacactgggcctccccctgcctatcagcagcaatacaggagctggactaggagctctctatagagcctagtgttgtctgattctgcagcagcactggacagaaagctctgaggttgttaggacagtcatggtccagtctgcctgtggaaaactgggaaaccaggtgcccagaccccactgacatgttgattttgtagaagaggggtcagaacacatcccaggccccagggaacgcctagtctggtgagggaagcagatgtgaacatggatagctcccagtattgtctgggctgccagacaggcaagcttcagggaccctcccacagaggacacctgggagccctgaacagggagcaggcatctggtttctggtgtggctctgccaatagctctctgtgtagccttgaccaagatcagctcccctatcagctttaaaaaaatgtatttttaagttatttttattttttatagaaacaggttctcgctatgttggccaggctggtcttgaactcttgacctcaggtgatccatctgcctcagcctcccaaagtgttgggattacaggcatgagccaccgcacccagcccaggtctgctttatcttaatagggagtgaattcattttcaacttgggttccattcaggaaataactccttctatcaaaggcacatacaatgtctctgccctctgagagtgaccaacagaggagtttcacaggacatgggactttcagtgctgaaaccaggacagttctgggcaaatcaatatggttggtcactgtatgatatgacaaagagaaaggatacaaagacaggtcccagggcacccaggctagaaagaaacagacagagcaagcccctgtacaggcacacagaagaggaagctatttctggggtaagcagacagcattttgaagtgcttcttgaaggaagcagctgaagagaaagatatcacagaaaaggaattctcatgtgaatggaaatggagagactgaaacaaagggcactgattcagacataacattccgacccagatagagtgagatgagaatagagcggggcgtagaagaggaatggaatccagagcatgacagaagccattgttccggctatccccaaagaagttttcccagcagttccctagagctcatgagctaggagtctttatcagtggcccctgacaatcctccaggctgagaggaacacaccatcaagggaaccttagaatgaacgacatagttttcactctagagtttagctttactcactgccaaccagtgattctgctgtcttcacaaggtcccaagataaagaacgccattcaggaatcgtgcaggcatagctggactggatggacttatgtcaaatgactacagtcaagatcctggtgcttagagtgggcaaaacctggtaagtgtagtcatcaacattaccatacctagaagattacttcacctgtgctagtgggaactgggctaaaaaccagacatccttaaaggagctacttgaactaataaaagagctacttgattttttaattggcatttgaacacaagcagatgcctctcagatttttttctctccaataggttaaatttgcccaccaacaccgcaatcttattttttaatttttgtaagataagatcttgctctgctgcccagcttagagtgcagtggtgtgatcatggctcactgcagcctcaaactcctaggcttaccttcacatctggggtagttacgattacaggtgcatgtcacaatgcctgactaacttttttgactttttatagaaaaggggtctttctatgttgcctggctggtctcaaacttctggcctcaagcgatcctctggccttagcctctaaaagtgttgggattacaggtgtgagccactgtacctggctacaatcttgttcatgtgattcatttatgttattattattatttttagaagcaatgaatctagggttagaaggtcacttaaaggtttttaatctagctgctatccaagtactacatctctgtagcattccagaaaaagacctcagccttgcaacctctagttacatggacttcactaattatcaagcctgtttttgcattatggagttgttctttctttttctttttctttttttcttttgagacagggtctcactctgttgcccaggctggagtgcagtggtgcaatctcagctcactgcaacctccgcctccagagttcaagttattttcctgcctcagcctcctgaatagctgggactacaggtatgtgccaccacgcctggctaatttttgtatttttagtagagacaaggttttaccacgttgtccaggctagttttaaactcctgacctcagatatctgcccaccttggcctcccaaagtgctgagattacaggcatgagccaccgcgcccggccttcattatggggtcattctaatggtaagaaactgcttccatatgtgggattgatctctgggcccctgaagctgctaacagtggccccacttctttgtaagtgttgctccttctctttgacagttcttaggtgtttgtatccacctctcttccccccagaacaggaccagctctttctgccattgttgttagacatctcaccactctgggaatcttaactgtgcaatacaattcctggcacaaagaaagtgttgggactgagatccatggttggaaaggaaaaatatacatgttctagtgaatgtttccttgattgctctggtttccagatgttcccagtgtgtgtctacagacatccaactctgacccactgtggaggccacagcctgtaatggatcagaggactccttgcctgtcttctgcctggtcagcatcccctctctgccagagtccctcttcccccaactcccgtctttgtggttttctttcttctttccttttttcttttcttttcctttcttttcttttcttttctttctcccttcctttctcccttccttccttctttctcctttcctttcctttctctctttctttctctctctctttgtttctatctttctttcttttttcttttttgatggagcttcgctcttgttgcccaggctggagtgcaatggcgcaatctctgctcactgcaaactccacctcccaggttcaagcaatcctcccacctcagcctctggagtagctgggattacaggcacctaccgcctggctaatttttatatttttagtacagatgggattttacaatgttggccaggctggtattgaactcctggcctcaaaagatctgcctgccttggcgtcccaaagttctgggattacaggtgtgagccaccatgcctggccttgattttcttcttaatctatccgcttatcctggtgggtaatgaccagatcctggtggttgtgatggcagaggccagccttcacaagcctgtgtacttcttcctgataaacctctcagccctagacatcctctccactacagtcaccgtccccaagacgctgcccctgttcttgcttggggaccacttcctcagcttccctgcctgcttcctacagatgtacctgttccacagcttctcctgctcagaagccttcatcctggtggtcatggcctatgaccgctatgtagctatctgccacccactgcactaccctgttctcatgaacccacagaccaatgctgtcttggcaaccggtgcctggctcactgccctcctcctgcccattccagcagtggtacagacctcccagatggcatttgacagcattgctgacatctaccactgcttctgtgatcatctggctgtggtccaggcctcctgctctgataccacccccagaccttcatgggtttctgcatcgccatggtggtgtccttcctcccccttctcctggtgcttctctcctatgcccacatcttgacctcggtgcttcgcattaactcccaagaaggacgctccaaagccttctccacctgcagctcccatctcccggtagtgggcacctactactcatccattgccatagcctatgtggcctacagcgctgacctgccccttgacttccacatcatgggcaatgttgtacatgtcttcttcttcctcttcttcttcttcttcctcttcctcttcttcctcttcctcttcgtcttcctcttcttcttcttctccttctccttcctcttcctcttcttctccttctccttcttcttctttcttctttaatacatccttccctccctgtatatgccatgccattctcacacctgttctccactctcacctgcatgctgaggaacagggatgtcaaagcagccatcaccaagatcgcatgtccccaggagctagggtgttctgggggccctagatccctagatccaactaattcagctcccaggataccaatgacagcacctagctcagaa

SEQ ID NO: 1016 - protein, 400 aa, Homo sapiens
SEENLQPRTLRSDLDCQGSQAPDRSQPKPRGLGFSLLSHRPELLDSCAPATQGLRWETADALALGPHCPLVAARMVAVMSMPEAQHWGHILDSPTLSSMASSAWSFWDYRCEPPCLALIFFLIYPLILVGNDQILVVVMAEASLHKPVYFFLINLSALDILSTTVTVPKTLPLFLLGDHFLSFPACFLQMYLFHSFSCSEAFILVVMAYDRYVAICHPLHYPVLMNPQTNAVLATGAWLTALLLPIPAVVQTSQMAFDSIADIYHCFCDHLAVTFMGFCIAMVVSFLPLLLVLLSYAHILTSVLRINSQEGRSKAFSTCSSHLPVVGTYYSSIAIAYVAYSADLPLDFHIMGNVVHVFFFLFFFFFLFLFFLFLFVFLFFFFSFSFLFLFFSFSFFFFLL

SEQ ID NO: 1017 - DNA, 42863 bp, Homo sapiens
  source (1)..(42863)
  CDS (201)..(1321)
  CDS (14095)..(14140)
  CDS (16205)..(16383)
  CDS (42423)..(42663)
  modified_base (5847)..(5946): a, t, c, g, unknown or other
  modified_base (11036): a, t, c, g, unknown or other
  modified_base (11115): a, t, c, g, unknown or other
  modified_base (11162): a, t, c, g, unknown or other
  modified_base (11200): a, t, c, g, unknown or other
  modified_base (11241)..(11340): a, t, c, g, unknown or other
  modified_base (13970)..(14069): a, t, c, g, unknown or other
  modified_base (37976)..(38075): a, t, c, g, unknown or other
tcttgaccaacaggaaggtggtgggttgtcctttccacacccctccctctgaggtgtgggcgtgggccagggctcaccagaggccccagagaagcacttaattctacagcctccttcctagagccttcagtggcctctgccagtctggcagacacttgcagacctctcttctcagcaccaccaatctctgatgccctgcgatgcccacactcaatacttctgcctctccacccacattcttctgggccaatgcctccggaggcagtgtgctgagtgctgatgatgctccgatgcctgtcaaattcctagccctgaggctcatggttgccctggcctatgggcttgtgggggccattggcttgctgggaaatttggcggtgctgtgggtactgagtaactgtgcccggagagcccctggcccaccttcagacaccttcgtcttcaacctggctctggcggacctgggactggcactcactctccccttttgggcagccgagtcggcactggactttcactggcccttcggaggtgccctctgcaagatggttctgacggccactgtcctcaacgtctatgccagcatcttcctcatcacagcgctgagcgttgctcgctactgggtggtggccatggctgcggggccaggcacccacctctcactcttctgggcccgaatagccaccctggcagtgtgggcggcggctgccctggtgacggtgcccacagctgtcttcggggtggagggtgaggtgtgtggtgtgcgcctttgcctgctgcgtttccccagcaggtactggctgggggcctaccagctgcagagggtggtgctggctttcatggtgcccttgggcgtcatcaccaccagctacctgctgctgctggccttcctgcagcggcggcaacggcggcggcaggacagcagggtcgtggcccgctctgtccgcatcctggtggcttccttcttcctctgctggtttcccaaccatgtggtcactctctggggtgtcctggtgaagtttgacctggtgccctggaacagtactttctatactatccagacgtatgtcttccctgtcactacttgcttggcacacagcaatagctgcctcaaccctgtgctgtactgtctcctgaggcgggagccccggcaggctctggcaggcaccttcagggatctgcggttgaggctgtggccccagggcggaggctgggtgcaacaggtggccctaaagcaggtaggcaggcggtgggtcgcaagcaacccccgggagagccgcccttctaccctgctcaccaacctggacagagggacacccgggtgaagggcgcaagctgaacacactcctctttctgagatccaccaagtgtaggatccttgagtcctggggagaagctgccctctctgccaggctgcagtgccctcagggaaaagtctgatctttgatccccaactctgggtgtggtgaatgggggaggcgggggctcagatcagagctggatgtgacaaagcttaagtctttatttggagatgggaaagaagaggatctgagaataaacctctggattatccacaaattgtcttgaccttttatcccagttccacctccagttcagtatggaacaaaaggattcgttgctccatttctgctttctgcaagaatacctaggaaaacttccctaagggttctaggctaatgaatcagaggtcagtgcccatctctctctgtacccaccccccacctcaaaacagggtatcccttgtctttctccggtatcaaggccaaaaatgccagcttcccctgtcctcaccttaccatctcagtggtgaccactgaaacttgctgcctgcagaggcctcagctgcaaaagctgtagttcccttgaagggatgccaggtgtggggtattgctggaatttccagcacctgccaggccctgggtgtaaaaccctggtgctgacgggagtgcctgtgtgtctccctttaaatcaggatttgaaagaagtgaagataatgacaagtcaaagacatgggtggggtgaagggaggtgagcgattaaagaggggagggggctgggagaacaggctgcaggtagagccagaaaagcagagacctcagaaagtggtgctagtcctccctgccccaaatgcaaagcccagagtatcaatttgagtgtcagagcacctggattcacagctttacctccagcaaattactttacctctttgtacctcactgttctcaactgtaaaatgggctactaaagatttaacagtgaaatatactgttagctattattcttgtttgtttgtttgtttgtttgagacagagtctcgttctgtcgcccaggctggagtgcagtggtgtgatctcagctcactgcaacctccgcttcccgggttcaagcgattctcctgcctcagcctcccgagtagctgggactacaggctcccgctaccatgcctggccaattttttgtaatttttaatagagacagagtttcaccatattggccaggctggtctcaaactcctgacctctagtgatctgcccacctcggcctcccaaagtgctggagttacaggcgtgagccaccgcacccggtcgagctattattcttacaccctgtgtaaaatggagacagagagatgggaggaaataagcgtgcagctgggagatggggatggggaaccatgtctcagctggaatggttgtatatgctctgaagtggggtataatgaaagtctcacataaagaactcagaggttggcccctaagcccctcttgaaggtgtgttctccaggacaggggttcctctttggttcctgtattgagatgcatcaatgataaaggttagccatcagaaggattttctaggaggcagcccctagaaaggagggaggcagagggaagatgaggtagagctcccacttccactgcccccccaccgccccccgccccaagctctctggcatgacttgtaacctatgaggacgcaggctgctcaggctcctggggcagcagctgggagcagtgccgccttattaagtgcagagcgccctgtgaagggggaggccacagtgcctccaggtgccccctgtcccagttcctttaattgctgggcagaggaggctccaaagaggcacccaattcacaacagattaagcaatgtgaaaggaacttaattagcctcttgtttaatttcctctttttgatgatgtttaaactagttccaaaactccacgtctattcctagcccatgcaggcaatggaaaatccctcaccacctaagcacccatcttcccaccccagcagctccctctgatggctttgctgggctccggatattggctcctctgggggcatctctgctttatgggccccagaggtaaatattgacaaagtgtacacaggtccaagttagagatgaactgcatgcacaaagacctactcttgtgggggagtggaacgaggagggtgcagtggaggatggagaagggagggctgggcagagcaggcggcctggagctccccttggaacggagggaaggcaatgttttggtgagaacctgggccctggctccctggaacaccaagccaaatggctttgaaacttcagcaggagggacagaggttaagactgtgggttcccaaaagtgggttagggaggggacaggggacacaacggtgaaagatgtgaggaagaggcctagctctcaggagtagacacatcagacaaatgcttgtgccccatgttctggggctgaaggtgtgtgtgtgtgtgtgtgtgtgtgtgtgtgtgtgtgtgtgtggagggggttggtacggggtggcagaagggacagcactgcttcaaagaaagcagcgggggacttcacacccactctgggctgtgtctccaggtttccatgttctctgctgaccagcatctctcattggatctgtggggcattctgggagagcctgcattcccctttcttggtggtctctgcatgctgtctaatatcctcaccctacccccacctaccttccttccccacctaaaggtgccaccctcacagctctgggtcggagatacttccagctgacctggaagacagctgctgagccctgtgtccctgtgtgtgaaatgtgaagccctggtgtttttttttttttcttttctccaggcagggtcttgctctgtcacccaggctggagtgctggagtgcagtggcacaatctcggctcactgcaacctctgcctcccgggttcaagcaattctcccacctcagcctcccaggtagctgggaatacaggtgcccgccatcacgcccggctaatttttgtatttttagtagagatggggtttcaccatgttggccaggctggtctcgaactcctggcctcaagtgatccacccaactcagcttcccaaagtgctgggattataggcgtgagccactgcacccagccagccctggtatttttaggcagagtagccaagagagaaaagtggtggactggaactaagaaggccggccccctcctggcctggcaagcttcgtgcacctaggtttcccggcccataaaatgagaacaattccccattctcaggatccccgtaatggctgagaaagcaccttgtaaaggcttgatgctggtggatgagagttacagaaggggagggtgctggctgctcccccagcctgctccccatgtgacttcaattcctctttctagctgagggcctgagcccccttctcctgatctgaccccacaggctccaacagggatgtgaattcataccagcatttatacaaccctagactctcacctcctcccctcccccacagccccaaagtaagtaccaactgggaacaggaagtaaaaccaactaaaaccaagaactgaaaccagctcatctctcactgcctctcaaagagggacagtaaatgagcagctcctgtgacgggtaaccccagggcccgacatcatggagatcaacaagggcctagtgggggatggatctgacaatgaatgacactggggatgggggcaataggtggaggtgattgctgagcatggcatacaaatacgatgaacacacttttcctgataccggaattcccaacattggaacctgtgtgcccctttgtttttatccttgtatttgtgaattaaaaaaacaaaaaaaagatttgcagtggttacttttgttagtgccccctctcttcagtgaggcagaggctgtccttgcggtgagaggaaaaggcccctttcagaggaacttaggtcactgcccggctctctactaccatcctcctcagaattggcagacattatggaagacagtaccttatggagttccaggtttttaattttccctgaattttttttttaaacaacaaaattggcaagaagaaaattcttcgacatttgggggctggtcgacatttgggggcaagggttccactgaaaaatcccccaaattcacgctgaggtttcaggtcatggttgctgaggtggaagatgaggtcagggctcttggagattttccaacccaccctagaacttgtttctaaatggctggggaagaggtcagtataggtccccccgttactgcagatgaaggcagaagtcattctctcccccacccctcaacttcttcagagatgtggagataggaggcttcgatctctaattgcctacgatctcttaaaaatataaaacacgtgcagttgactttggtacaaaaaagaaaacaaaagaacaacaaaacattctggtccctgtgggttttttccctcacccccaacaaaccattatggccaccccaacctttattccatcaactccaggaannnnnnnnnnnnnnnnnnnnnnnnnnnnnnnnnnnnnnnnnnnnnnnnnnnnnnnnnnnnnnnnnnnnnnnnnnnnnnnnnnnnnnnnnnnnnnnnnnnntgtagggatgaaataaaccctagtctcccatagtgctcccaggcttattaggaagagaaaattcccgcctaataaattttggtcagaccggttgctctcaaaaccctgtctcctgataagatgttaccaataacaatggtgcccgaaacttcattagcaattttaatttcgccctggtcctctggtcctgtgatctcgccctgcctccatttgccttgtgatattctattaccttgtgaagtacgtgatctttgtgacccacaccctattcgtacactccgtccccttttgaaagtccctaataaaaccttaccggttttgcggcttgtggggcatcacggaacctaccgacatgtgatgtctcccccggatgcccagctttaaaatttctctcttttgtactctgtccctttatttatcaaactggccaacgcttagggaaaatagaaaagaacccacatgactatcggggcaggttccccaatagtgtggtggcaggcgcctgtaatccaagctgcttgggaggctgaggcaggaaaataacttgatcccaggaggcagaggttgcagtgagccaagatcgcgccactgcactccagcctgggcaacagagggagaccctgtctcaaaatacataagtaaataaataaataaataagttcagctccaaattggggaaatgtggggtccccagaaagaagtggttactattactaggggaacagggcccttttactgagagaggaacacatacaccctcatcaacacagaggcaccgacacagaaaggaagaaacagagtcttggagaaagagacagaggcagggtacccggagtcagggacagagcacacagacccaggggagcagacagaggtgcatagacgatagattcccattcgctcagatggagccagagcaatgcccgggcacagagagacccagcagctggcagaacagaggagacgtaggatagaatggtggctagacaggcgaggggcaggagaggaggagcaaggcaggggccttcatggggatctgtctgtccgtaccagccgggaggcgtagccaccctggtgctgcagtcccagaaaggtgtccagtccttctcggatctgcaggaagagggcctccttggggcctgggcatcccgatgcttgcagtctcctcctgaaacacacatcgccaccactaccgtctgtatccagtggccagtgacgggcaccagggaggaacactgcctcgcctcagcccagccctgttgcttgcccccagcccagcccttcctgttggcataagcacagcccagacccaaactggtcctactttggggctctgctttgccagggctgcagagttggctgtgggcaagagtggcccctgctggtcaaagggcagtactgcctccagaagaaagccagggttcaggggaaggcgaacagcaagagcaagctgaattctccctccttgcctggttgctgatgccaacctttgcccctgctcagccaaatagtgcactcaggactcccttccctctctaaccaaggggcagaattaatgcctgactgtgaaaggtgggtgacacttgaaagaccctgagatacagttggtgccacataaggggggcccaggcatttgggcatctctgctttcagccagctacccttaggaaggtgccatgagccctgcaggcattgcttctcatctgagttcccacccaagccagttcagggacaaggcccagggtcctctcccctcactgaaaccagccagccctgcccgggagctagggaaggttggttcactcaccagagctaaaggaacttgttcaaggggaccattgtcaaagcagagagacagtgcccttccatggccagcagcccctacaatgttcactcacactgaactcttcatgctgacccccggaccttctctttctgacttcctctgactttggggaagtggtcaggggttttccaagggagggggaagagatgatctctctgctccagtccaccaagcctatgcagaagtctgagcaagaacaactgatctcatgtggcaatgcgggaccatgagttaatccaagacatcctgggttgtcctcagcctgcaaccaaaagcccggcaaaggcctggcaatggggcaggccaaatgtcccaaccgtgagaccacctctctcaagaaatctctgaaagttctttgggcctcagtttccttatctgtaaaatgaggagattgtgccatatgctctctgagttcctttgtggttctattacaccattatgtggttctatgaaacccaccgtgggaggcagaagcaagaagatccagtgtcctgatactccccctgactccacacctccctcccactcccaccctcagtcttccctgagagaaggaggtaagagccactgtggagaggcatattttggaaggcagcatccatcctcccccaaaggcccacaaatgggattgagctctggttctccagggaaaggactgagggcccaggtctccttgattcttgttgttcttcggatggttgtctcttgagggagatgactagagagttatctagttccttcccactttcccattttctccaaggtctaggcctggaaggaaggaggtacaggaggtcccctgggggcttacgtattcagtgggccctcgagctccctgccaggcccccaactatgtcttctgaagacgtctttgttttcggccgtgggcccggaaagcccctgacctttggaggggtacagcatgcgagccattcccctcctttatttccccatctcttcttcctccagttgttctctggattcaactgcagaaaggcagaggccagtgtggcctcacgggcaccttgtctccacctgctcagaacacgtctgggacggctctgttcgtgggagacacacacagaccagtctgcgtcagcaggaaataagagtgagcagggttctagaactctgaaaccttgggactagaagtgtgtcacagtcagctggacttaggagtgcctagccaccactcactttactgagacacataactggataatgtgtcacattgtgacacattgtgacctcagggtcacattgtgacacattgtgacctcagggtcacattgtgaattagctgcagactcaaggctagaacttaggttttctggatcccagttcagtgtcctttctagtacataaagagatcctcattgtctccttcttattccatttactgaggacttatatagcagaaagccaagcaaagagaaatagatattgttcctatcctcaaggaatcagagtctagtgagtgggtgagtgtgtgtgtgtgtgtgtgaacaagcaaaagaacaaatcacagatgactccataactggctcacatatgccaaatgccacaagagaagtttcaacaaaaggctttaggctgttaaaggagtgagggcacgtgaccagttgggagactcaaaaaaggccaggtgcggtggctcagccagcactttgggaggctgaggtgggtggattgcttgagcccagctgttctagaccagcccgggcaacatagcgagacactgtctccacaaaaaaacaaaatgttagccgggtgtggtggcacgtgcttatagtcccagctacttgggaggctgaggtgggaggatcacttgagcccaggagttcaaggctgcagtgagctatgatcatgccactgcactccagcctgggtgacagagtaagacactgtttgcttttgttttgttttgttttgttttttgagacagagtttcgctcctgttgcccaagctggagtgcaatggtgcgatctcagctcactgcaacctctgcctcctgggttcaagcgattctcctgcctcagcctcccgagtagctgggattacaggcacaccccaccatgcctggataatttgtatttttagaagaaatggggtttcaccatgttagccaggctggtctcaaacacccaacctcaggtgatccgtccgcctcagcctcccaaagtgctgggattacaagcgtgagccaccgtgctcggccttgttttttttgtttcgttgtttttttgttttttttttgagacagagtctcgctctgtcgcccaggccatagtgcagtggcgcaatctcagctcactgcaagctccacctcccgggttcatgccattctgccattctcttgcctcagcctcccgagtagctaggcctacaggtgcctgccaccatgcccagctaattttttgtatttttagtagagagggggtttcaccgtgttagccaggatggtctcgatctcttgacctcatgatctgcccgccttggcctcccaaagtgctgggattacaggcgtgagccactgcgctgggcctgtttttgtttttaaaggggaggaggaaacagaaataagcagatggcctttgagatgtgcctggaagggtaaagtggttaggatttggccagggtagagggagaggattttaggcagataaagtagcagggggaggccgggtacggtggctcactcctgtaatcccaacactttgggaggctgaggtgggcggatcacgaggtcaggcgttcaagatcatcctggctaacacggtgaaaccccgtctctattaaaaatacaaaaaaattagctgggtgtggtggcgggtgcctgtagtcccagctactcgggagactgaggcaggagaatggcatgaacccaggaggcggagcttgcagtgagctgaggtcggactccagcctgggcgacagagcgagactttgtctcaaaaaaaaaagaaaaaaaattagcctggcgtggtagcgggcgcctataatcccaactacttgggaggcttaggcactagaaattctcgaaccttggaagcttatgtaccatagaaccccgagtgggcccttacacttcaacctccttgacaccagccattttgcctctctgttaatttttgtcacttgaggtctcccccctgtttctgggagaatagggtgattgagttttcacatgtgtttaatctttgattacttccttttcttccccttgcacgtaagttacactgncctttttcttgtgcgaactcccatcttttaacccaaaaataatttccctgtctatggctttccttttttcttttatccntgtccttcttccttgtgttgcctttttttctttatttttctttcttncttttcgatcttctctgtccttcttatttcatgtgccntcgtcccgtcttcttctttttctttatctccctccccctgnnnnnnnnnnnnnnnnnnnnnnnnnnnnnnnnnnnnnnnnnnnnnnnnnnnnnnnnnnnnnnnnnnnnnnnnnnnnnnnnnnnnnnnnnnnnnnnnnnnntcaaagtacaaaaattagctgggcgcagtggcatgggcctgtagtcccagcagattgtgccactgcactccagcctggtgacagagggagactctgtttcaaaagaaaaaaaaaaaagaactaactttactttttttttttttttttttttttgagatggagtcttgctctgtcacccatgctggagtgcagtggcatgatctcggctcactgcaagctccacctcccgggttcacgccattctcctgcctcagccttccgagtagctgggactacaggcgcccgccaccatgcccggctaatttcttttttgtatttttggtagagacggggtttcaccgtgttagccaggatggtctcgatctcctgaccttgtgatccgcctgcctcggcctcccaaagtgctgggattacaggcatgagccaccgcacccggccaaaactagattttcttgagctttaattttattttctttttttgagatggagtctcgctctgttgcccagcctacaatgcagtgttgtgatcttggctcactgcaacctccacctcctgggttcaagtgattctcctgcctcggcctcccgagtagctgggattacaggcacctgccaccatgcctggctaatttttgtattttagtagagacggggttttactatgtaggtcaagctggtctcgaactcctgatctcaaatgatctgcccacctcagcctcccaaagtgccaggattacaggtgtgagccagccaccgcgcctggcccttttttttttttttttttttttttttttttggagatggagtcttgctctgttgcccaggatggagacctggccaaaaagctagttcttaacgagaaagggctagaagtcaggcatgagagatagcttttcaagaacactcaggtgccaggcaccggtgttcaccactaggtgacagagcgagattccatctcaaaaaaaaaaaaaaaacccacaaaaaaaacaaatactgagtcaataaatcagatgagatctaaggggatgacaatagctgttcctctgcagaccatctttccccatcctacattctccagctgtgaagaggagctgcctggcaaggaaggtgtacggcaataggtggtgactgatgagaacaacaatcagaggaaaataagggatggaagcaaaagattcaaaagggcagatatctccatgggaacaggacccgcccacaacccctgcagcaaggccagaacccagctcgcttgcccaggggtctgggcaaagactgagttccaataatcacctgtgttcacccgggggctaagaaaacagacaagtcaatgtggcatttgtttttattagaaaaccccttagtaagcacttctctaacccagaatagacactgggtatcctccaagagtcccatagctttcatttcatcttccaccctcttctgagagggggaggcaggggataggggtggtgtcaggcagtctccaaaatgcccctcctagacccctgagagaattcacgttgccagcaataaaccaacagcacctcagtggggcatcagagggccctctaggctcaaggctattgccaaaggcattcctgtttatggcttcacgatggaaccaaggaggctctcgcagactcctagggctggtccttcactatggctgagagcagggcaggatccaggagaaagtggccaagggctaagagagaagagattgcatttaagataccctttggagtctggaaagcacctggatttcttgggagaggagcctggatttcttgggagaggagggctgtggaagccccaatcagttcttcttcgttttgggagtgtcatatttcctcttgctggagtaccacaatagcagggggatgccgatggagggaagggtcatgaccccaaaggctgcccagtccagctgtaaaggaaaacaaagaccttgcttagaagtctggattagggcacaggagaagccagggaaaatatgagtccaatgagaaagggagcagtctagcccaaatttatttatttttgatacaaagtcttagtttttttttttgagacgaagtctcgccctgtcacctagctgtatgcagtggcacattctcagctcactgcaacctccgcctccagggttcaaatgattttcctgcctcagcctccccagtagctgggattacaggcgcatgccaccacacctggctaatttttgtatctttagtagagactgggtttcaccatgttggtcaggctggtcttgaactcctgaccttatgatctgcccacctcggcctcccaaagtgctgggattacaggcatgagccaccgcgcccggccgatacaaggtcttgctctgttgcccaggctggagtggagtggcatggtcacggctcaccgcagccttgatctcctgggcttaagtaatcctcccacttcagcctcctgagtagctaggatcacaggggcgtaccaccacacctggctaattttttttttattttttgtagaggcaaaatatcactatgttgcccaagccggtctccaattcctgggctcaagtgattctcctgccttgacctcccaaagtgctggaattacaggtgtgagccacaacacccagnnnnnnnnnnnnnnnnnnnnnnnnnnnnnnnnnnnnnnnnnnnnnnnnnnnnnnnnnnnnnnnnnnnnnnnnnnnnnnnnnnnnnnnnnnnnnnnnnnnnatgggcggtgcgtacggtatcgcagggtcatagagtgtgggcgagaggtcggcaccaggaaggaacggaaggtggcacggaccggcaactggggggccgaaagggagaggaaattgtagcggacggcccccccgggagtaggggatacaggcacacccccccatgcctggataatttgtatttttagaagaaatggggtttcaccatgttagccaggctggtctcaaacaccaactcaggtgatccgtccgcctcagcctcccaaagtgctgggattacaagcgtgagccaccgtgctcggccttgttttttttgtttcgttgtttttttgttttttttttgagacagagtctcgctctgtcgcccaggccatagtgcagtggcgcaatctcagctcactgcaagctccacctcccgggttcatgccattctgccattctcttgcctcagcctcccgagtagctaggcctacaggtgcctgccaccatgcccagctaattttttgtatttttagtagagagggggtttcaccgtgttagccaggatggtctcgatctcttgacctcatgatctgcccgccttggcctcccaaagtgctgggattacaggcgtgagccactgcgctgggcctgtttttgtttttaaaggggaggaggaaacagaaataagcagatggcctttgagatgtgcctggaagggtaaagtggttaggatttggccagggtagagggagaggattttaggcagataaagtagcagggggaggccgggtacggtggctcactcctgtaatcccaacactttgggaggctgaggtgggcggatcacgaggtcaggcgttcaagatcatcctggctaacacggtgaaaccccgtctctattaaaaatacaaaaaaattagctgggtgtggtggcgggtgcctgtagtcccagctactggggagactgaggcaggagaatggcatgaacccaggaggcggagcttgcagtgagctgaggtcggactccagcctgggcgacagagcgagactttgtctcaaaaaaaaaagaaaaaaaattagccgggcgtggtagcgggcgcctataatcccaactacttgggaggctgaggcaggagaattacttgaacctgggaggcggaggtcacagtgagccaagattgtgccattgcactccagcctgcatgacaacagcaagattccatctcaaaaaaaaaaaaaaaaaaaaggtagaaaaaagtagcagggagaaaaggttcatgagtgataaagtgttgtgatttctctttctccctctccctctcctcccccttcctcttcttctccttcttctgatggagcttcactcttgttgcccaggctggagtgctatggcgtgatctcacctcaccgcaatctctgcctcctgggttcaagtgattctcctgcctcagcctcctgagtagctgggattacaggcatgcgcctccaggcccagctaattttgtatttttttttagtagagatggggtttctccatgttgatcaggctggtatcaaactcctgacctcaggtgatctgcccacctctgcctcccaaagtgctgggattacaggtgtgagccaccatgcccggcatgatttcttcttctaagagtctggtcatatgcagagtgaaagccagtctgacctctctccatggtgcaaagagaagggctccaagcatcagccacagagcacacatttcctccactctctcccaaatgggcgttgttctcagtgcccaacactcccggttggcatcatggcttgcctcagtgtgtctcagaattaagaaccctcaggtgctcttaaagttgaaaatgataagccccactccagaaagaagtgccaagtcccagagtaccaggggcaggaagggcaggaagggaaatagcatttactgcatacctctgtacacttcactcttaggccatgtctctctcgaccttctgctctaatgagtctcccaggctccctttctcctgggaccacttctagctacttagacatcaggagtgcccagaaggatcaggaagccgggacccaaaaccttccctctttcaaggctttctgtggggctgtcagaccttctccaggttgtcttaaccaccccagggaagtccaggttatcagttattgtcccttcaatctactttcctccgtcactgcaatctgttcactgccctcaccccacccagagcagctgagaagaaagtgctgcgccacaggctgggcgcagtcgctcacgcccgtaatcccagcactttgggaggccaaggcgggcagatcacgaggtcaggagtccgagaccagcctggccaatatggtgaaaccctgtctctactaaaaatgcaaaaattagctaggcatggtggcacgtgcctgtagtccccgctacttgggaggctgaggcaggagaatcgcttgaacccaggaggcagaggttgcagtgagccgagatcgcgccattacactccagcctgggcaatagagcaagactccgtctcaaaaaaaaaaagaaagaaagtgctgtgcctggggtggctgtgtgcctgtttaccacagggaagggagggaggcaggtgctcaggcctctacagacggcaatgctattcccccattgggtgggtgtctaaggagagaaaaggagaagcctaggagagtggccatggccctgtgcccatctgtgctcatcgcgtctgggagcaatggacagggaaccccttagccagccaccaggagagatcctctccctccctgcctacaaatgggccctgtgccatcaggtatgttgggtacaaacaggatgagcagatctacaggaagcaggtcagagcctaagggccatggcagggtccctcccaaccagtggcctccaaagctgagatttggaggcagagggaggttgacaaaaatactgtgaaaagctggggtggagagaagagtaggaactggaaatatactaggaaaaggggaacgggggctggaaataggacagaaactgagaggccgtgacggggaggcagggacactgcgtagatactgtgagctctggaattcagggacctcccagaagaagaaagttggtttgaactttacaccctgtattcaacctctacctcctagccttgtctcagctgtgcccacccggttgaattcttcttcttcttttttttttttttggagagaggatctctctccctctgtcaccctcaagcctcactgcagcctccgcctcccaggctcaagcaatcctcccacattagcctcctgagtagctaggactacaggtgcatgccaccacatccagctaacttttaaatttttgttttgttttgttttgttttagatggagttttgcttttgttgccaggctggagtgcagtagcgcaatctcagctcactgcaacctcctcctcctgggttcaagagattctcctgcctcagcctcccgagtagctgggattacaggcatgcaccaccacacccagctaatttttgtatttttagtagagatggggtttcaccatgttggccaggctggtctcaaactcctgacttcaggtgatccgcccacctcggcctcccaaagtgctgggattacaggtgtgagccactgcacctggtcttaaattttttatagcgatggggtctcactatgttgcctagcctggtctcaaactcctgggcccaggcgatcctcctgcctcagcttcccgaagtgctgggattacagatgtgagccactgcgcccagcctgcagggttgaatttggcaagatgaaggaagtgcagtgaactggagacctttgcttttcttctgtctgtgtggatgttcctgctagagatggtgtcctgtcaccctggccccattgacaggtacctcagatcttaagatctttgtgaaactcaccctggccccactgacaggtacctcagatcttaagatctttgtgtaactgttcacccttcttcctccagctcagaccaactggagtctgacctcttctcaaagatctaccctttttccagcatctctgtcatttcattcatggtctctgccctctgtgaaaatggaatctgtctggcagtttctccctcacatcctcatccccacccactaaccctgcctatgctatgatgccaatactttttattctgtccctcaaagagatgaggtttaacaaggcttcctcaactccctcctagcaatattccctcctccactgtctgaaattcaaactgggggtcccatcatcgtgttgcttctttttccattagattaactctcctagcccccctcccattttcccttagcctcttgagctcaggaaatggtgcaggggagaggccagggctgggtctcacacaatggctttatttagccctcaaatgagatcacatcatgtcatatcactgcttccactgagcaaagagataggagattctgaaataggtctgggatcagatgcttgagatgggggaggggagctgggaaagcaggaaggggctctaagaagtcattttacttatcttcctgcctctggatcagatggtcttcccaccactgcaaaccatcagcgtgtgctgtcccttcctccaagtgtataacctccacagattgcactggtcatcaaagatttcttagacattctactgggagctggaatgggaatatataatattttaatagagagagacatctgttattcaaaactctgagaccataatttctttagggtgttacagcttttaagtctgtcaaatttgctagctctgccactttctttttttctttctctttctttattttattttttttttttgagatggagtctcgctctgtcgcccaggctggaatgcagtggcacaatcctggctcactgtaacgtccacctcctgggttcaagcgattcttctgcctcagcctcccaagtagctgggattacaagtgcctgccaccatgcccggctaatttttgtatttttactagagacaggtttagacatgttggcagggctagtctcgaactcctgagctcaggtgatctgcccgcctcagcctcccaaagtgctgggattacaggcatgagccaacgcacccggcctagctatgccactttcataagccacataaccttgggaacttaacttttttttttgtttttgacacagggtctggctctgttgctaaggctggagtgcagctttgatcagagctcactgcagcctcaaactcctgggtcaggagatcctcctgctttagcatccagtagctgggactacaggtatgcaccaccatgctctaagtaaaaaaaaaatttttgggcccagtgcagtggctcacgcctgtaatcccaacactttgggaggctgaggcaggtggatcacaaggtcaggagtttgagaccagcctggccaatatggtgaaaccccatctctactaaaaatacaaaaattagccaggtgtggtggcgcacacctgtaatctcagctactagggaggctgagacaggagaatcacttgaacccgggaggcggaggttgcggtgagccgagattgtgccgttgcacattccagcctgggcaacaagagtgaaactctggctaaaaaaaaaagaaaaaaaaaaaagctggctggtctgggctcaggggctcatatctgtaatcccaacacttagggagactaaggcaggaggatcacttgaggccaggcattcaagaccagcctgggcaacacagtgagactccatctctaaaaaaaaaaatttttttttagagatggatctcactctgttgcccaggctggagtgcaatggcgtgatctcggctcactgcaacctccacctcctgggttcaagctattctcctgcctcagcctcccgagtagctgggattacaggtgtgcaccaccatgcccagcctgggcacccagcctgcccagccagcttttttgagcttcagattcacgtaaaatgggaatgagaagccgggtgaggtggctcatgcctgtaatcccagctctttgagaggccgaggcgggtggatcatctgaggtcaggagttcgagaccagcctgaccaacatggtgaaaccccatctctactaaaaatacaaaattagccagcgtggtggcacatgcctgtaatcccagctactcgggaggctgaggcaggagaatcacttgaacctgggaggcagaggttgtgtgagccgagattgtgccattgcattccagcctcggcaataagagcaaaactctgtctcaaaaaaaaaaaaggaatgataagacctactttgttttgggggttttgtttgtttgtttgtttgtttgttttgagatggagtctcgctctgtcacccaggctggagtgcagtggtgcgatctcggtttactgcaacctctgcctcccgggttcaagcgattctcctgcctcagcctcctgagtagctgggactacaggcacccaccaccatgccgggctaatttttgtattttctgtagagacgggtttctccatgttggtcaggctggtctcgaactcctgacctcaggtgatccacctgcctcggcctcctaaagtgctgggattacaggcatgagccaccatgcccggcctgtttgttttgttttttgagataggctctctctctgtcacccacgctgagtgcagtggcacgatgatggctaactgcagccttgatttctcaggctcaggtgacccttccacctcagcctcccaagtagctgcgactataagtgcgcaccaccatgcctggctgattttttttttggtattttttagtagagacagggtttcaccatgttgcccagtctggtctcaaactcctgggctcaactgatttgcctgcctcggcctcccaaagtgccaggattacaggcgtaagccactgggcctgtacttattttgtaaggatgttgagagacttgatgataatgtatgcaatgcacctagtcccccttccatctgtttttggtacatattaggtgctcaataaatactattattattgttgttattattatttagaggcatagagacggcagggtatattgaaacagagagctagaaagaataatgcttggcctggtgtggtggctcacgcctgtaatcccagcactttgggaggcgaggcgggaagatcatgaggtcaagaaatcaagaccatcctggccaacatggtgaaaccacatgtgtactaaaaatacaaaaattggcctggcatggtggctcacacctgtaatcccagcattttgggaggccaaggcgggtggatcatctgaggtcaggagttcgagaccagcctgaccaacatggagaaaccctgtctctactaaaaatacaaaaaaaaattagccaggtgtggtggtgcatgcctgtaatcccagctactcaggaggctaaggcaggagaatcgcttgaacctgggaggcgggggttgcagtgagccgagattgcaccactgcactccagcctgggcaacagagtgagactctgtctcaaaaaacaaacaaaaaaaattagctgggcatggtggtgtgcacctgtagtcccagctgctagggaggctgaggtgggaaaatcacttgaacccaggaggtggaggttgcagtgagctgagatcacaccactgcactccagcctggcgacagagcgagactccatctcaaaaaaaaaaaaaaaaaaaaaagaaagaaagaaaaagaaagaaggaggcaggaggcccaagatagaagcagaaataggcatcatatgatggtcacctactgttttctcttagagaaagacaataaataacccatgggctgacactaacataactatgatggcaacagttacacaccacttctgatggaaaagtgtatgcaaccagagcaagaagagcaagaagaaatgagtgcttttctgtcctttgagaccctgatgagccctgacaaagttgtcctcttcaaggagaagaaagggatagaatggcctctggaaatttaaagcaagggttagcaaactatagcctctgggacaaatctgtcctgctatctttttttaatagttgaaaaaaaataaaagaatactttgagacacaatattatatgaaattcaaatttcagtgcttgtaaataaagtatttttggaacgcagccatgctcagtcatttacatattgtctatggctgtttttgcattatgacagcaaagttggtagttgcaacagagagcccacaaagcctgatatatagatatatcctgagtctgggatcctaatatatatgtgtgtgtgtgtctgtgtgtgtgtgtgtgtatgtgtgtgtgtatgtgtgtgtatatatatatgtgtgtgtgtgtatatatatatatgtgtgtgtgtatatatatgtgtgtatgtatatatatatatttttttttttttgagatggagttttgttcttgtcacccaggctagagtgcaatgatgcaatcttggctcactgcaacctccacctcccgggttcaagcgattctcctgcctcagcttcccgagtagctgggattacaggtgcctgccaccacttctggctaatttttatattttttagtagagatggggtttcaccatgttggccaggctggtctcgaactcctggcttcaggtgatccatctgcctcggcctcccaaagtgctgggattacaggcatgagccaccgtgcccggccatatgtttggttttttttttttttagacagggtctcactcggtcgcccaggctggagtacagtagcacgacctctgctcactgcagccttgacctcccaagctcaagcaatcctcccacctcagactcccaaggagctaggactacaggcacacaacaccacactgggataatatttgtaatttttgtagaaacaaggtctcgctttgttgcccaggctggtcttgaactcctgacctcaggtgatccaccccacttcagcctcccaaagtgctgggattacaggccaccacaccaggccaagtggctagctttgaaagaaatccggcaacattatttttacccacctcattcctacctccccgaccccagccaaagaaaagcagcagcttccaaaagaaatgagataggggtcccaaagaagttcaatgtatcctttctgctccctctgttagcttagacctctgaatgaggtgatggggcgcaggcaggtctctggttatgtttgctgccagcaaacactgaacataggggaggaactgctgacagtaaccaaacagccaggcgttgtggcctggaggcaatgctggccggccctttcgcagactgagaagctttctgagtctggctctgggatcctaaatctaccgaggtggccaatattggagaagacccaagagaacaggataataaagactgaggtggaagggagaggccaaatgacatgttgtactggctctcctccaaatctcctggccctgggggtgggacacagggtcacaaaaactcttcgatggttcaaaatttaacctaacatttcttctcctgtagaaagtgaaccattaatccagcagtgccctgcaaagacggctaaagcagagcttctcttcgcctcagataaagaagccaggagctacaattccttcccacctgctccctagataccccgttccaagacaggagcacccaagtctctgacaccctcctgcttcacccatccgcctgacttggctgaacgctggtgtcctggaactcattctctttctctgatcttcctgtccactgccagagagtggtgccacaattccaaaaatgaaaggaaagtaaaagatatagaggatccattcattcagcaaagattattttagcactttgtaagtgtcaggcacagaaaagaggacccacaagggtctatgcacaaatacaatggtgggacctggctaccatcccttagtggggcagaggccagtatgggcaaaagccatgtgtcctatcagcttccgggttgtctcctgagaggcattatcatctgtacttagttcctgaatttcaaggcatccccagccccctaatctaaccacacacccctctactaagtcagccacaggcatctcagacactctccctaaatcatccccatgtccttgatgtactaggttcgtaagtcagtcaggaattttgctgctctgggcttccaagtgtgaccaccttttttttttttttaattggttagtaaagtgaacttagggaccctgccctcttcctttctgctggacctgtagctatatgcttattctatcaggggcttgggacccagactagccctttatttatggcggatagagaagaaaagggtcaagaccaaccagtcttcttctacctcctgccagtttcctgggcatgtgttctgggtgctatgccagatgggtgtggcaagagagggtctgagggtaaggacccaggaaagggaagagggaaactcaccagaactgggagatatcccaaagatgggggacctgtttctgctgtcagttggtgacttcagtgtgggaaaaagtcctgcttcaggtggcccctttaagaacccagtccagcactttggtgggggtcccctctctcttggtccttttaagggagctgttcatggtccagaagtttgcataagagaaaggggggactcattccagtccagatcagctgcctcttcatccactgtagcccttcctttccccgccctacttcaaacaccctaaacagtgctgtgcccaggaccttaactctttcagtgccattactgatcccagggactcctgggtccctctgtcttcagcattccttgaacacagggtggctacaaaattcagacttgtgtagaaacaggtacaagaagccatgctggggtcaccctgaggagagagtatgtgggaacctgacaccccagggaacgtttacccttcctccaacagggtcagggagaaactgaggaggggagaaagcggacatctctgggaaagaaacagctgcagctggaaacctacttcacagcagggtcctcaggtcagtggtgtcctttgccctctcaaattcagctacaaaactgattgtcagccgggcatggtggctcatgcctataatcccagcactttgggaggccgaggcgggcggatcacttgaggtcaggagttagagaccagcctggccaacgtggtgaaaccccgtctctactaaaaatacaaaaattagccaggcgtggtggtgcgcacctgtaatcctagctactggggaggctgaggcaggagaatcacttgaacccggcatgcagaggttacagccagccaaaatcacaccactgcaatccagcctgggcaacagagcaagactccatctcaaaaaaaccaaaaaaacaaacaaaaaaacctgattgtcggtccctttaagaggcaggttacagcaatggaggaggaaagattgtatttttttgtgatgaaagtacagggtggagcagttacaagggcagctgcactgagaagggccctagcgtcagcaccaggaacaggggtgaccaagcaactcagcatatccggggctcacggcttgttgtggataccaggcggcaggatatttgaccagctccccaactctcttcccagataacagcttctggggtggggcgggggctgactcaccttcactgctttccctggggcagaagacagctggggcggacatcggacttcctgaggtaaaggggagcactcctcgcctcctgtgggctagtagaaagggcatattagagctggaagatcttggctgcctctgccaagtcactagttgcaggaccttgtgccacctatttagcctcatcccctcatctgtaaaatgcagatgttaaatgaaacatgtgcaaacagtggaacataaatgctgggtccataataaataaatatgctagctgccactggctgggcaaccttggacaagccgcttcaccccttatctttcctgatctattaaatgagaggatcaaattaggtaatctatggtctatccttgctcaaaaattctctctgtcagtgagtggaagacagcagctgctgctggatgtagaactgtgtgtgcccttccccacctggctggacctcacccacaagatgagaaagtgacagtggttgttcctcatgttcctcactgcataacaacaaaggggtaataccagccctatcgtactggtgaggggtcctcaaaaatcctccaattaaacaatttcatgattgtgcagaggaggaaacaggctccaagagggagagctattttatatataatatatatataatatataaatatgtatatttatatatataaaatatatattatataaaaatatatttttatatttatatttttatataatatatattatatataaataaataatatatattatatatatattatatataaataaataatatatattatatatattatatataaatatatataatctgcccaaggtgggcagatatatattatatatatataatttttcttttccgttgagatagggtctcactctgtcacccaggctggagtgctgtggcatgatcatggctcactgaagacttgaactcctgggctcaagcagtcctcctgcctcagcctcccgagtagctgagattataggcgtccgccacacctggctactttttgtatttatagtagagacgagattttgccattttggccaggctggtcttgaactcctgacctcaggtgatccgcccacctcagcctcccaaagtgctgagattacaggcgtgtgccaccacacccggcctgtagaaattcttatacccgtttcccactcactttcttcgagtgccaaagccgagtacaggaagggggtggaaatcaaggcacctggctcctcctggtaccagggtggggtgtgtgggtgagccgatgccagctgaaagtctgcacaatgagggagggctggagggctagtctccaggagtggggacacctggaacatgctggtggctgacctactgtctgtattgccttttagggaggagcctcagtttgggtacccagcctccaggaaggatgtgggatcagtgcttactttcctcctccctcacagatctgcacacaatcctgagatcaaggttcacacctccctagggtggttttcagttagagcggaggagtgttgtctgccactcagcctcctattaaattacctcaagaagttaagagggctcaatcctaaagccaactattccagctaagactttctgtctatagattttagaggctcttatattctccaacaccactacttaagggaggttcacattccattctgactccaagaaagctgatctcttaggagatgaggtatctagctttggccttgtttcaaggtgcctgtgacaccaactgtcttcacaatgcttctcttgtcatctgtgtcaggcctgggtttccctcctagttgccttcttcatgacaagggccaggacacaaagtgctgagttttgtaagggaaaggtacaataaagacgcccccagcttttgggaaaggagcacctctcagagttcagattaaggaaggaatcttatacagatggtcccgacttatgatggtttgacttaagattttcgacttcacaagagtgtgagagccatacacattcagtagaaatcctcttccgagtaccataaaaccattctgtttttcactttcagtacagtagtcaataaattacatgagatattcaacactttattataaaataggctttctgggccaggcacagtggctcatgcctgtaatcccagcactttgggaggctgaggtgggtggatcacttgagctcaggagtttgagaccagcctggccaacatggtgaaccctcatctctactaagaatataaaaattaggccaggtacggtggctcatgcctgtaatcccagcactttgggagaccgaggcgggcagatcatgagatcaggagtttgagaccagcctggccaacatggtgaaaccctgtcactactaaaaaatacaaaaattagccgggcgtggtggcgcatgcctgtagtcccagctactcgggaggctgaagcagaattgtttgaacctgggaagcggaggttgcagtgagttgagattgggccactgcactccagcctgggggaaagagtgagattctgtctcagaaaaaaaaaataataataaaatacaaaaattagccaggcatggtggcgggcacctgtaatcccagctactagggaggctgaggcatgagaattgcttgaacccgggaagtgaaggttgcagtgagctgagattgcaccactgcactccagcctgggtgacagagtgagactccatctcaaaaaataaataaaaataataaaataggctttgtgttaggtgattttgcccaactgtaggctaatgtaagtgttctgagcatgtttaaggtaggctgggcaaagttatgatgtttgatatgttaagtgtattaaatgcattttcaacttaaaacattttcaatttacaacagggttacatcctgatacgcatatcatataaacctatcggacataaccctattggaagtcaagaagcacctgtattatgttccagagttatgaagtttaccctattctctagcccagaaccccgccaccaccccccactccccccgcccataggttaactcattacattttccttggagactacacagatggaaaataccatttcctccttcagaggctaacactccatagtcctggagtgcaaaatgatgcatatcagactagttccctttcccttccccacacctgttctcaaacccaagcctctgactcattggcctatcctccccattctcctgagcaagtcccaggtttccaccaggaacacaatgaacaaaagcaaatatatcctccttgcctgtaacctggccagtcttgggatgtccaagctgcagcccctgaaagagggatgtgagctggcagagggctactccatttggagcctctcgtctccatgttcttttcatcctcctgggcctggaggctctgattgctgggctaaagaaaggttaaaccagttgggcaggggagccgggggagcagaatctaaactgggaaactcggtagcagaaacaaagccggtgtttgttgggcttccctcttgcctgggaggctgttctcagaccacggcattcctgagttggacagagtcagctcagagtggcttctccccactgctgcagcagcaaaagtcactgcctttccacaggtcacgcttagagcccaactcaagggatccaggtacttcttccctgccagagctcaaagaacagaagcattacaagtaaattcaggccaggtgtggtggctcacacctgtaatcccagcactttaggaggctgaggcagacagatcacttgaggtcaggagttcgagaccagcctgaccaacatggtgaaaccctgtctctactaaaaacacaaaaatcagccgggtgtggtggtgtgcacctctaatcccagctacttgagaagctgaggcaggagaactgcttgaactcgggaggcagaggttgcagtgagctgggattacaccactgcactccatcctgggcaacagagcaagactccatctcaaaaaaaaaaaaaaaaaaaaaaaaaaaaaaagggccaggcgcggtggctggctcacacctgtaatcctggcactttgggaggctgaggtgggcagatcatttgagatcaggagttcgagaccagcttgacctacatagtaaaaccccgtctctactaaaatacaaaaattagccaggcatggtggcaggtgcctgtaatcccagctactcgggaggccgaggcaggagaatcacttgaacccaggaggtggaggttgcagtgagccaagatcacaacactgcattgtaggctgggcaacagagcgagactccatctcaaaaaaagaaaataaaattaaagctcaagaaaatctagttttggccgggtgcggtggctcatgcctgtaatcccagcactttgggaggccgaggcaggcggatcacaaggtcaggagatcgagaccatcctggctaacacggtgaaaccccgtctctaccaaaaatacaaaaaagaaattagccgggcatggtggcgggcgcctgtagtcccagctactcggaaggctgaggcaggagaatggcgtgaacccgggaggtggagcttgcagtgagccgagatcatgccactgcactccagcatgggtgacagagcaagactccatctcaaaaaaaaaaaaaaaaaaaaaaagtaaagttagttcttttttttttttctttagaaacagagtctccctctgtcaccaggctggagtgcagtggcacaatctgctgggactacaggcccatgccactgcgcccagctaattttttgtacttttagtaaagacagggtttcaccacgttggccaggatggtctcgatctcctgaccttgtgatccgcccacctcggcctcccaaagtgctgggattacaggcatgagccaccgcacctggccaaaaagctagttcttaacgagaaagggctagaagtcaggcatgagagatagcttttcaagaacactcaggtgccaggcaccggtgttcaccactaggtgacagagcgagattccatctcaaaaaaaaaaaaaaaacccacaaaaaaaacaaatactgagtcaataaatcagatgagatctaaggggatgacaatagctgttcctctgcagaccatctttccccatcctacattctccagctgtgaagaggagctgcctggcaaggaaggtgtacggcaataggtggtgactgatgagaacaacaatcagaggaaaataagggatggaagcaaaagattcaaaagggcagatatctccatgggaacaggacccgcccacaacccctgcagcaaggccagaacccagctcgcttgcccaggggtctgggcaaagactgagttccaataatcacctgtgttcacccgggggctaagaaaacagacaagtcaatgtggcatttgtttttattagaaaaccccttagtaagcacttctctaacccagaatagacactgggtatcctccaagagtcccatagctttcatttcatcttccaccctcttctgagagggggaggcaggggataggggtggtgtcaggcagtctccaaaatgcccctcctagacccctgagagaattcacgttgccagcaataaaccaacagcacctcagtggggcatcagagggccctctaggctcaaggctattgccaaaggcattcctgtttatggcttcacgatggaaccaaggaggctctcgcagactcctagggctggtccttcactatggctgagagcagggcaggatccaggagaaagtggccaagggctaagagagaagagattgcatttaagataccctttggagtctggaaagcacctggatttcttgggagaggagcctggatttcttgggagaggagggctgtggaagccccaatcagttcttcttcgttttgggagtgtcatatttcctcttgctggagtaccacaatagcagggggatgccgatggagggaagggtcatgaccccaaaggctgcccagtccagctgtaaaggaaaacaaagaccttgcttagaagtctggattagggcacaggagaagccagggaaaatatgagtccaatgagaaagggagcagtctagcccaaatttatttatttttgatacaaagtcttagtttttttttttgagacggagtctcgccctgtcacctaggctggtatgcagtggcacattctcagctcactgcaacctccgcctccagggttcaaatgattttcctgcctcagcctccccagtagctgggattacaggcgcatgccaccacacctggctaatttttgtatctttagtagagactgggtttcaccatgttggtcaggctggtcttgaactcctgaccttatgatctgcccacctcggcctcccaaagtgctgggattacaggcatgagccaccgcgcccggccgatacaaggtcttgctctgttgcccaggctggagtggagtggcatggtcacggctcaccgcagccttgatctcctgggcttaagtaatcctcccacttcagcctcctgagtagctaggatcacaggggcgtaccaccacacctggctaattttttttttattttttgtagaggcaaaatatcactatgttgcccaagccggtctccaattcctgggctcaagtgattctcctgccttgacctcccaaagtgctggaattacaggtgtgagccacaacacccagcctaaattttcttaatttttattttatttttttagagatagagtctcactctgttgctcaggttggagtgcagtggcacaatcatagccactgcagcctcaaactcctgggctcaagcgatcctccagcagagattataggtacacaccaccaggcctaactcagcacaaattttaagcagaactttaggcaagaaggttcctctctgaccaatcctgatatagaatggctctctaaagaccaatctttcaagctgtgaaaccaaaggactcacccgacccaaaccagactggaagagaagcttctgttccagacaatttttgagaatggagatgccctggtcttgcccctgacagtcaagccacctatgatctaacccttgtttacacttcaggccccctcttttccattcctccacctcacattctgcccttcagccttgataaactacttgccattcctgaatcacaccatgcttttctcaatctcggctgctctctctcctcaagtgcctgcccttccttacctcctccagaaagtcccctctcattagatgttcctgctgcaggctcctccagcacctggcatataacctctatcacagcattttccccatttaccttttttttttttgacagcgtttcgctcttgttgtccaggcagctagagtgcagtggctcgatcttggctcactgcaacctccgcatcccgggctcaagcaattcccctgcctcagcctccccatttactattttgagtcctctatgagctcgtaagatcttgttattttcagaggcagggttttgctgtgtcacccaggctagagtgcagtggtgtgatcatggctcactgcagcctcaaactcttggccgcaagtggtcctctcgcctctgcctcccaaagcactggcattacaggcatgagccatggtgcctcgccagcctgtaagatctttaatggaagggactgtgtcttattcatcactgtgtccccaaagcagagcacagaatgagcacataatctggaacatcatacttattcactgaatgaattccagcattcagtacttcaggctcatcttcaaaaaattctttcctagactagaccacagtaaagttcccacttaacctacccaatgatctatgaccctctgaatctaatcagattttttttttttaaacctcaaaatagacccaggagtttaagatgggtatctactcaaagatgggactctacttaagtcagttttatggttttggcaattgtgatctcattgccaaaaatctctggacatggctaaatcaatctatttgatgagtatctatatcagacaccaaaaaacacacagggcaagaaccaaccaacaaaacaaatctgtggaagccaagagggtccagaaccaaaagggcattctcataccaaggaactgatgagagagaacactagaaagcttacaaaatgaggggagaatcgcctgtcaaactcccgctgagccaggattcctccctgtccaggtgcactggtagagccaatctgaaaagaagaaaagaacgacattaagggaagtccacctcatgaagttccacctcatctactctgagaaagggcagtcccaaccaacccaactctatgcattagagtcttagttcccaaaggctcagaagaacttcaagaagatgagggaaagcttttggctagagagagttggatgattctctcttagtgtgttataaagaggagtacctaggagccagaagacctgagaaataccccatggagaacatatattaaacaaggtaggccaggcatgcaactgaaattaaagccaaattcttctgtctgagcctcagactctgcaaagagtgaagttgctcaccaccactggtccctctacagggcaaggtgtgcgtggaatgacttacccttggtaatcatttacttaatcctccagcaaaaatccactacttcacagggttaatgtgaggctcaaatgaaatagcaaaaatatataatgaagtataaagccctacccaaatgtacattattagaggaggggttgagtctggtccacattcctttgtcttggagaggaagccaagagtttggagcacactgcaaacaactttattccaaagtggcagcaaagcctttgattttatgtctattaacccatcaactaccaggtagaaccaaagagtcctgaggttggttctgaaagcagaaatgataccggatgtgaaaacaccgctaggtttagaagaatatggttccatgtagtttatgaaaaacgaaaatgcagaaggtgcaatgaatgttagttcttttcattctatggttgactgtgttaagtcccttccctactgtgtactaattagcctacagccctactggtatggaggatcacacattttggcttcataaatttatacatttatttggctttatacatttatgacttaagctttttgaggacttggacagtatattaatcctcttggtattccccagagtctggcacattgcaggggcttcataaatgtctattgacctttacatcaatcaaaagactgtttactactgagtttctatcatatatgggaaaaagaaatctaagacagttactggcctcagggagtttataattaaattgggaggtgggggtggggagagggaagatctataaataagaaacaaactactgaagacagtgattaaatgttcaagtgccatagactataagtgctacagaagtttagatgcagtcaatatatgtttatgaaagaatgaatagtggccgggcacggtggctcacgcctgtaatcccagtactttgggaggccgaggcgggcggatcacaggtcaggagtttgagaccagcttggccaatatggtgaaaccccatttctactaaaaatataaaaaagtagccgggcacggtagcacacacctgttgtcctagttactcgggaggctgaggcagagaatcgcttgaacccgggaagtggaggttgcagtgagccaagattgcgctactgcactgcagcctgggtgacagagtgagactctgtctcaaaaagaaaaaaaagaaaaaaagaaaagaaaaaagaaaagaatgaatagcaaagagcaatatgaactgaaggcagaaaacaaggagacatagctcaaagctgggtcttgagaaggcttcagatataatggagtggagggaaaagggtacttcaaacagaacaaaggcacaaaggaaagaataaggactgagttgggggagaaggtatgggaagtagcttggcctaattaggatgtagggtctgtatgggcagagtgggagagaaggctggaggcagaaaatagctagactactggaggggggtgcagtgagaggcagaaaagctcagccctgatgccgtaagcaggagcaatctaagcaagggaaggagagagtaacagtggagactgggaagaatctgacagtggcagagaagacagatcagaaagacaaggacatcagtaggcagcaaatgacacactccagatgaaaaggaaggcagaaggaatgaagagaaggggaaggccatggtacacctctcccatccatttcaatcactctagtccagaactttaatttgaaacatacttccttaggacaataccaagtgtctggttaatgttatctccctcagaatttagtagctactgtgtaaattttctgtaagaggtttttgtttttacaatctatactttttagatggatatccatcaccttaaacatttatcttttttttgagacagggtctcactctgttgcccaggctggaatgcagtggcaataaaatggctcactgcagcctcaacctctggggctcaagcaatcctcccacctcagcctcctgagtacctgggatcacaggcacgtgcaccatgcctggctaattatttgaaatgggggtctcaccatgttgcccaggctggtctccaactcctgggctcaagcaatccacctgccttggcctcccaaagtactgggattacaggcgtgagccaccacgtctggccgcatttatcttttctttatgatggaaatgttcaaatgcttctcatctggctattttgaaatatacattagattactgttaactatagtcaccctactaaactatcgaacactaggtcttattctttctaactatatatatatattttttgagacggagtctcactctgtcgcccaggctgaagtgcagtagtgtgatctcggctcactgcaacctctgcctcctgggttcaagtgattctcttgctccagcctcccaagtagctgggattacaggcgcctgccaccacgcccagctaatttttgtatttgtagtagagatggggcttctgcatgttggccaggctggtcttgaactcctgaccttaggtgatctgcccacctcggcctccaaaaatgctagattacaggtgtgagccactgcgcccagtcctaactgtattttggtatctattaatcaacctctcttcatccccctcttacccccaccacaagagattttaagggaaggcagatccaaattccatccagctaagggtttgggcaactcaccacaacgggcccatcctcctgggccaggtaagtaattgttgccgaggtgaagttgaaataaccagccttgagagggcgcaggaccacagtgtgggagacattgctagcactggctcaagagttaaggaacggaaagagatgaagctaaagttgtagcagcctttcaacctgtggactaaatgcaccacttacaaaacatttgccaatacatgctgatctcatgccggcaatattctgcaggaatgaaaaaatataggcttctttgccgggcatggtggctcacgcctgtaatcctagcactttgggaggccgaggcgggtggattggctgagttcaggagttcgagaacagcctgggcaacacggtgaaaccccgtctctaataaaatacgaaaaaattagctgggcatggcagcatgcgcctgcagtcccagctactcgggaggctgaggcaggagaactgcttgaacccgggaggcggaggttgagtgagccgagattgtgccactgtactccagcctgggtaacagagtgagactccgcctcaaaaaaaaaaaaaaaaaaaaaaaaaaaaaaatatatatatatatatatatataggcttctttttaaaatttactgatttttttaaatattaaaaaaaaaagagagagagatggggtctcactttgttgcccaggctggtctcaaaatcttgggttcaagtgatcctcccaccttggcctcccaaagtcctgggattacaggcatgagccaccatatggggcctaggcatcttttttaaatctaaagtgtatggtatttttttcccagcttaaattttaagggtcccatgttatactcagtgtcatggtttttgaagtaaacttccaaagcaatatatgttaggaaaannnnnnnnnnnnnnnnnnnnnnnnnnnnnnnnnnnnnnnnnnnnnnnnnnnnnnnnnnnnnnnnnnnnnnnnnnnnnnnnnnnnnnnnnnnnnnnnnnnnagtgagaagttcgagaccagcctggccaacatggcgaaaccccgtctctactaaaaatacaaaaattagctaggcatggtggcgagtgcctgtaatcccagctactctggaggctgaggctggagaatcgcttgaactcgggagccagaggttgcagtgagccgagattgcaccattgcactcaagacaagagcgacaagagcgaaactccatctcaaaaaaaaaattacagtcattcaatcagtgcttcttcttggatgattaaaagaaattatagtcacttaagctcacagaaaatcttttttttttgtttttttttgacagtctcgctccgtcgcccaggctgaagtgcagtggcatgatctcagctcactgcaagctccgcctcctgggttcacaccattctcctgcctcagcctccagagtagctggaactacaggcgcccgccaccacgcctggctaatttttttgtatttttagtagagacagggtttcactgtgtgttagccaggatggtctcgatctcctgacctcgtgatccacccgcctcggcctcccaaagtgctgggattacaggcgtaagccaccgcgcctggccaagctcatagaaaatcttttgttaactataattgaaggaaattattgaaaatacaaaaaaaaaagacaaaacaaaaacaaatacaaagaccacatttaccctcaccaataaacctaaacgtatacataattattattgatatgatttggatctgtgtccctgcccaaatctcatgtggaattgtaatccccaatgttggaggaggggcctggtgggagggaattggatcatgggggcagatttctcccttgccattctaatgatatgagttctcacaagatctggtttaaaagtgtgtagcacctcccctcttactctcttcctcctgctccagacatgtaagacgtgcctattttccctttgccttctaccattataagttccctgaggcatccccagccatgcttgctgtacagcctgcagaaccgtgaacaaattaaacctctttttttaaaaattacccagtctcagcttattcttcatagcaacttgagaacagattaataaaatacaattaattattatttaagagactaggtctcactttgtcaccaaggctggagtacagcagcactatcatagctcactgcaggcttgaactcccaagccctagcaatcctctcacctccatctcccaagtagctgggactataggcatgtgccaccgcacctggcttaaatatactttaattcacaggaagaaaaataccatctaattcaatactcaggagataattggtagattagaataagagactcactgaataagagactttaaaaggtcacccagatccttcatgctagcatcccagtgaatttcttttttttatttttgagacagagtcttgctgtcgcccaggctagagtgcagtggcgcgatctcagctcactgcaacctgcacctcccgggttcaagcgattctcctacctcagcctcccgagtagctgggattacaggctcccgccactgcgcctggctaatttttgtatttttagtagagacggggtttcactatcttggccaggctggtctcgaactcctgacctcgtgatccacccaccttggcctcccaaagtgctgggattacaggcatgagccactgtgcctggcctgaatttcttttaaaagcaccttaaatacctttgtccagccacaaacatctttattaagtgtctatatcctcccagtatagtatgtttcaggtttttttttttttttttttttttttttttgacacagagtctcactctgttgcctaggctacagtgcagtggcaggatctcggctcactgcaacctccgcctcctgggttcaagtgattctcctgcctcagcctcccaagtagctagactataggtgcgcgccatcatgcccagctaatttttgtatttttaatagagacagggtttcaccatgttggccaggatggtctcaatctcttgaccttatgatccacccacctcggcctcccaaaaatgctgggattacaggcatgagccaccgtgcccagcttgtttcagggtcttataatctgaacttcagtatcctccttcttcatgtctactctaaatcatgctcacacaatttacaccaacctctcttgctccatcttatccagagagatgacaggaggacagccacacatatccagcctatttgaagtacccctgctgctttgcaggcaaggctctccctgccccccgacccttcatcaccaagtgccaagaggatacggggcaatccggtcccatttgacattgagcattccagacacaatgccaaagtcttctggagggaaggaatcatcagatagttccacgtctaatgcagcactagaaaatggatgaaacaaaaagggttagtaagtaatggatataaaattaaagcaggccgggcgccgtggctcacgcctgtaatcccagcacttttgggaggccgaggtgggcagatcacctgaggtcaggagttcgagaccagcctggccaacatgcgacacacggcacaaaaggtgaagaccctgtcttacagaaaagtcgaaaaattgaggtggggcggggggtgagcgccttgtattccccaactgcttggggaggatgagggacggagagacctggtgtgaacccgtggaaggggggggtttcaagttaagcccaagatcgccacccataaattcaagcctggggcagagcggggctctttctccaacaaccaaaaaaatttaagccaatgtccggggcgcagtggtttcacccctataatcctagcactttggagggctgaggctggctgatttctttaaggtcaggagttcaaagaccagccttggccaacatggtgaaactccgtctctaaaatacaaaaaatcctgtctctaaaaatacaaaaattagccaggcatggtggtatgcgcctgtaatcccagctactcgggaggctgaggcaggaggatcacttgcagctgggaagcagaggttgcagtgagcagagactgcaccactgcactcctgcctgggtgacagagtgatactccatctaaaaaataataataaaaaaattaaattaaagcaataaacaatcaaacctgcctgcttctccaaaaaaatcagaattgcaaaagatatgagtaatatagcaacttggttctgttgcactgaagaatccaggtcaaggactggattctattgctcagaagcaccaaaataatcaagtatccaggaggcaataggtccaagttcatccttgcctcaatttttcttcatgtacatgcctatgtgtgtggagggagggagaagaggaacacagtgaatacagaggagaaagttataagggaataaaatgaaagaaaggcaacaaaaatgctctaggctaatgaaagaaggaaaattacacttttttttttttgagatggagactcggtcttgtggctcaggctggagtgcagtggcgcaatctccggctcactgcaacttccgcctcccgggttcaagcgattcttttgcctcagcctcccgagtagctgggactacaggcgtccgccaccacgcctggctaatttttgtatttttagtagtgacagggttttgccatgttggccaggctggtctcgatctcctgacctccagcaatccgcccgcctcagcctcccaaagtgctgagattacaggcgtgagctaccatgccaggctggaagatgacactttaaacccctgaggtaacaagggattgtgtattttctgtgtctttatctttccctcctagtttttccacaattcttgccacttccctactctaaaattcttccaacccgaaacgtgaaagatggtttcttgtagcttaggtaagaatgtcctcctttccaaaagtagatcccgaagtgtattcattcactcaatatatctgatgctggaagtgtcccaaagagaaaccactacccaccaatatgctccctattcccatctgaaaactaagaatccagaaataggcttaatctgtaactctagggcctcgagttaccttgagccaacattgtagatgttgtactgcaaggtcaggtctcgtccctccacggcgtatctgttcagcagtgatttggaagccaaaagcctggctccttcctctgcttgagtgacagcaaatagagccaacaccacaaatgacagcagcctcatctttagagaaaaaagcaaagtgagttatcaaaccaagtacgtcaaattcaccaaaatcctcttgacagcgctcccgtagaaagctccttcgatgctaccagaacagcagccccttccacagagtagtccataagccaccagagcagacccgttctccagactctcctaccatcttcaccctgcagccctcgaaaaaccggtacaagcaccaatatatctactgccctcttcctgtcagaagccccgggatgcccaccggctggtggagtcttctgaggggacaccatgtggccagagcagggcttccttggggtgcctgatttcggccgatctcggacctgcaggagcctgtagctttccctcacacaggagtgcccacagccttcccgctgctcccctcctccttggccacagctctattgggatcccaccgcggactcgcggggtcctcctcacatccctgtaccccactctccagtccagcccctgagatcccattcgtcctcgcctgtcacatccc

SEQ ID NO: 1018 - protein, 528 aa, Homo sapiens [sequence omitted]

SEQ ID NO: 1019 - DNA, 1105 bp, Homo sapiens
  source (1)..(1105)
  CDS (201)..(905)
aagaagagtgggcacctgagggaagccagacctgcttcccgcgcactgtggtgtttttggctttgcgtgagcacacctcttgggtgctgctggcagctaacacgctgctgctgctgctgctgcttgggactgctggcctgtttgcctggcacctagacacccctgtggtgaggtcagcagggggccgcctgtgctttcttatgctgggctccctggcagcaggtagtggcagcctctatggcttctttggggaacccacaaggcctgcgtgcttgctacgccaggccctctttgcccttggtttcaccatcttcctgtcctgcctgacagttcgctcattccaactaatcatcatcttcaagttttccaccaaggtacctacattctaccacgcctgggtccaaaaccacggtgctggcctgtttgtgatgatcagctcagcggcccagctgcttatctgtctaacttggctggtggtgtggaccccactgcctgctagggaataccagcgcttcccccatctggtgatgcttgagtgcacagagaccaactccctgggcttcatactggccttcctctacaatggcctcctctccatcagtgcctttgcctgcagctacctgggtaaggacttgccagagaactacaacgaggccaaatgtgtcaccttcagcctgctcttcaacttcgtgtcctggatcgccttcttcaccacggccagcgtctacgacggcaagtacctgcctgcggccaacatgatggctgggctgagcagcctgagcagcggcttcggtgggtattttctgcctaagtgctacgtgatcctctgccgcccagacctcaacagcacagagcacttccaggcctccattcaggactacacgaggcgctgcggctccacctgaccagtgggtcagcaggcacggctggcagccttctctgccctgagggtcgaaggtcgagcaggccgggggtgtccgggaggtctttgggcatcgcggtctggggttgggacgtgtaagcgcctgggagagcctagaccaggctccgggctgccaataaagaagtgaaatgcgtatctggtctcctgtcgtgggagagtgtg

SEQ ID NO: 1020 - protein, 234 aa, Homo sapiens
MLGSLAAGSGSLYGFFGEPTRPACLLRQALFALGFTIFLSCLTVRSFQLIIIFKFSTKVPTFYHAWVQNHGAGLFVMISSAAQLLICLTWLVVWTPLPAREYQRFPHLVMLECTETNSLGFILAFLYNGLLSISAFACSYLGKDLPENYNEAKCVTFSLLFNFVSWIAFFTTASVYDGKYLPAANMMAGLSSLSSGFGGYFLPKCYVILCRPDLNSTEHFQASIQDYTRRCGST

SEQ ID NO: 1021 - DNA, 1117 bp, Homo sapiens
  source (1)..(1117)
  CDS (201)..(917)
cttgtggggataccaaccaccagagcccttgggggcctcctctttgtgattttttatcagcctatttggtgacagtccttggaaacacccttattattatcctgattcttgtggattacaggctccactcacccatgtatttcttcctcagcaatctctctttcagtgaaacattaaccataacctgtgctgttcctaagatgctggagggcttcccgtcggaaaggaagagcatcacaagtggcgaatgctctgcacagtcctatttctattttctttccggatgcactgagtttattccttttgctgtcatgtcctatgaccgctatgtggccatttgcagtcctcttcagtaccctgcaattatgaccagctcactctgtgcccacctcgtcatcctctcctgggtgggtggctttctcctcatgctcccatccaccatcctcaaggcaggactgccacactgtggtcccaacgtgattgagcactttttctgtgacagcgcccctctcctccacctggcctgtgctgacattcgtgctattgagctgttggactttctcagctcactggtcctgatcctcagctccctctcactcacagtggtctcctatgtttacatcatctccaccattctgaagataccctcaggccaaggtcaacgcaaagcctttgccacctgtgcctctcacttcacggtggtctccgtgggctatgggatctccatctttgtctatgttcacccctcacagaagagcagcctgcacctcaacaagatcctctttatcctctccagcatcatcacacccctcctgaatcccttcgtcttcagtctgtggaatgaacccatgaaagatgcactgaaggacgcctcggccggaggacagagcttgctcaaaggggtaaggtccacatgaggattctctgagaatcctcttagtcctggatgtattcagcttcatcaatgatgattctaacaaagtcctaagacatttgtaaatgaatagatgatcttagttatgaaaaaatttccagttttcataatgaaatgtaccaggttttgtgcaatttaaatttccaatattgtgtttcattaatgaaacttctcgttataggt

SEQ ID NO: 1022 - protein, 238 aa, Homo sapiens
MLEGFPSERKSITSGECSAQSYFYFLSGCTEFIPFAVMSYDRYVAICSPLQYPAIMTSSLCAHLVILSWVGGFLLMLPSTILKAGLPHCGPNVIEHFFCDSAPLLHLACADIRAIELLDFLSSLVLILSSLSLTVVSYVYIISTILKIPSGQGQRKAFATCASHFTVVSVGYGISIFVYVHPSQKSSLHLNKILFILSSIITPLLNPFVFSLWNEPMKDALKDASAGGQSLLKGVRST

SEQ ID NO: 1023 - DNA, 19803 bp, Homo sapiens
  source (1)..(19803)
  CDS (201)..(376)
  CDS (728)..(1242)
  CDS (1386)..(1455)
  CDS (1883)..(1949)
  CDS (2111)..(2196)
  CDS (2495)..(2617)
  CDS (4633)..(5026)
  CDS (5164)..(5259)
  CDS (5622)..(5661)
  CDS (6264)..(6976)
  CDS (9143)..(9178)
  CDS (9496)..(9594)
  CDS (9695)..(9751)
  CDS (10172)..(10351)
  CDS (16211)..(16390)
  CDS (19199)..(19603)
  modified_base (12374): a, t, c, g, unknown or other
  modified_base (17687): a, t, c, g, unknown or other
  modified_base (17703): a, t, c, g, unknown or other
ctgtctgcccatcttccccagaccctggagctggcgggctccccctcggtccccctggtgatcggctgtgcagtgtcgtgcatggcgctgctcaccctgctcgccatctatgccgccttttggaggtaggtctgacacctggctcttgtggctgggggagggggggcaggcgcagaaggtggccagccacaccaggtcggatggggcagccagcgcctctgtccctgcctgctgtgccccggcaggtcataaaatctgaacgctccatcatcttgctgaacttctgcctgtccatcttggcatccaacatcctgatcctcgtgggccagtcccgggtgctgagcaaggcaggtgcagacttccagggctgccaggggtgtgagtggggtggagggataagggtggagagcgcagtgtgtgtgttgctttgtacgtccatagtgggtggtgtatgtgtgccccatgttgggattagagtgtgtatgaaatagtgtgtgagcccatatgtgaggacattggagagggggtgtgtactcaagtgaggaacttctgtgaacatcagtaaatgtgtgtgtgagctgagcgctgggtgtgtgttgggcaggtggcattgggcctccttgtgtctgtgagcgtgtggaagcctgagtgaggcctccttttgccacctacctgtggacgacctgtgcagactcttccctatgcccccttggccttctctgcacagtgccagcaccatgcatgccaggcacagggcctgcccagctgtgacgtggcaggtgctcatgtctgtccccctccctgccagccccgtctgtgcgtgggcagcctgcccacccgcctccctggatgccgagtgctgtgtgtgtgtcaccaggcccgtgtcgtgctgtgtgtgggtgcaggaaggcgggggtgcctggcagggctctgtggggggcggggctcaggtgggcggctgtggcagcgcccagcagcgggcgtgggaagcccggcgcctcctgccctggcggctgctcagggccactccctcccattccctctccctgcagggcgtgtgcaccatgacggctgccttcctgcacttcttctttctctcctccttttgctgggtgcttaccgaggcctggcagtcctacctggctgtcattgggcggatgcgcacccgcctcgttcgcaagcgcttcctctgcctgggctggggtgagcagggccagtgctggactctgctgctgggccttggtgggcaggggcagcaagagaggttcagctttggccctggcccagctctctgggcacaggggtcagctgggatgggagtctgggagaacaaggggtccctgaagaccagcaaccatctcactctggcacccctgctcccccaggtctgcctgccctggtggtggccgtgtctgttggctttacccgaacgaaaggatacggtacatccagctagtacgtgggcctcccgtggtgggtggtagcgggtagtggatctgttagggaatcggactgggcagctggctgaaatcctagcccatgcctgttttgggtctttgggcaagttcctccccatttctgagcttcagtttccctgactgagggaatgtgctaggactgggtaatccctaagggactgtttagctcaggagtcagccttgcttcatccccatgggagcactgggggatgagcctaatgttctggacctttgttggaggggaaaccgaggctcagcaggagccagtggctcactctcaccgtctggggctcagactgcactggtgatgcgggcatggcagcctgggaggactgagggatggtgtttgagggtggggagggaggctgctgggtgtctgacacccttcttctcccccaccccagctgctggctctccctggagggcggcctgctctacgcctttgtgggccctgcagccgtcattgtcctggtatgtgcccgttcagcatcttggaaggggcatggccccagagggtcatcctgtttctccctctacctcctccctgcgctccagctcccacatggggatttccctgccaggagggcacctggtgatcctgtctcccccactccactctactgggcccccaggtgaacatgctcatcggaatcatcgtcttcaacaagctcatggcacgtgatggcatctccgacaaatccaagaagcagagggccgggtaaggggggggcctctgagacttggcctttctggaaatggtgcagggagggagggacatgggtgctcttggagactcagggctcgatgatgcgaccggggctccccaaccttggtgcatcaaggttgcaggcaaggtgggcacccggagtgctcagccgcagcccctcacccaccctaacccagctctctctctctcgtctgccctcccctcccaccccactcggggctcattctgccccatctcccggcttcccatgtgtttcccctccttctcccatgtctgtgccgcccccgaggtcggagcggtgcccctgggccagcctgctcctcccctgctcagcgtgtggagcggtccccagccccctgctcagctcagcctcggccaggaacgccatgttagtcgtgccccctggggggcggtgggggtgggtggggcaaaggaattggggggggcagtgcccatggtggggggaggaggagggatatcagcccagtgccctggaaagcttgccctttcctgccagccaccacacactctcaagggctcggcaagaggtggccaaggcgatgaggagtggatgtctgtgcctcccacaggtgcccggttccttcgcccacccttggatcccgcccctgccctcactcccagctaatgttctatcctgcaccgccccacacccccaacctacagaggctcagacaatcttaagccttagaatttttgagctatagaaccttagaattagaatgatagaatcttagaataagacaatcagaagctaagaatgttagaatgagtgaatcatccagtcttatcatctgtcatagaatctgagacttagcatttcagaggcattgaatctcacactcaattggagacagagaatcacagaggtagagaattatttcactgagacccccgccctagcatctgagaatcttaaaatcccagctatgcaagggtaaaacaaatccacaaagaccttaggctcaacctcccacccaggtctggaaatccacccaagcctccatgcccagtgaggtccagctttatcttgcacacctgcagggtcagggagctcagggcctctggaggcagctggcaccgtcaccacgaagctccctctgtcttgggctgccgtctgcctccctcaccccgtctgcactagctgtttcaatgcttgggctttggagtcggtcaagctgtgtttgtatcccaactgtgcctctccctgcccagctgggctcactccagtttcctcatctgtaaattgggataataatcccatgcctgttaattggagttgttttgatcatgatttgaagtaatatatgtaaagtgttcagtgtagggcctggtagagaattggtggttaatcagcgtagctcttattactgtgattagaccctctcttagtcttggctacacctccggggacttcagagtccattgtgcctgccccctgccaggctgaacagccctgaactgcacttcctagggcaggtcttggccccctgcccatctctctgctttggcctcccccggctgtctctgcggaatggtgccaccctctgccatgcctagagctgtgcctgactctcccactgggggtgtttgcgaaggagagtgggctgagtgtggcacctggcccgggagggtatggtggcctggctgtccctcatgtgctatagcaggttagggaggggtgggaatggcttggatgccaggccccatctgctttttttctgccctcccctggcagggaggccagggaggtgtaggcctggcccgaccccagcttttagccccagctctgagccttctgcccaaggctctgagcagtccgtgggagcctggcgtcttctctgtgtgtggggggagttctgcttcactggtcctggccccctgtcttctccctgaggattcgtgctctggatgtcccccgcgtgctctgcctgtttaatctttctgtctgggtgtctctgtcgcatgcgttctctcactgtggttgttgttgctttgtccctcttccagtccccctccccagcctacccagttaggctctggggatgccgtcccggccccgtgcatttttaaaaagctcctcaggtgattctgtgcatctgtctgcctcctcttctctctccccgtccctttccactgtctgtggctcggtcccactgtgtctgcgtgtccttccccaccttcctggtccctgctctgaccccgtagttcgctgctttcggtctctgttctgtttctctggctctggctcctcagcccctctctgcttggggacattactgaggccctggggtttggggccctcccagtcttgggcagctgaagagctccagctgagtggaggcctaggctcaagccatcctgtcccccggagtgtcactctgatgggctctgccactgtcccctcagggcctcactctggagctcctgcgtggtgctgcccctgctggcgctcacctggatgtctgccgtcctggctatgacagaccgccgttccgtcctcttccaggccctctttgctgtcttcaactccgcgcagggctttgtcatcactgctgtgcactgcttcctgcgccgagaggtggggctgggcctctcccgcctgtgtgtgcccaccacacctgccaggcccttggcttctcctcactgtgcagaccgggaggatcgaggccccgaccagggtgccccaggccccatctgggcagcccttactgtggaagctgatagcccggggtacccgcaactgtcccttatgcttatccttggcctcctgggtctcctcctcccgttgcaccctgcccaggtgtcatcaccttccccaaggttggatgtgttgccttccttctacacttgcctgggcatctggggtgggaagcacagccatctgtggtcgggggccctgcagtggcctcaggcccagcaggcgccctctgtccccaggtccaggatgtggtgaagtgccagatgggggtgtgccgggctgatgagagcgaagactcccctgactcgtgtaagaacgggcagctgcagatcctggtgagttaggggcctgggcagggcctgggcagattctgggcaccccccaccccaatcctcctgccctagaccatttaccttccccatccatggcagggttgggacagggattgggtttgattcaggctcagccactaacacctgggtggcattgggcaagtccttcccccactcagttttcctagccatcaggtgggctggggtaggccatgcctgggctctgctgggccatgggctatgggccatgggcagccctaaggcaggcagactgggcaaagctggctggggagggcctgagcctcctcccaccctgatacattaatcctccctctgcccacctgcccctccctttctgcctatagtcagactttgaaaaggatgtggatctggcttgtcaaacaggtgagtgtgccgtggcagaactgagaatggtcctggggttggagaagaaggggaggccttgagccccatcatgggaggccctgatggagttctggctgctggagtccagcttcgaagttagacagccctgagctggacgcaaggctgcgaatgtcccttactgtatgaccctgggcaaacaacctgcctctctaagcctcagttaacacacctgtaaaggagagaatactgtcctcccagggcaggtggggggcttaggggcatgcatgaattcggggacatcgagttcttagcaggacccatggcacagagtgttacgttattatatcatttccagattcttaccagaatctttccatttctgtctcctggggagctgatgcacagggaggtgggaagacaaagccctttgacagccgtggggctgtggggtcaaagtcgggacctgcaccaggacactgggagctgggccttgcctttgtttcttgccctgtctcaatgtggggactttggagccgttgtcttcttaacccctcttatatgtgagagattaccaaccacccagccatctctccaggacccagtttcctttcctgtccaagcgcagaagcttggtacctccccagcctgggcaatggcatctggaggttccttctcctcaggactcaccccctccctcccactcctgcccccagtgctgttcaaggaggtcaacacttgcaacccgtccaccatcacgggcacactatcccgcctgtccctggatgaggatgaggagcccaagtcctgcctcgtgggccctgagggcagcctcagcttctcaccactgcctgggaatatcctggtgcccatggcagcctcaccagggctgggggagcctccgcccccacaggaggccaaccctgtttacatgtgtggggagggtggcctgcggcagctggacctcacatggctgcggcccactgagccaggctctgagggagactacatggtgctgccccggcggactttgagcctgcagcctggcggtgggggtggaggtggtgaggatgcccccagggcccggccggaggggaccccccggcgagctgccaagacagtggcccacactgaaggctaccccagcttcctgtccgtggaccactcgggcctggggctgggccctgcctatggatctctccagaatccctatggaatgaccttccaaccgccaccgccgacacccagcgcccgccaagtgcccgagccaggggagcgcagccggaccatgcctcgcaccgtgcccggctctaccatgaagatgggctccctggaggtgaggggctgtagggaatggggtgtgtgtctgagactgtgtcaatcacaggctgcagccaggaggggacagcctcatcctccccagagcggcctctcgtaaaagtcactgggagtggatacactgagcatttctctgtttctgctcatggcagctccgtggtgtctgtgaatccttcagacaggctgggacttcacacagtagaattgtacttctcgactcgttcacacttgctttagggcctactttggggtgactggttaggatgagtcctcatttcaggagactgtggctcaggcaatgtgtgagcctgggcctctgcgtcatgcaggtctgagttccagtctggactctgattggcagtgagatcagtgagccttcattttctcgtgtgtaaagtggggataccgtagcagtctctttgtggagtcgttttgaggattgagtgatgtaaaacatttatgtggagcaagtagaaagtgctagataattggggattgctgctgttagcacccctgaaatcagctgcagatgctgcccacaggcctgtggtaactgaccctctcttccggagaaaagcaaacccctccgggtccctgcctgtgtgtgttctgtgaatccttcaccttcacgctggcctcctcaggtctgctccctgcagaggatcactgagaacagacagtagtggcctgctgtggaactctagaacattctgcaactttattggagtcatgaaggggatgtggttaaggaaagggacaggagtcgtggcttagccacaattggctgttcctgctcggcctcagaaacccactccccatccgccacaagacgaaaattaagttagtagctacggggctcacaagtttagtttttctcccaaagtgtttctggaacatttggtgcctgcttctgccacagatggcaaaaacaggaaggcgtaacaaagacaaaatgcaacgccagtgtcggagaagggcgcgcttggcgtcatggcgggttttgttctgtggacacctgcctgccggccactgttgagggcggacatcaggctccttgtgtgggaggcagtagtaaatgcagcagcgctttgaggggtcaaggatgacatccagaattcgggcgtgggcaaccgtgatgggcggaggaacaggtctgggtagggaattacaagtgtattccattggtgtgagctgcatgtgcagtgcctgtggggcatcagacagggagaggtgccctgttgcccccagaaagagagatgtggctgggttggggaggatacacgtgtgtgtggtaaaggcaggagaaggtgccggggcagagtgtgagtgcctagtattacagaagccagggtaggcagcggagagaaagcaggtagggagaggagaggaaaaccaggagagtgaatgccatgggcccatggtggtgagcatgcccacaggcctgggagatccagatggtggtcctagtatcaccttcgaaggcctgggagcaattcccttcacctccctgggtctcagtttccctatctgtaacctgggaaagttggccttggcttcatgggtctccctgtgctgacattttaagactctcaggcctctttcttgagtagcactgggtacagtacagcttactggggccttgaaagtggtctgggacaaggagggccaggagaggcatgagggagcagagaggccagggaggcagcgcctggtttggcaggaaaaggggcagtgtgaggtcaaaggaaggtttctgaaagcctgaatacctgtgtttgcaggacaagtggaaggttccaaggggaggggtagctatggctggcagagagaatggggcaagatggggaaggatgcagggtgggctctagggcacagagaatgagcactggctctgattccatgtgggcatctgggcctgtcatgttggaagtccgcaccatgccatttgacgtgtgtgtgtgtgtgtgtgtgtgtgtgtgtgtgtgtgtgtgtgttcagtgaggcctgaaaagctgccccatgaaggtccgcaacttctgggcctgggttggggggaaggtgcagcgggcagacccctgggatgccaggcttcctgtctctaaagcccctgccggtggtaaaaagctttcttctcctccattgcctccttgttgctccttcccagcgaaagaaattacggtattcagacctggactttgaggtaagggccatgtgtgtgctgggcggtgggacatctggctgtggtgtctgtccctggagggctcactcctaaaagtagtccaagctctgttgcagagcctgaccccaggagcccaagcccgggggttccgtgggatcttcccatgattccctccctgcccaagcccatagcaccaacgtgaagagagaactaggtcttgtcccagaggggctggcagcagggagggatgtggggggcttggggtgctgagtgccctgggtaggggggatcatggtgctgccccggggagcgaccctctgatgccctgtggcccctagaaggtgatgcacacccggaaacggcattcagaactctaccacgagctcaaccagaagttccacactttcgaccgctaccgcagccagtccacggccaaggtgagggctcctcccgtggctgcccctgccctgaagctcagggcctgacctggtgcagtggcccctggggttggagcctgaccggtggcccccgttgcagagggagaagcggtggagtgtgtcctcgggtggggcagccgagcggagcgtgtgcaccgtgagtccccccgggctgggtggggtgagggtgggcctgagggacccgtgccctccctgccctcctgcccctcccaggcaaccccagcctgtctcaccaagggcctcccccacggcatgggcaacagtctggggccgcctgggggtggggaaggtgctgcagatggcgaacaggggtggaggtcctccaggattgggagggagagtggtcagcaggagacatgtcctgggggccactgagaacaggggtcaggagccccaccctggaaccaggcaggtctgtatttgaattctgcttgacacctgattgctccataactttgggcattaccagccctctctgggactcctcagtttgatcgtctgtacaatgggtaaggatattggcccatctccacggcccctcccgctccctccacaggataagcccagccctggggagcgccccagcttgtcccaacatcggcgccatcagagctggagcaccttcaaatctatgacactgggctcgctgccccccaagccccgagaacggctgactctgcaccgggcagcagcctgggagcccacagaaccaccggatggtgacttccagacagaggtgtgagtgccacgctggactgcccactgcatataaatatatatatctctctattttcacactccactttggaactacccaggagccagcgccctctcccctctcccgagggctgggcagggaggcgccgtggactcagccaggctgggggagccggacatggcttggcctggggtcccagggcccttccttgtttctcagaggcccctcagccactggaaccccatcttcagcccagcctgtccgtccctgtcccgggctggggaggggggaggggaactttgttgggaataaacttcactctgtggattttgctgctgagctgtttgcttccctcaggtaaaggcccagctctgggaccccgactttgtttctgtctcctgggttgaactcacttgatctcatcagatgatgtgatggggtcagtccagccctgcctgggagggggcggcctaggctctgaccccatctttgtccctgactctctgggtgattcatcctttccccgatctgggctgtgggaagcagattgggagtgtgggaggggacctcttatggctggcttttcctggtggctgtgatggtcgtggctgccattcactggggcacagaggccagacttcctgggctagagccaagacagagcttagtgaccttggtttcacatctgtgaaatggggatggtaacagtgcccacctcacagggttgttacagggatgaaacgaggtaggttcctcaatgtgttcagcaaataccatgggcaggataagctcttgaagggttagctgtgaccatgtggcaccagtctcatgcagtgctctaagctaggagcttcacacacatatcccctggcccctcacaacaaccctgttggaaggttttaggttgcccattttgtggataggaaaatgaggccagagatgggcagtgcccggctcaaggccacagtcagaggcagagctgggacttcaaacccacgcttgatggaggtggggcttcagctcagcttcctggaacttgaccatggctgcaggggagccgcagatgctgggttgtggtggagatgcaggtgttggaccgggccagggctggggtggggtgtgggagccaggctggcttggtgccaggggctggaggcttgtactgagttgcattcattacatgcctgagtgagcggatccttgctcagttttcaggcccccagaaagagggggcacaggattacatctggaaacatattctggagtcaggcagcagctggagcagaggcacggttagcagggtcacaggtccttcttgcctggtcatttagcaacatgggcacctctgggccccttcccagggactcggagacacagacaggtccctggagagctgagggagggttaggtgctgcagcagcctgggtgggagtgacagaagtgactggctgctggggtagggggtatcacagataatggcctgcccaggggtgctggaggaggggcggaggcctcttcagagttttgcaggccttgatggcacaggcttgctctggtctcattccaatcctgcctgctgtgagacctggtcagaggagccgtgcgggcagagtccactcaggactgtgcttctagacccttggagctcctgcgactcactcctccgcctccctcccttcgggcagccccagcacttaagtgtacacagagttcactcaagcactacctcatttgattcttcaaggtaggtattgtgactgccccattttggagatgagtaaatcgaggcttggagaggggacatgactttcccaagctcccacagctcagcttgtgactgggacttgtggctgggagtggcagaatccgataccagcccagcttaggcacctgggagctttgttcacccaggagcgcgctggcgccaggacagcagtgggcaagtgcggctggccttcgtgatgggaccccggatcaggagtgccaccgcatgtttcatcctctcctggcattctctcgaatgtgtgtcggcttcattctntaaggcctcttccccctgggcctgccaggcttcctcctcccagctcgatcactcagcattgcccctagaggggaagaaactttctctcttgaattccaattagaaaacccccaaggaaggaagagctctggctggccccaggaaggaggctggggcactgtgattggcagtcccatcaggaaccatgggggagagggagagggaggagagggagcaggtctctgagaaaggggggcctgttcctaaaagggggtttgcacaaacaaagcccgaccatgtaccagcagatcctactccacattccttcctctgaccatcacctaaaggccctcttaatgccttgtcctgtgctcgcacctccctccttcctggtcttaggctccgctggtcaccacctctggggccctctggggctgaggtgtgatgtgcacgtccctgccctcctgtccattcttgctttgcatctggttgaagaggaagtttagtatttaccttgttgattctgctcaaacacaaaccacagctacctgcagaggcctctgctggctttgagaccagccacttagctttcctggggtgggggctttgtccctcccttgccctcagtccctgctcccccaggcactgacttgctgcgtgaccttggacaggccactggaccctgtctgacatgggtttccctatctgtaaaatgagttggctcgatctcccttccatttgagctaatatctaacaacctgtcatttctttcctggactcaaatttctcacatcattgccctcattttctctgcctccagtctccagcccttcatccacatggcccaagtgatctttccaaaatgcagatctggccaggccactgctcagatgccttctgtggatcctggaattagcctagagttcaaggcccttggtgatgtggcccttgcctccctcctctggcccatctctctgacctccatgcctgtgcatgcaccactccttctgcctgaaactccctcctcctcacagaggggaaactctccttcagccttccagacccagcccaagtagccccctgtgtgatgctgtccctgaactccctggcccagcagtcagcactcgctggacccccacaggccttggcatgcactgtcactactgcactgatcacacagaactgctgtcatctgtgttggccttgctgtggtttgtgcactcagaggcccacatgaagcaggcatcagtgaatctttagcgggtgaagggtggaatacacaaatctccctgaacattgatttcctcatctgcaaaattgggataatgacaactcctacccagtcttcctcactggatatccggagcatgacttaagatgattcatgggaagcattttataggtgttaatctactcctcccacagttattccttcctcaaccccaagtgggaagccagccctggctgctgtccagggtgctgaaagggacttgtcttcacccaaaggatgaggagacaagactgagaggcccgcccgcacaagctcagctgcagccttttcttgctttccagactggcagggtcaaggatgagcagaccatccctaccttcatgagaacagaccctgggagatgtctaataaaaatacaatgtaaacgacatatgtaatttagaattttctagtaaccattctttaaaagtttgaaaaggtgaaattcattttaataatatatctcattcaatatattaaaaaacgatcatttcaacatataatcaatataaaaaatgactgagatatttaacattctttttttatacggagtcttggaaatctcgtgtgtgttttatacatacagtgctacagtgcatctcaagtcagtctcaccaccttctgactgctcagtactcccgtgaggctaccatgtcggacagcacagctctaggcagaacaaaggcagtgaccttgagcaagtgaactcagtgccctctgtgaaaaggaggtacttccgcacagcctgcctcatggggccatggagagggcttgaggaggtgatggagggaaagttgccagcacagtgcccgcacaagggaggtccaaagccagggttcctgggctccacatatcctggggatactggtgggtagggaggaggtgttggggaagtaggggaaggtcctgaggagacctgtggactggtatcaggcctccctcagcagcactaggggaaggggtcacccttaccctcacccttacccttacccctgcagccctagactctgggagaagggaagcaagttgaggctagactggaacagacacgttaaaacttaattgggcttaaatcacttccattaggcaccaattaaaaggaaattaggtggcctgagggaggacctgggtgcgggatgctgctgacttctgcttctcaggactcatttcccttcaggcttcttcatgcccaccctggcacctcatggggtcccccagttggggcttttctaatccagtccccagtacccatcatattcctccctccactcctccaaggccactgactctgggaagacttccaccctctcaggccctcaaaacacatgctaagtgtctaaggcagaggagactccactgagggttttggcctttaaggagagtgggaagctaaggaagagtgttgagcagagtactggcatgatcagatttctatatcaacacgatttctcttgagtggatggaaaatggattggtgggggcagggacactgaagagtgagggtggagagagagaccagcaaggagatgatctgcatgaaggagactttagagggtgctatggaggaggaatggagtttctatatatgtagtgggtagaattgtcagcactcagctcctggtgtggattgggtatcagagaggagccaaggatgacacctgggcttctgtcttacacacctggatggatgaccgtgtcattggcatagaggtacaggaagaggaccagctttgggggagacagtcattaatttggccttgggcattgtcttagtccattttgtgctgctataacaatacctgagactgggtcatttataaagaacagagattcattcattgcagttctggaggctgggaagtccaaggttgtggggctgtcatctggcaaggtcttttttgctgcatcatcttatggcagaaggcagaagggtgagagagagagcaagagattgaattcaaagactcaagctcttttataatcagtgttaatccattcatgagggcggtgccctcatgatctaaacacacaccccccattgaccccatctcccaacactgttgcactggggattaagtttccaacacatgctttttgggggacacattcaaaccatagcaggcatgtcaactttgagatggtcaaggggagatgtcaagtggaaagtaggtagttgaacacacagggctggaactcagaatgaggggctgggctggagtcattactatgggaggaaccagcactgaggtgggttgtagagtagggtgggaggtgaataaatcaagggactagagacagttcttaaagtggagctttgaaaagagggagactccctttgttcaggacaggtgaaaaaaaagagaaaagagggagagaaagctcagggcttactgtagtctctgaaggtgagttagctggagaggatgatgggagatttccatgaacagagaggctgtccctacctcctctccaagatcctacataatgatcagaaataaccagccctaccgccttgggaggccgggtcctgagacccagtaatggttatcatcacagagattgattctgctcatttgttgcacttcaggttagccacagttcctggaggtgggaatggggttggggggacactcaacaaggcctggactccaagaccttcgggacggatgggactctggactccatggggaaggtggagaagcaggcacggtgctccgggctccctgaagccctcacttctactcctcctgagcaggtggaagcaaaggtgagcccctcctctccaggcctcagcttccctatggacctgctccaggctgttatgtgcctatcccctgtggtggcatggcaaagcctcagccatcaatccaagtgtccctagagtcaaccaagaaagtcaatatttaatttgggcaccatgttaatgccatcgatcgccagctccctcctccttcctcaggctcatttgtcacttcccactcactgggggtggggtggggtgcagcctagtagaggcagagctcagcctggacttggcctgggaaaactggcctgcatgtggaggtgctcccctcaaccacccagcttccaatcccctgagaatcactgagctgctttgtctgagtttcctaagtgccatccctggggaggtcagtgaagtggggaggggaggtcaacttttctcccaggcccccacattgagtctaattcccttctggggccatacatagagcaggtgtggttgggggttgactgagtgaaggagggctagcacctgtgacataggccactgggagagaagtgagagcaaatttgagactcggcttctggatccttcctgggtgcccagttctgtgtctgtgtgatgctgtggaagtcacatgggggacctgagatgtggtccatctctaggacccagagaggaggctgagggagcattgagcttagaggtttagggctcagctgggtagcgaaagaggggctggggtaagggcagaccccatttaaaggcttggctgggtccaacttccagtttgttctcatcagttctgtggatccagataggggcccctcagcattcttccccagcccggctcacccagggagggaatgcctccagtctgcttcaggggccaggcttgggtcccaactgcaactccatctccaacttgctgagtgaccttggacaagttaagtaacctctctgagccttagatacctcctctgagagacctcttggaccttggtcacttggtactgtttttagagggtcagggatgggcaggagcaagcttgatggtccaaggagggttatttcccagagttctcacaatgagcagctcccaaaacctgctgacagtgctactgccttcttcctacctgtagggctgcttgctgtcaattaggcctgggccacaacggcacccttggtcctcctcgttatccagagtgcagaagccaagaccatgtcattgaggggatggttgggcaagccctgccatctagcactgggggaaaaatgggcggactgagtttcagttaagatgccagcaagacagtaacancacgtgcaccacagantagcagaaagaattctgaggccagtgcgggggctcatgccctgtatcccacaatgttgggaggcccaggccggccgaataccctgaggtcaggagtttgagatcagcctggccaacatggtgaaacccagtctctactaaaagtacaaaaactagccgggcatggtggcacatgcctgtaatcccagctactggggaggctgaagcaggagaatcgcttgaacccgggaggtggaggttgtggtgagccaagatcacgccattgcactccagcctgggcaacaaaagcgaaactccatctcaaaaaaaaaaaaacaaaaaaacccaaaaaaaacagtgtagaagctggtaagtctgtctaccttaggacactgagttaactggccacaatcggggtcccttcacacaaagacagccatgggcagttgtggaggacagaaaccactgcctagtaccaaagcccagtaaggacagagggaaaaaggtatgcctgacttagggattagtctgacttccttggaaaaatccgggcaggttctagccatcttcctaaaacatcggtgtcataggggagcaagggccacagccccagggcaggagagattctgtgacatgtttgaactgtgtagtttgtatagaagggctcaggctttggaatcaaagcagacctggattcaaaccctggatctgatccttactagcttgtgtgactttaggcaaaatgtacaattttctgagtaatgattttcacatttctaaaatgaacccatttccccagaattgttgtgatgattaaatgagataacagcaaaataaaatcctcagcaaagagcctggaatgtgtgtcttctgagatattttcacagagaaacggatatttaaactgagtttctccccatggtaggctacattatcgtctcctggctaataatctctagccaggagacacagtctgcacacccacagacattgtactaatatggtacaatggtttaaaaggccagttcaataatctattattagattacttgctaatctccccttccctataagagcattgtacatcctctcccactgcctggtggcttgcagaggggcatcctttcccatcctactgatgtcagtcttgatcagggggtgctctggccaaaagaatgcaagtgggcaagacatacagtacttcagagaagctttaagaggcattgtgcattcttgctagctctcctgctccttctctctgccacaaagataacatatcccaaacaggagctgctccttcagcatgtatccctgaatgaaaaagacacagggaacagaaactcaacagccagctaacagctgctgacatgtaagcaaaagaaagtaagcatgagcaagcaatacaaataaatgcttgcaacaaaactagctgacaaacttatcattttgaggatacacactgaagctggaagcaagatgctaaggtgccagagaccaggctgcctgcacacccacaggaaggacaaaggctggccatggataactcagaaccacgtcagaggtacccggagtccaagattactacttaccctgtccataaagcccaggctgctgggcaccgtaggaacttggaggtggctgaccataggggcccccgggagctgcaccgccatatggtcctcctggagttccagaggggaacatcccaggattggggtgtccatagggccctccaccagctggtggtccataaggccctccaggggcaggacccccataaccaccaccagggggtagcccactaccatactgccctccactattggggggtccagggtagtagctacccggaggggctcctggtgcttgtcctgcagctcctgggcagccctgcaggaagagcaagatatcagtcagaatgatgaggccagaaactaggcagagtatggcactttacaaccataaagcacttccaccaccatcctttcaactgatcctataggtagggttggaattatgatctcactgctcagatgggcaaactgaggcttccagaggagcaacgagttacccaaagtcaccccgccaatgacctgcagagtcagggttgaaatcctccttt

SEQ ID NO: 1024 - protein, 1078 aa, Homo sapiens
MGQPAPLSLPAVPRQVIKSERSIILLNFCLSILASNILILVGQSRVLSKAGADFQGCQGASTMHARHRACPAVTWQVLMSVPLPASPVCAWAACPPASLDAECCVCVTRPVSCCVWVQEGGGAWQGSVGGGAQVGGCGSAQQRAWEARRLLPWRLLRATPSHSLSLQGVCTMTAAFLHFFFLSSFCWVLTEAWQSYLAVIGRMRTRLVRKRFLCLGWGEQGQCWTLLLGLGLPALVVAVSVGFTRTKGYGTSSYCWLSLEGGLLYAFVGPAAVIVLVNMLIGIIVFNKLMARDGISDKSKKQRAGSERCPWASLLLPCSACGAVPSPLLSSASARNAMLVVPPGGRASLWSSCVVLPLLALTWMSAVLAMTDRRSVLFQALFAVFNSAQGFVITAVHCFLRREVGLGLSRLCVPTTPARPLASPHCADREDRGPDQGAPGPIWAALTVEADSPGYPQLSLMLILGLLGLLLPLHPAQVQDVVKCQMGVCRADESEDSPDSCKNGQLQILSDFEKDVDLACQTAQKLGTSPAWAMASGGSFSSGLTPSLPLLPPVLFKEVNTCNPSTITGTLSRLSLDEDEEPKSCLVGPEGSLSFSPLPGNILVPMAASPGLGEPPPPQEANPVYMCGEGGLRQLDLTWLRPTEPGSEGDYMVLPRRTLSLQPGGGGGGGEDAPRARPEGTPRRAAKTVAHTEGYPSFLSVDHSGLGLGPAYGSLQNPYGMTFQPPPPTPSARQVPEPGERSRTMPRTVPGSTMKMGSLERKKLRYSDLDFEKVMHTRKRHSELYHELNQKFHTFDRYRSQSTAKREKRWSVSSGGAAERSVCTDKPSPGERPSLSQHRRHQSWSTFKSMTLGSLPPKPRERLTLHRAAAWEPTEPPDGDFQTEVSHSSWRWEWGWGDTQQGLDSKTFGTDGTLDSMGKVEKQARCSGLPEALTSTPPEQVEAKEGQRLAMDNSEPRQRYPESKITTYPVHKAQAAGHRRNLEVADHRGPRELHRHMVLLEFQRGTSQDWGVHRALHQLVVHKALQGQDPHNHHQGVAHYHTALHYWGVQGSSYPEGLLVLVLQLLGSPAGRARYQSE

SEQ ID NO: 1025 - DNA, 1672 bp, Homo sapiens
  source (1)..(1672)
  CDS (201)..(1472)
catcttgcccctgctgagccctgcttcctcctctaccagcagcacaacccccaggctgggctcagagacctcatgtggtgggatcactcagtaccccgaggcggagggaaggagggagggctgcagggttccccttggcctgcaaacaggaacacagggtgtttctcagtggctgcgagaatgctgatgaaaaccccaggatgttgtgtcaccgtggtggccagctgatagtgccaatcatcccactttgccctgagcactcctgcaggggtagaagactccagaaccttctctcaggcccatggcccaagcagcccatggaacttcataacctgagctctccatctccctctctctcctcctctgttctccctccctccttctctccctcaccctcctctgctccctctgcctttaccactgtgggggggtcctctggagggccctgccaccccacctcttcctcgctggtgtctgccttcctggcaccaatcctggccctggagtttgtcctgggcctggtggggaacagtttggccctcttcatcttctgcatccacacgcggccctggacctccaacacggtgttcctggtcagcctggtggccgctgacttcctcctgatcagcaacctgcccctccgcgtggactactacctcctccatgagacctggcgctttggggctgctgcctgcaaagtcaacctcttcatgctgtccaccaaccgcacggccagcgttgtcttcctcacagccatcgcactcaaccgctacctgaaggtggtgcagccccaccacgtgctgagccgtgcttccgtgggggcagctgcccgggtggccgggggactctgggtgggcatcctgctcctcaacgggcacctgctcctgagcaccttctccggcccctcctgcctcagctacagggtgggcacgaagccctcggcctcgctccgctggcaccaggcactgtacctgctggagttcttcctgccactggcgctcatcctctttgctattgtgagcattgggctcaccatccggaaccgtggtctgggcgggcaggcaggcccgcagagggccatgcgtgtgctggccatggtggtggccgtctacaccatctgcttcttgcccagcatcatctttggcatggcttccatggtggctttctggctgtccgcctgccgatccctggacctctgcacacagctcttccatggctccctggccttcacctacctcaacagtgtcctggaccccgtgctctactgcttctctagccccaacttcctccaccagagccgggccttgctgggcctcacgcggggccggcagggcccagtgagcgacgagagctcctaccaaccctccaggcagtggcgctaccgggaggcctctaggaaggcggaggccatagggaagctgaaagtgcagggcgaggtctctctggaaaaggaaggctcctcccagggctgagggccagctgcagggctgcagcgctgtgggggtaagggctgccgcgctctggcctggagggacaaggccagcacacggtgcctcaaccaactggacaagggatggcggcagaccaggggccaggccaaagcactggcaggactcaggtgggtggcagggagagaaacccacctaggcctctcagtgtgtccaggatggca

SEQ ID NO: 1026 - protein, 423 aa, Homo sapiens
MLCHRGGQLIVPIIPLCPEHSCRGRRLQNLLSGPWPKQPMELHNLSSPSPSLSSSVLPPSFSPSPSSAPSAFTTVGGSSGGPCHPTSSSLVSAFLAPILALEFVLGLVGNSLALFIFCIHTRPWTSNTVFLVSLVAADFLLISNLPLRVDYYLLHETWRFGAAACKVNLFMLSTNRTASVVFLTAIALNRYLKVVQPHHVLSRASVGAAARVAGGLWVGILLLNGHLLLSTFSGPSCLSYRVGTKPSASLRWHQALYLLEFFLPLALILFAIVSIGLTIRNRGLGGQAGPQRAMRVLAMVVAVYTICFLPSIIFGMASMVAFWLSACRSLDLCTQLFHGSLAFTYLNSVLDPVLYCFSSPNFLHQSRALLGLTRGRQGPVSDESSYQPSRQWRYREASRKAEAIGKLKVQGEVSLEKEGSSQG

SEQ ID NO: 1027 - DNA, 6784 bp, Homo sapiens
  source (1)..(6784)
  CDS (201)..(868)
  CDS (1637)..(1864)
  CDS (6275)..(6584)
agctacgccctccccccgggtgccccggaccctgcacttgccgccgctttcctcgcgctgctctggaccttgctagccggctctgcacctcccagaagccgtgggcgcgccgctcagctgctccatcgcctcactttcccaggctcgcgcccgaagcagagccatgagaaccccagggtgcctggcgagccgctagcgccatgggccccggcgaggcgctgctggcgggtctcctggtgatggtactggccgtggcgctgctatccaacgcactggtgctgctttgttgcgcctacagcgctgagctccgcactcgagcctcaggcgtcctcctggtgaatctgtctctgggccacctgctgctggcggcgctggacatgcccttcacgctgctcggtgtgatgcgcgggcggacaccgtcggcgcccggcgcatgccaagtcattggcttcctggacaccttcctggcgtccaacgcggcgctgagcgtggcggcgctgagcgcagaccagtggctggcagtgggcttcccactgcgctacgccggacgcctgcgaccgcgctatgccggcctgctgctgggctgtgcctggggacagtcgctggccttctcaggcgctgcacttggctgctcgtggcttggctacagcagcgccttcgcgtcctgttcgctgcgcctgccgcccgagcctgagcgtccgcgcttcgcagccttcaccgccacgctccatgccgtgggcttcgtgctgccgctggcggtgctctgcctcacctcgctccaggtgcaccgggtggcacgcagacactgccagcgcatggacaccgtcaccatgaaggcgctcgcgctgctcgccgacctgcaccccaggtattggcccagtgcatgccgacaggcccaggccagggacttgggcgctccctgggcagttggcttgaggagcctgtgggcatcaccaccgttactctgcccagagttcaccagccacagcactgcccctgcacgctgctcacaggggtttcctgttggttcattggtgcagacactgcgggggcctctgcctcctgggatatgtgctcacagtgcacagggagctttgcgcagagctgtggggtgtgcttctccgggaggggttccgcgggctctgctgtgggcggccagacacacccctcctgtgcatggctgtgggtctgaggcatctgcttgtttctgcccactgctgacccagtgcccttgcatggacttgggcttcaagtcttgagcagggtccatcccccatgctttctgctcactacttggcaggatttgtctcctgaatctctagctggtgtcgccattgttccaaattacctcctgtaggtgttcccctttcccccttggccccccacagaacacccaagaggctctcctgctcctggggtgggcaggccacgtgacttctccctccttgagggccccagccttgcccctccatcagcagcctgcctcagttgcctctgtgtggagaaggatgagccagagggaagggaggaggagctggcccttctttccagacttcctttatttcacctacaaaaaagcaagcctaccccttgttctttctctctcccccatccctctgtcctcctcaggttccaggctaaacatcctcctgaaaccctcctgtctgccctcacttcagcccctgggctctgggcctgggttctgtccccaccctgccatcatcctgaccactgtcctctgtccccacagtgtgcggcagcgctgcctcatccagcagaagcggcgccgccaccgcgccaccaggaagattggcattgctattgcgaccttcctcatctgctttgccccgtatgtcatgaccaggtgggtcctggcagtccggctcctgttgtgggaacagctgggtgggcttggcctcagttgagtaggcctctgaggtttcccagcaagatatctggagggcggccaccaccagaggaccctcctccacacctgacgggctcagggctgtgcttcagctcctgggaaagatcctgggagggaggtggcactggctcccatcctgtcctataaatgaggagactctccttgtccaggcacaggcagatatggggtctgtgaatcagcacctggctctttaaacctagaaagctttcaaaatcaggcaacctgggactaactcaggcctcagactccgcatctcctgggcgtggagttgggaatctgggtggaagctccagctggagcctcggggcagtaacactgccaggtgagtgttctctttgcttctctctttcctggagaccttggcctgagtgcttgtcaggtcagaattacctggagtcacaggtaatttgggaaagagtgtgtgtaaagggcctgctggtaccatcatcacagtgctgtgctgaggggcaggggagtctgtagtttttgcctccggggttcctgggtcacccactcggccacttggttactaccttagctccactcaaggaaatgtgtgcaccctgccttgctggaaggcaccgtggttagagggaggcaggttgtttattagagatggtgactgcttgctattacgttttgcctttcttggaatctccatggaatttctggccaggcccctgaagcgctcaggctgtctgggaggtctccaccctatgtgttgagccatagcaggaggataccctgaaggaagacgctcctgggaggggtccatggccctcatcctcaaggggcccaggtccccaccccaggggagggagccagcagggagtatagtaccaggatcctggctctgtttgtgtagggtcctcctgaggttgctatctaatgccctacaaggtctgccagcctgtccaggatgactgcttgtcttcccaggttactgggtggcttagatatgttgttgggtgggtgggggggaaacagttgtgtcccaggaacccgggaggccccagagtgcccacgctgagtggcaccagctctctcctgcctgccaggttccctctgagctcttcagaatcagcacgtgggacaggagctcttggcaccactgatcccatctggcttagggacagggagccaggtttcttgtggatcacaggcatcctccttcctcacataaaacctggcaaaggcctctggttcttaggaaacttcatgggcacaagtgtggatggggaaactgtagcatccttctcccgggaaccagctatttatctgattatcatgtttgtgtgtatgtgtgcccatgtgcctgcgcatgcatgcatgtgtatgttgtgagggttcatgtgtatacacacatgcatgtgtgtattcatacatgcacatgcatgtacatatgtgtagaaggtgagtgctaaaatttcaagagctccagcatttagttttgaaattttaaatgaatgatgagtgagactggcttactcagccatattatgttgattcatgggtgtaactgttattttcctgtgtgtttacaatgccctgaacatgtatgtgagcatgcatagctatgagtgtgcacacgagtgtaagaggaagaatcccaaacaaagtcatgaagcctgcctttgcagtgttgtttccacaatgtcgttaccaactctgggatctgggcagctcaggctctcttctctgtgaaaaatgtgggtacaatatagcactaacgaggttatatatttcttcatgcactcactaagcatttaatgagcacctactctgagctgggctttgtgcctggtcatgcagttacaaaagcaaatggaacacaggctcctctcggttctgatggtgggagatgcaggtcagcaagaccaggcaggtgtttcagtgggggaggggtcttgagggctggcgcctgggagcagcacagctggaccagtttggacggacctgcctcacaggcgcctctcacatcataggagtgaaccgaatcagaacctcactcctgagtgtgtgtggatgaggttctaatgcagttggtggcttaacccacaggaagtcagagatccaggagtgtgttgtccctgctgccccttaaaaggtagtgcactcattccagttgtcctgcaattgctaaaaatatttcagagctcttctcctgggaattgttttcagaactgggctgcattgttagactcttctgtggacatctagaaggtgaatttaatctggttagaaataactccaagtcaccttgagccagttcatgcggataaagtaggtaaaggagatgggggacatgggatttttattttgtttcttggttgtcactcttgagttttactgactcaatcagtcgtgcagatgaagcccgtggggtgtgcggcagtgagaccaggagggcagggatacagagccctcccttgtggagtctgtggtctactggagacgggggagggcagatggctacggtcacaaggtgttgagcagcagtggacacgtgagcgagccctcttctctgcagggtcatggctggtagttgatacatgagttctggtcccagtgtggctccagacacagcctcagctgggtgtttctgatgacttccacctgcaccgtggcttaactaggggatagacactctggcatgtgtgtggctttcttactcacctgcagcccagtcccctagtggctgaaagaaatgccagcctcctcagatccttcgataggaccttccttcccacttgcctgatggttggctgtgaccagtctccagtctatgcctgatggtgggctccctgtatgtgggggtgacagtgtacctgatgtgcatgtgctggccggtggcaaagccctttccggactatcacttactgtaactggatcctcaccacagcctggggtaggtggttagagccatgactgccttggatctgtgtccctgccctgatttttggattctggatgcctctgctctggctgtgcccctcaccttctctctgtcgtcacattctggccctgcccctcagcttgaggtggttgcctgcctgcctgcctgccagcctcctcatccccatcccgccggactgggtgcctcggagggagggagtcagtctgatccattgctgcaccccagcagctgctgtgtttgtgggtggtccaaactaatgagtgacccagccaaacttgtaaatcacagggctgcagtccttctgagtgggggtgggacatcctgggacagaaattcactgcctgggagatcatcaggctgtgggggaaagccctggcctttgggggccctggttcaaagccaggaactgggaggtggaacagctgccactggtcagcaagtgtgcttgtgacagctgtcagaagcctcgtcctcactctgtggcccccacctaaggctgtgctgccgctggtcagaagccttgtcctgactccatggcccctaccctaggctgtgctgagagcggaggggtccgtcagagtccccagaggcccatccccctgctgctttcccccacgcagagcccagtcccttctactctgagttctaatctgatttcagaaaagcactgggctcagacacagagtgtgagactgagcctttcttatgggagttgtgtgcctggtggtcctagagacaccctcgagcttctctgagtgatgcttcgggacagtgggtagggaagcaccctgcgtggtgtgtggtgcccgtggacatcctgtgagtgactgctgttcatgtgggtgaggtggtcacacttgctcagggtctgttctgcagcccaggttgacacctgttactccagcctggttatgagcattgttctgatctgttctcaacattgtccaggtttgggagataaatgccagaggagagtctggttgggggctcccagagctcacatctggggtgtgttggtctgcagcctggtagtggtaatggctccctcggtagctggttgtgtgtgcaggtgtccgcggcagctgtacgtgcaggtgggtggactgagctgagtgtgaggatggtgggagaaggccttggtgacggtggcagtgctgccacctactgagcacctgctgtgtggtatgcgggctgatgtcggcttgcaccgcagtcccaggactgggccttgtaatcccattttaggaagaggagcccgaggctcagggtgctggtgcagagccccctggctagtgagcatcagggctgcggtatgtacttgagtatggttctagcaccttcccccggagcgtgagtgcgtggcaggtgctgtcactgtggctgagttagctgctccgcttccccaacaggctggcggagctcgtgcccttcgtcaccgtgaacgcccagtggggcatcctcagcaagtgcctgacctacagcaaggcggtggccgacccgttcacgtactctctgctccgccggccgttccgccaagtcctggccggcatggtgcaccggctgctgaagagaaccccgcgcccagcatccacccatgacagctctctggatgtggccggcatggtgcaccagctgctgaagagaaccccgcgcccagcgtccacccacaacggctctgtggacacagagaatgattcctgcctgcagcagacacactgagggcctggcagggctcatcgcccccaccttctaagaagccctgtggaaagggcactggccctgccacagagatgccactggggacccccagacaccagtggcttgactttgagctaaggctgaagtacaggaggaggaggaggagagggccggatgtgggtgtggacagcagtagtggcggaggagagctcggggctggg

SEQ ID NO: 1028 - protein, 401 aa, Homo sapiens
MGPGEALLAGLLVMVLAVALLSNALVLLCCAYSAELRTRASGVLLVNLSLGHLLLAALDMPFTLLGVMRGRTPSAPGACQVIGFLDTFLASNAALSVAALSADQWLAVGFPLRYAGRLRPRYAGLLLGCAWGQSLAFSGAALGCSWLGYSSAFASCSLRLPPEPERPRFAAFTATLHAVGFVLPLAVLCLTSLQVHRVARRHCQRMDTVTMKALALLADLHPRLNILLKPSCLPSLQPLGSGPGFCPHPAIILTTVLCPHSVRQRCLIQQKRRRHRATRKIGIAIATFLICFAPYVMTRLAELVPFVTVNAQWGILSKCLTYSKAVADPFTYSLLRRPFRQVLAGMVHRLLKRTPRPASTHDSSLDVAGMVHQLLKRTPRPASTHNGSVDTENDSCLQQTH

SEQ ID NO: 1029 - DNA, 1660 bp, Homo sapiens
  source (1)..(1660)
  CDS (201)..(1460)
cacaagtatattgtatgcagcagagaagagcttaacagccagcctccttccacattctgctctcaggaaataagcaaggggaggatccagaagtgtcatttgacactgacgacagagtacttatttcctatgcaaaagagcccaggcagaaagacaaacctaaataagaatctaacttctgtaagaagctgtgaagagtgatgctggcagctgcctttgcagactctaactccagcagcatgaatgtgtcctttgctcacctccactttgccggagggtacctgccctctgattcccaggactggagaaccatcatcccggctctcttggtggctgtctgcctggtgggcttcgtgggaaacctgtgtgtgattggcatcctccttcacaatgcttggaaaggaaagccatccatgatccactccctgattctgaatctcagcctggctgatctctccctcctgctgttttctgcacctatccgagctacggcgtactccaaaagtgtttgggatctaggctggtttgtctgcaagtcctctgactggtttatccacacatgcatggcagccaagagcctgacaatcgttgtggtggccaaagtatgcttcatgtatgcaagtgacccagccaagcaagtgagtatccacaactacaccatctggtcagtgctggtggccatctggactgtggctagcctgttacccctgccggaatggttctttagcaccatcaggcatcatgaaggtgtggaaatgtgcctcgtggatgtaccagctgtggctgaagagtttatgtcgatgtttggtaagctctacccactcctggcatttggccttccattattttttgccagcttttatttctggagagcttatgaccaatgtaaaaaacgaggaactaagactcaaaatcttagaaaccagatacgctcaaagcaagtcacagtgatgctgctgagcattgccatcatctctgctctcttgtggctccccgaatgggtagcttggctgtgggtatggcatctgaaggctgcaggcccggccccaccacaaggtttcatagccctgtctcaagtcttgatgttttccatctcttcagcaaatcctctcatttttcttgtgatgtcggaagagttcagggaaggcttgaaaggtgtatggaaatggatgataaccaaaaaacctccaactgtctcagagtctcaggaaacaccagctggcaactcagagggtcttcctgacaaggttccatctccagaatccccagcatccataccagaaaaagagaaacccagctctccctcctctggcaaagggaaaactgagaaggcagagattcccatccttcctgacgtagagcagttttggcatgagagggacacagtcccttctgtacaggacaatgaccctatcccctgggaacatgaagatcaagagacaggggaaggtgttaaatagatttaagtttcaaagcaaaacaaactgtgattattgtatttacttgtactgctgcttatcaatattgctgactttacaaactgatataattattaccattaggaattataaaaatatttcacaatctacactttccaaatgtgcaatgtggtaagtagagaaccatgttagaagtaataattgtttcagaattagaactt

SEQ ID NO: 1030 - protein, 419 aa, Homo sapiens
MLAAAFADSNSSSMNVSFAHLHFAGGYLPSDSQDWRTIIPALLVAVCLVGFVGNLCVIGILLHNAWKGKPSMIHSLILNLSLADLSLLLFSAPIRATAYSKSVWDLGWFVCKSSDWFIHTCMAAKSLTIVVVAKVCFMYASDPAKQVSIHNYTIWSVLVAIWTVASLLPLPEWFFSTIRHHEGVEMCLVDVPAVAEEFMSMFGKLYPLLAFGLPLFFASFYFWRAYDQCKKRGTKTQNLRNQIRSKQVTVMLLSIAIISALLWLPEWVAWLWVWHLKAAGPAPPQGFIALSQVLMFSISSANPLIFLVMSEEFREGLKGVWKWMITKKPPTVSESQETPAGNSEGLPDKVPSPESPASIPEKEKPSSPSSGKGKTEKAEIPILPDVEQFWHERDTVPSVQDNDPIPWEHEDQETGEGVK

SEQ ID NO: 1031 - DNA, 2071 bp, Homo sapiens
  source (1)..(2071)
  CDS (201)..(332)
  CDS (480)..(1871)
ggcatttcaaacctttaaaataaaaactaatgtcttttctatttttttcctactggcaatcacattggggtggtgggggcgtgtggtacaatctcagtcaagaggtcctctcttgtgtgggtgctggcataacactggccgtatacaatggccaagcaaagcgacattctgtcctgctgtgctttacacgtaaatagagaatggatgaggttctcagcgcccaggggtccgcggcttccgcgagggtagcgtcgggggccgctgcagagattggaagagtacccgccgggaatgggagggaagacgcggggaaggtggagaataggaatcatgtgtgttcctcgagtgtacaacccacatttgagtgacaaatcacgaggacaatcgacaaaaacaactaagcgcaaagccgcccgaatccatctccctctctgtgcgtgtgccttttcaactaactttgggaactcgtatagacccagcgtcgctccccgcgccgcctcgcctccactttggtttcccgcgtcctgcccgccctcttcggtgcctcctcttcctccgggacaaggatggaggatctctttagcccctcaattctgccgccggcgcccaacatttccgtgcccatcttgctgggctggggtctcaacctgaccttggggcaaggagcccctgcctctgggccgcccagccgccgcgtccgcctggtgttcctgggggtcatcctggtggtggcggtggcaggcaacaccacagtgctgtgccgcctgtgcggcggcggcgggccctgggcgggccccaagcgtcgcaagatggacttcctgctggtgcagctggccctggcggacctgtacgcgtgcgggggcacggcgctgtcacagctggcctgggaactgctgggcgagccccgcgcggccacgggggacctggcgtgccgcttcctgcagctgctgcaggcatccgggcggggcgcctcggcccacctcgtggtgctcatcgccctcgagcgccggcgcgcggtgcgtcttccgcacggccggccgctgcccgcgcgtgccctcgccgccctgggctggctgctggcactgctgctggcgctgcccccggccttcgtggtgcgcggggactccccctcgccgctgccgccgccgccgccgccaacgtccctgcagccaggcgcgcccccggccgcccgcgcctggccgggggagcgtcgctgccacgggatcttcgcgcccctgccgcgctggcacctgcaggtctacgcgttctacgaggccgtcgcgggcttcgtcgcgcctgttacggtcctgggcgtcgcttgcggccacctactctccgtctggtggcggcaccggccgcaggcccccgcggctgcagcgccctggtcggcgagcccaggtcgagcccctgcgcccagcgcgctgccccgcgccaaggtgcagagcctgaagatgagcctgctgctggcgctgctgttcgtgggctgcgagctgccctactttgccgcccggctggcggccgcgtggtcgtccgggcccgcgggagactgggagggagagggcctgtcggcggcgctgcgcgtggtggcgatggccaacagcgctctcaatcccttcgtctacctcttcttccaggcgggcgactgccggctccggcgacagctgcggaagcggctgggctctctgtgctgcgcgccgcagggaggcgcggaggacgaggaggggccccggggccaccaggcgctctaccgccaacgctggccccaccctcattatcaccatgctcggcgggaaccgctggacgagggcggcttgcgcccaccccctccgcgccccagacccctgccttgctcctgcgaaagtgccttctaggtgcttggtggtcagagacgggtcatctgtcgctaaggcgcaacctccagggaactcgaggcctgccagggtctgtccagatcacaaggggcaggagagtctgtgagagagtgacactgaagttgtccccttcctccactctcctattcccttctcatgtttacatttccctatgctcttccagtttctcttcttcccta

SEQ ID NO: 1032 - protein, 507 aa, Homo sapiens
MDEVLSAQGSAASARVASGAAAEIGRVPAGNGREDAGKVENRNHRRSPRRLASTLVSRVLPALFGASSSSGTRMEDLFSPSILPPAPNISVPILLGWGLNLTLGQGAPASGPPSRRVRLVFLGVILVVAVAGNTTVLCRLCGGGGPWAGPKRRKMDFLLVQLALADLYACGGTALSQLAWELLGEPRAATGDLACRFLQLLQASGRGASAHLVVLIALERRRAVRLPHGRPLPARALAALGWLLALLLALPPAFVVRGDSPSPLPPPPPPTSLQPGAPPAARAWPGERRCHGIFAPLPRWHLQVYAFYEAVAGFVAPVTVLGVACGHLLSVWWRHRPQAPAAAAPWSASPGRAPAPSALPRAKVQSLKMSLLLALLFVGCELPYFAARLAAAWSSGPAGDWEGEGLSAALRVVAMANSALNPFVYLFFQAGDCRLRRQLRKRLGSLCCAPQGGAEDEEGPRGHQALYRQRWPHPHYHHARREPLDEGGLRPPPPRPRPLPCSCESAF

SEQ ID NO: 1033 - DNA, 1939 bp, Homo sapiens
  source (1)..(1939)
  CDS (201)..(1739)
atctcggagaggaggaaatgcacatcacatgtgtgcagctgaaattgcaggattctttctcattcatcctgaagcctcagtgcatttacagatgctctggggtgatcaccctgggacttacatgattctgctgacccaagattttgcccaaagcttctactgtacagatgaactgagctaaatttgattgatgagttttaatgtggttcgtgactgagccaattctctgggcatttttcctattcttaatgctaatgactatccactgctggtcctcttatctgtttactcaaaaacacaaactgactctcatccttgtgtttcaggatgtcatcagtatagctgacaatatccttaattcagcctcagtaaccaactggacagtcttactgcgggaagaaaagtatgccagctcacggttactagagacattagaaaacatcagcactctggtgcctccgacagctcttcctctgaatttttctcggaaattcattgactggaaagggattccagtgaacaaaagccaactcaaaaggggttacagctatcagattaaaatgtgtccccaaaatacatctattcccatcagaggccgtgtgttaattgggtcagaccaattccagagatcccttccagaaactattatcagcatggcctcgttgactctggggaacattctacccgtttccaaaaatggaaatgctcaggtcaatggacctgtgatatccacggttattcaaaactattccataaatgaagttttcctatttttttccaagatagagtcaaacctgagccagcctcattgtgtgttttgggatttcagtcatttgcagtggaacgatgcaggctgccacctagtgaatgaaactcaagacatcgtgacgtgccaatgtactcacttgacctccttctccatattgatgtcaccttttgtcccctctacaatcttccccgttgtaaaatggatcacctatgtgggactgggtatctccattggaagtctcattttatgcctgatcatcgaggctttgttttggaagcagattaaaaaaagccaaacctctcacacacgtcgtatttgcatggtgaacatagccctgtccctcttgattgctgatgtctggtttattgttggtgccacagtggacaccacggtgaacccttctggagtctgcacagctgctgtgttctttacacacttcttctacctctctttgttcttctggatgctcatgcttggcatcctgctggcttaccggatcatcctcgtgttccatcacatggcccagcatttgatgatggctgttggattttgcctgggttatgggtgccctctcattatatctgtcattaccattgctgtcacgcaacctagcaatacctacaaaaggaaagatgtgtgttggcttaactggtccaatggaagcaaaccactcctggcttttgttgtccctgcactggctattgtggctgtgaacttcgttgtggtgctgctagttctcacaaagctctggaggccgactgttggggaaagactgagtcgggatgacaaggccaccatcatccgcgtggggaagagcctcctcattctgacccctctgctagggctcacctggggctttggaataggaacaatagtggacagccagaatctggcttggcatgttatttttgctttactcaatgcattccaggtgagaacagtaacaataacctattgtattgtcaagtgattggaataagtagagaactcaggcaggtaaaaccactctggagattatctcatctccctgcctccagcaagaccatcagaaaaactgcatggaaacaataaatagaaaaaaatatttttcttacttagttactatcatactgaagcagaatattggatttcttcagtaacccactacagggctttaaatctattagagtt

SEQ ID NO: 1034 - protein, 512 aa, Homo sapiens
MWFVTEPILWAFFLFLMLMTIHCWSSYLFTQKHKLTLILVFQDVISIADNILNSASVTNWTVLLREEKYASSRLLETLENISTLVPPTALPLNFSRKFIDWKGIPVNKSQLKRGYSYQIKMCPQNTSIPIRGRVLIGSDQFQRSLPETIISMASLTLGNILPVSKNGNAQVNGPVISTVIQNYSINEVFLFFSKIESNLSQPHCVFWDFSHLQWNDAGCHLVNETQDIVTCQCTHLTSFSILMSPFVPSTIFPVVKWITYVGLGISIGSLILCLIIEALFWKQIKKSQTSHTRRICMVNIALSLLIADVWFIVGATVDTTVNPSGVCTAAVFFTHFFYLSLFFWMLMLGILLAYRIILVFHHMAQHLMMAVGFCLGYGCPLIISVITIAVTQPSNTYKRKDVCWLNWSNGSKPLLAFVVPALAIVAVNFVVVLLVLTKLWRPTVGERLSRDDKATIIRVGKSLLILTPLLGLTWGFGIGTIVDSQNLAWHVIFALLNAFQVRTVTITYCIVK

SEQ ID NO: 1035 - DNA, 1651 bp, Homo sapiens
  source (1)..(1651)
  CDS (201)..(1451)
cagtactaacactggttcttcattggcagagttacagcaccatagccaaccacattcttaacagcaaaagcatctccaactggactttcattcctgacagaaacagcagctatatcctgctacattcagtcaactcctttgcaagaaggctattcatagataaacatcctgttgacatatcagatgtcttcattcatactatgggcaccaccatatctggagataacattggaaaaaatttcactttttctatgagaattaatgataccagcaatgaagtcactgggagagtgttgatcagcagagatgaacttcggaaggtgccttccccttctcaggtcatcagcattgcatttccaactattggggctattttggaagccagtcttttggaaaatgttactgtaaatgggcttgtcctgtctgccattttgcccaaggaacttaaaagaatctcactgatttttgaaaagatcagcaagtcagaggagaggaggacacagtgtgttggctggcactctgtggagaacagatgggaccagcaggcctgcaaaatgattcaagaaaactcccagcaagctgtttgcaaatgtaggccaagcaaattgtttacctctttctcaattcttatgtcacctcacatcttagagagtctgattctgacttacatcacatatgtaggcctgggcatttctatttgcagcctgatcctttgcttgtccattgaggtcctagtctggagccaagtgacaaagacagagatcacctatttacgccatgtgtgcattgttaacattgcagccactttgctgatggcagatgtgtggttcattgtggcttcctttcttagtggcccaataacacaccacaagggatgtgtggcagccacattttttgttcatttcttttacctttctgtatttttctggatgcttgccaaggcactccttatcctctatggaatcatgattgttttccataccttgcccaagtcagtcctggtggcatctctgttttcagtgggctatggatgccctttggccattgctgccatcactgttgctgccactgaacctggcaaaggctatctacgacctgagatctgctggctcaactgggacatgaccaaagccctcctggccttcgtgatcccagctttggccatcgtggtagtaaacctgatcacagtcacactggtgattgtcaagacccagcgagctgccattggcaattccatgttccaggaagtgagagccattgtgagaatcagcaagaacatcgccatcctcacaccacttctgggactgacctggggatttggagtagccactgtcatcgatgacagatccctggccttccacattatcttctccctgctcaatgcattccaggtaagtccagatgcttctgaccaagtgcaaagtgagagaattcatgaagatgttctgtgattaggtgcttgtgacattagatttctacataaaagccaatggatttggaatagcatatggagtggggaaataaacttttgttccagagatacctggatttggatcctgactctttcatttactaataatgtataacatgatcttgggatatttactcaacttttttcaagccatattttcctcacatataaaatgagtgc

SEQ ID NO: 1036 - protein, 416 aa, Homo sapiens
MGTTISGDNIGKNFTFSMRINDTSNEVTGRVLISRDELRKVPSPSQVISIAFPTIGAILEASLLENVTVNGLVLSAILPKELKRISLIFEKISKSEERRTQCVGWHSVENRWDQQACKMIQENSQQAVCKCRPSKLFTSFSILMSPHILESLILTYITYVGLGISICSLILCLSIEVLVWSQVTKTEITYLRHVCIVNIAATLLMADVWFIVASFLSGPITHHKGCVAATFFVHFFYLSVFFWMLAKALLILYGIMIVFHTLPKSVLVASLFSVGYGCPLAIAAITVAATEPGKGYLRPEICWLNWDMTKALLAFVIPALAIVVVNLITVTLVIVKTQRAAIGNSMFQEVRAIVRISKNIAILTPLLGLTWGFGVATVIDDRSLAFHIIFSLLNAFQVSPDASDQVQSERIHEDVL

SEQ ID NO: 1037 - DNA, 1591 bp, Homo sapiens
  source (1)..(1591)
  CDS (201)..(1391)
acacagcagccatttcaaactgggctttcattcccaacaaaaatgccagctcggatttgttgcagtcagtgaatttgtttgccagacaactccacatccacaataattctgagaacattgtgaatgaactcttcattcagacaaaagggtttcacatcaaccataatacctcagagaaaagcctcaatttctccatgagcatgaacaataccacagaagatatcttaggaatggtacagattcccaggcaagagctaaggaagctgtggccaaatgcatcccaagccattagcatagctttcccaaccttgggggctatcctgagagaagcccacttgcaaaatgtgagtcttcccagacaggtaaatggtctggtgctatcagtggttttaccagaaaggttgcaagaaatcatactcaccttcgaaaagatcaataaaacccgcaatgccagagcccagtgtgttggctggcactccaagaaaaggagatgggatgagaaagcgtgccaaatgatgttggatatcaggaacgaagtgaaatgccgctgtaactacaccagtgtggtgatgtctttttccattctcatgtcctccaaatcgatgaccgacaaagttctggactacatcacctgcattgggctcagcgtctcaatcctaagcttggttctttgcctgatcattgaagccacagtgtggtcccgggtggttgtgacggagatatcatacatgcgtcacgtgtgcatcgtgaatatagcagtgtcccttctgactgccaatgtgtggtttatcataggctctcactttaacattaaggcccaggactacaacatgtgtgttgcagtgacatttttcagccactttttctacctctctctgtttttctggatgctcttcaaagcattgctcatcatttatggaatattggtcattttccgtaggatgatgaagtcccgaatgatggtcattggctttgccattggctatgggtgcccattgatcattgctgtcactacagttgctatcacagagccagagaaaggctacatgagacctgaggcctgttggcttaactgggacaataccaaagcccttttagcatttgccatcccggcgttcgtcattgtggctgtaaatctgattgtggttttggttgttgctgtcaacactcagaggccctctattggcagttccaagtctcaggatgtggtcataattatgaggatcagcaaaaatgttgccatcctcactccactgctgggactgacctggggttttggaatagccactctcatagaaggcacttccttgacgttccatataatttttgccttgctcaatgctttccaggtaagttccaagagggagacttttctgtgttactccgactagaccacaaaaaaatggctatgatttgaaattatataacacaaaatgttctctccacttccttttacatcttagggttatttggctatggcatctgtgactgtattgattgtcaagttgaatttagctgaccagggtggttgggtggaaatctccttccttctttcctcactgatgcacctgtatccctactaaagtttcaa

SEQ ID NO: 1038 - protein, 396 aa, Homo sapiens
MNNTTEDILGMVQIPRQELRKLWPNASQAISIAFPTLGAILREAHLQNVSLPRQVNGLVLSVVLPERLQEIILTFEKINKTRNARAQCVGWHSKKRRWDEKACQMMLDIRNEVKCRCNYTSVVMSFSILMSSKSMTDKVLDYITCIGLSVSILSLVLCLIIEATVWSRVVVTEISYMRHVCIVNIAVSLLTANVWFIIGSHFNIKAQDYNMCVAVTFFSHFFYLSLFFWMLFKALLIIYGILVIFRRMMKSRMMVIGFAIGYGCPLIIAVTTVAITEPEKGYMRPEACWLNWDNTKALLAFAIPAFVIVAVNLIVVLVVAVNTQRPSIGSSKSQDVVIIMRISKNVAILTPLLGLTWGFGIATLIEGTSLTFHIIFALLNAFQVSSKRETFLCYSD

SEQ ID NO: 1039 - DNA, 21003 bp, Homo sapiens
  source (1)..(21003)
  CDS (201)..(294)
  CDS (2900)..(3092)
  CDS (7043)..(7163)
  CDS (11679)..(12938)
  CDS (19535)..(19631)
  CDS (20610)..(20803)
aattcctcttcacacatgtgctgtgccggcagctccctgtttctcctgacagagccacctctcctctcattctcacccaggacatgaccggttcattaaagcacctcctctctatttccaggcaaaatccccacctgacctggtgcagggatttgatgctttagcctctaattcccccgcatcttcacagcttcttcaagatggggggctatgaatgcgagggctctgtccctatctccaagatgacaaatccgtgggcgtttctggcactggaaactcagcctcctcagacatgtgagtggggatgtcaacctgtgtctgggggataaggacacccatctgtcatttgtggtttctgtgtggtccttcctgattatgcaaaccctttcctttccattgttcctcttctattgtccccctaaaggacatccggtgtcccttcatgataagaaactgaatgagacaaatagaaaatgctcttccccctcctcctccctctccccctctctctttgcctctctctgtttctatgtgtgtctcctgtgtgagtgtgtgtgtctgcccctctctctctccccaaccctgctccctccagagctgataactagctctttggcttttagctagactacgtcagaagctttgtctattatgtgtcatcccctctcttggggaaagcagtcacttttagtttttttccatgtttatggaattttttagagtagacttgccctttctgcctggtctgctttctctggaagcccacaccagtccttggccaccagcagcccactatggagttccctggtgggccctggatcgtgcattcccctcagggccctcctctgcccatggaacatttggctgtgggacagctggcccagaggttgagcaggtgacttctcatcaggccctgtcccgcccctcatgcccacccatccactctgccctagggctcctgggagggctggcactgatgcctgcaggagggaggagggaggttgtgctcacgcttcatttgctcacatcactcactctgggagccacgccaggcgagagcaggggggccccaccagccccagagggcacctctctcagggccaatctatgatgtttctccattctcttcctcctgtcctggaggagggacgtgctcgctgggggaagcagagggcacatgtgggaaagggccagggggctgccatgcctttttctcatgacatccttctaacagccttggaaaggcaagatggcaccagctttgcataccatagcacatgtccccctaaatgacgtgtgtgagcattgcccttcttctcgaggaatagtctgggtttttctaacactcagagttgcctttgcttccaacatctttttgggaaactctgacttgactgacacataatgggcaggcatctgccacacccagccatgtggagctcagaccactcctcactccattctcatcagggcactattctgtggtgtatatatctctggtcaatttatgtattaatttgccacttggtgcataatatgcagcactgagataaaaacaaataagccattcctatgaggaattgatttcccttccacatctgttcatgaagatataaatctaaagttttggtactttaaaagcctccaaatgcaaatataatctaaaactactaggctttgaaattgggcttctatgtcaaaaaatgtttatagacccgatccctggagtctgactgctcatcttctgcctccacgccctgaaggcattgatcacctcttgaggtcctttccgattcattgcaacaagacagaatggtgctgtgtgcctcttgtgtactgtcagctctgtacgcacccttaggagagctgcaagaaccaccaaggcatggaccctgcccccagacaggcaagacagcagagaacataaactacacatgaacagccatcatgtaaggcagaaagtggtcattgccctaaagatgaagtgacatgggaacgcagaggatagagacttgactttcttttgaaggatcaagtctttggagaaagtagaattcaggtggagccatgaaggatggatgggatttgaccaaaggaaataagggagcagagcattctaggagagacagcaggagctgaggccagaggtgcgcaaaggtgggcagagcttaaaccaggagaaagagttcggtgtggctgcagcacaggacacacatcaccatggaggtgaatgaatgttgtgggcatcaccctgatttccttatatctagatggcattttgcaatttcctatgttcttttatgtgcactatcacatttgattttcacaacaatcgtataagtaggcactagcagggattatcatacagttgagaaaactaagactcggcaagttaaggtgctctgccttaggggacgaaggagaatagcagaagaccaggatgagaactcagattttccaacaccctgaccaggacctttcccctaaaccatgcagtggcagggaggctgcgagagagcctaccccacagttattcccatactgtgtgtttgtgggtttttttgttggcttgctttcaggtttattcattgattgttcctgtgtaaaggcaccatgtggtggccattcctggatgctatggtgtgggtccttgtattcacaatagggagacttggggaacagtctctttccagaagttagctctgtaagtcttggatgtggcatcaaaggcacaaagccggcagcattgtgtcaccatgcagagcactgtgtggggtttgctgaccttgtcccctggtagtcaccctacaccaggatgatggagaggatgttggtcctgcagacagcaatgagtaactccttgggccactcaacacccagactgacgttatcattgcagtcccttatggtgacaatcactttgaacctgatccgccggccagccttgggctgcttttgcacaaacatgagcttcagaaccttgtccttgaggggcacccccaggaggaagtcagtgacctcaaactccttgatggacagagagaagagatagaccttcagggatttgatcttcatgtccttgacctggcaaggtgacttggtgatggagcaccactccttgtcttagatttgtgtccacaagatctggagtctcagtcttgatgctgaccatagccaagaacccagccacagctgagctgccagagcctccccattccagggccctaaggttctctggcatcatcagaaaactgtttgtgcatttttgtatcacaaaactgccatgcttggaattaattctgtgagcccacttcccttaggaaccccccctgagagtgcctgaaagatgggggattagacatctgagctattaggtactgggtaggctcatcagctttgtttgctatcccgtttggcaaatgagccagaaaccagagcatcactgagtgcattggaggtgagagctttcagaacggagaaggaagtgactcgaggtggctttgcaattgggtccttgaaaaatggcacctgctgggcaaagccgcacattcacttgaggccaggtctagaggtcagaccagaacaacagagggaaattccgagcttccctcaaccataggccggttttaaattctgacgcgttgccacatcacaagtcagatgggactgagggaaatgacctgagacgagaatgaaatcttctgggctgtcagcctgtggaggggtaggagacacctgcaggctcagtcctagatggctgcacctccagctagatcccaggtgtgactcgtaaggtccaaggtggctggagatgaccactgagcccatacccagagaacaaaggcatggtggtgctgactgttaagaggagttggcccagaaacattcagattttccattttctgtttgttttcttttatttaggagaggggaatgagtgagttatcaaattccctttatgtggaaccaggggagctaattttgtctaacctgagtgtggtaagtgaaagggagacccagaaggctcagagacaagggtcagcctgttgccttgggatcctgcctgccctagaactcctccttccttacctgggggggactctgaggcagctttactcagtgctggtgctaatccttgtccctgaaagccagcagcagcttccccactcctggctccagggccattcttttcagagaaaattcgggtgcttggctggcctcttctcctccccatgaaggtctgaggggcaatgaggggaacagttgggacagtttctgggaagcaggctccttgggccagtcaacatgttagtctgaggaaacctcttatttcagacaagggttaaagttggtttcatttctcattttggtctcagtaggtttctcagtcatgccggaggtgctgaaaggtgacagtgagaaggcctcgtgtgacacttctttttcatttgatttccaaatgtgtgaaatttggtacttttcctctttacccacaagagctttaattctgtgaaggggcagtgtgggctctgtcataacacctcttccccagctccccacctttcctccagagaaaaaggcagacaagtggggaaagctggggctagatggacaaaaacaaatgaatctactctcctggcccagaagccacggccgcacagatccagaatcgtttttctgaccctgtgatccattgagtaaggtgaagggagtaggaaaggaggagatgggcccagagtgaggaacctcatttacttaattgcccttacatagaggaaaccttcagcagcccctctgcctggactaactggccctgcccccagataagctcagggacatatgccactgggcttgtctgggtgggctgactgcaatgacaaacagccccaaatcttgatggcctaacatactacaatctaacatgggttggcaggaggctctgctccacacagtcattcatggacccaggccccttctgtcttgaggttccatcatcccttggggctttggcattctccactgaccatgtgtgtccaacatggtagatggaggaagagagggtgtgaaaggtcttatgggcccatcctggaggtggcctgtgttacttttctccacattaccttggccaccctaaacatcaagggaacctgggaatgtagtcttgatgtcttataggttgagttgtcactcaccagcaaaagatatcttgaaatcctaatttccagtacctcagaatgtgaccttatttggaaatatggtctttacagaataatcgagttaaaatgagatcgttaggtgggctctaatctgactgacatttttatacaaaagagaaatgtgggtgcagagggaagaccatgtgaagacaggcagaaggccacccacaagtccagggatgtctgaggctaccagaagctgggacagaggcaggcagagtctccctcatggttctcagatggaaccaactttgccaacactttgattccagacttctggcctccagaacgatgagacaacaaatttctgttgcttaagccacccagtttgtggaactttgttatggctgccccaggaaactaaaatacactatatgctcagatttgaggagcatccagccagctgtgctgtgcaatctccttgtctgaaagaaagagaataggtggctcttagcgcaatagctaccatcttcgctgataggtactttctggttctatgattcttgccaagcctctccacccatgactccctccctcccctgggttttctctcaccttctccccacttctgacactaatccctcctgggagagagcaagggagcccagtcatttctggctagagtccccatgtggagaagagagaggaactttgccgttctcatctcattttttttctcttctttggtccagagttgtacaaacccttccggcaccttcctaaatgaccttgagcaaaacccctgactcttgtgagacttagtttccctcccagtaaagtgggtgtgatcccactgagttctttctcaacagaaaaaccagttataaaaatgatgctataacacttcagaaaaacagcgtgctgcatccgcccacgagagcagtaatcactgtagctcaagaggttgtaaattctccacagctgactgttgggagctggacaggacccagcacctggtaaccttggctggcttggtaaatggggggcagtgatggtctaccacagaggaagggaccctttgccctggcagacctcctccccatctagacttgggggatctgactgtagccacctgagccaggaagtgatgttctgcaccagagcccctgggcattagcagctgtacttgctgcctggatgagacctggcacagctggtgcacccgcagcagggaagatagagggctgtggggaataacagtggtgttaacattgccatttactaggacttatttgtgccaggttctgggcaagtgctgcttctgatagtcagactatcctgcaaggtgataaatgtgggatggggagttagtgtgtgggtctgtgggggtttgcatccaggctctcctgggctgtctcaatacctaagtgcactggggatcagcatcctcatttgtaaaattggggtaaaaaatgggccgggcgcggtggctcacacctgtaattccaggtgtgggaggccaaggcaggcagatcatgaggtcaggagttcgagaccagctcagccaacatgatgaaaccccatctctactaaaaatacaaaaattagttgggcgtggtgacgggagcctgtaatcccagctacttgggaggctgaggcaggagaatcacttgaacctgggaggcggaggttgcagtgagccaagatcatgccattgtactttagcctgggtgacaagagcaagactccatctaaaaaaaaaaaaaatcccactctacaactcagggttgctcccagggcagggtctgagaagagaagcaggaggtggaggggtagagcccttacctaaagaggcatcctctcgtgatacccccctttgcccccaggacttgctggcagccaggttctcctggcagaaagtggattcctggcccactgctgaggtctctgccttctctcagcagcagatcttcagactgtctggcaagggccagcctgagggcgatggtgagcattagatgaaataacacatatacagctcctaaaacagtgcctggctcaaggcaaatgctcggtaaatattggttcttattactggacccattttataccaaggtttagtgctattaaggatacagagtaagtgactgagatggatttgactgtcagactctaaaaatctgtgtttaggtatgtgtatgcatgtgtgtttatatcaggttgaaaaaaatgctggctctttccttatttcatcactcagaagatgaatgtggtcttgaactttgggaagtaaatgagtttcttagggacatggagcttggaaagaaacctgaactatgcgtgcaagagatacctgtcctggccgggctcagtgactcatgcctgtaatcccagtactttgggaggctgaggtgggtggatcacttgaggcgaggagtttgagatcagcctggccaacatggtgaaaccctgtctctactaaaaatacaaacattagctgggcatggtggcataagcttgtaatcctagctgcttgggaagctgaggcacgagaatcacttgaacccgggaggcggacgttgcaaggagctgaaattgcgccactgcactccagactgggtgacagaccgagactctgtctcaaaaaaaaaattaaaaaaaagaagagacacctgtcttttctagcaattccctttccttccctctcctcctctccactctacaacctccctctcttttcctgcctctctctccctcctgcctcctctcaagtgaaagatctgtcctgggccgggcgcggtggctcacgcctgtaatcccagcactttgggaggctgaggcgggaggatcacaaggtcaggagttcgagaccagccaggccaacatggcaaaatcccatctctactaaaaatacaaaaattagctgggcgtggtggcaggtgcctgtaatcccagctactggggaggctgaggcaggagaatcacttgaacccaggaggcgaggttgcagtgtcgccactgcactccagccctggtgacaatatgagactctgtctcaaaaaaaaaaaaaaaaaatctgtcctgtccactgacctggtcttcctgctagggacaaggttttcctgttgaagacaaaagagggccgggtggcctgctctcaggtctgcctccttggcgaatgggccttacagcaccttttcctcaggagcacacatcagttgctcccattcctatttctgaagacaatctcaataccacattttcttagtggaagctgagggcaccccacgctagggtcactggagaagccttgggcctaagggtaaggagcaggacccggagctctgggctgtagagcgaggtgctcccggacaggctggctgagctgcagcctgcatcctctgtgctgccacaaattcagctgcctattgggggtgtcggcaccagctctcagggcaggtggacctgggatgaatgccctgtttgcttttatgggcaactcacttttcatacctgagcctcggtctcctcatccataaaattggcacaataacacttgtgcataatactggatgagatcagggtacaccaagcattcagcagctcctggcccaataagtagtagctattgtctttgttttcaagggtttttgcttgtttgtttgtttgagatggagtcttgctctgtcacccaggctggagagcagtggcatgatctctgctccctgcaacctccgtctcctgggttcaagcgattctcctgtctcagcctcccgagtagctgggattacaggtgttaacagtttaccaaacagtatgccatccattcaaatctctgctcttagggagctcatcctttcctctgctctaaggagcctgagtgagaggccctggtaacagcaaggggaaagaaggaaactgtattcccgagtccatactctgtcctagcatcacagcaaactcagaggtttttggacccccagatgttaagaggagggacaggccctgagcttcctaaataccctcatatgcccactgtcttcagctgggctctcccagaagcagatcctgagataaggatttaaggacaaattatttatttatttttcatttattttattttttgagacggagtttcactcttgttgcccaggctggagtgcaatggcatgatcttggctcactgcaacctccacctcccaggttcaagcgattctcctgcctcagcctcccgagtagctgggattacaggcatggaccaccacgcccggctaattttgtatttttagtagagatggggtttctccatgttggtcaggctggtctcgaactcccaacttcaggtgatccgcccaccttggcctcccaaagtgctgagattacagacggtgagccaccatgcccagccaaattgtttatgtgaggtgtgaccccggaagcactggtaccctactgtgggaaagtgggacaagtgaggaaatgaagccaacacagggtgcattactgagcaggtaactgctgtgggaagctgggctccatcgcacaggggacctctgggagactgtggtacacacctctggatggggtatttatccatccactcctgtccatccatggttgacagctgctcttaggggtacctaccctgcactggctgaatgcaaaaatgttctccaagtcagagaaagccccctggcagagaaaacatggccttataagtactgggggcatttgcttaccataatagtgcttacacaattataaatgactccaataattatttaatgtttccctcctgtattagaatataatctctctgaagatagggacagcatcaccaattgtatccccaggacctagaatggtgtctggcacatggtaggttttcgatagatacttgctgaatcaatgtaatctggaggctgacaaattcatgataaagaccccagttctgtctgaatagcttctctatctcttcctttctcctctctccaccctaaacttgatatagcagtgcctaaaactcacttccagtatcttttttaaaatttgccttcttctagagtataaaagcccagtatttaaccttgcccatggttgcctggaatagagggtgcttttcccaccctcctttgcagctagcagtgcctatgtgactaagttctgagcaagaggtgtggaattgatggctgccactttcaagatgtgtctttatgggtggaggtgcacccatctccttcccattcctccttcctgctggttggaatttggatatcgtggctggagcagccaccttggatcatgaggtggaaatcttggaccaaaggatggtggaagctagaagacccaggcaccctgatgatcagggagcagccactccaaccttgggctgaacctctggccttgctttacatgagagagcccttggttatgccattgttgtttggggtgggattttctgtcactcccaggtgaacaacctaatcctaagtgatacctagaaggtccctgctagactgacctcttgggaggggagggaataaacgagtctcaggtggtggaaccagagcttgctggagaggagagtctctcctggtgaatggaagccaggggcccctcccactggctgtctccttccctgggctcaggcaggtccagccttcctcaggactttgagaagttcagttctctccccaggagtagctactttcacaaacttcctgtccctttagtcgacatgccccacggcaggtccgaggctgggctctgccacaactcatctttcctaagagtggcatcaaggttctttggtgggggatcctcttttcccatccccacttctcaagagcattagggaagatacagtcagtgccctcttagcattctctttccacttgttgggtgtaagaagggaacctgagggccctgcagtgtttaggggtgggagtggaaacagacaggaaagatccagagtccccaagaagcgaagcagggagagagataaagaaggcaggaacaaccatggacacacattatcacacatacacaggttacaagagcaggaggctggagctgcaagaggtggcagggaagcttccagaaaggcagaccccagcctcatccctccctgccctgcaatgctgaagtttccaggtagaggggaacctctagacccttgcgactgtcagagttctgtggatccatttgtcagtctccccacccccaaccttgactatcctgggcctgccttcaggacagaacatgggaatgagaagaggacctgggaaggggtaatcctgggaaaaaaaagttcttattagtcacccctggctctgaggatactttccaggagtggcctgccaagccgtgtgaccttggacaagtcccgtccattcctcaggcctcagtttcctttgagggaccctgaatgggcgggggttgctgtagctttcctcagctgggagacccgggaggaggtccggggtgccagggtgggaggagggcctggcttgtcgctgaaagccggccaggcgcactgtcggcgctcagagctggtggccgcctcctgcgcttcctgattcccagccgcgctcgctcggagagcagtgcccgctatctcctggcccgggaccggcagaggggtgcggcggggcgggcccaggggtctctggcggccggaagaaccgggaccctgccaggcccctcccgcgggcagggcggcccctcgccggctcctcccccaccgcccgccaccagcccgggatcagtctccgcacgcggttccgcaggtggcagcgatggcccagtcctgaactccccgccatggccggcgcccccggcccgctgcgccttgcgctgctgctgctcgggatggtgggcagggccggcccccgcccccaggtgagatccagggaccccgacgacaccgggggaggcgggtggctctgcgggctgcaggcgcagtgtcctggtggagggccccgggacttgaacgaaactccgagaccgctggcgggggcatccgaaagcctcggggggagtagggactggagacttggtgcccctgggctggaaggcccaggtgagggcttggactacagaggattccccccaaccccagcgaggcgccctcttcctcgccacccgggtccctctgcccgggcacccgctgccccgcggccgccctgcgctgacttctgctccgcttctcctttgtccccagcactttcccaactccttctaaaccgtgtcagcggccctggcacagcccggcatcctcccggactccctctgccccacagtctgacccagacccctctcccgcagtgcctccccagacaatccacctgctcaaagaccctgagaagaccctgggaggagctgagagggccagggtgcggagacccggctcctctccctttctcatcagcccccagcacagcctttgattcatggctcctggggccctgcggtggcagcttgtccttcccagtgacctcccagatggaacctaccccccgtcccctaccagcctctgtagcaaacaggcagaaggctcagtgcccccctggaagcagccaggcgcccccactcacccactctgctgacctcccattctcatcctgcactgacagcaggccccaagagaaggcatactgggacacgcaagaacacctgggctccttggtgccaccagagagcaggccacaggtggaccaccgcagcccctctctcttgcccttgttgcttttcctgccctgggatcctgggctagggacagtggtcagctgcttttgaagaggggagctgtccaaagatgctgggacttgcttgagcagagaggagacatagacttgggtggcctgtcctgggtcaggaaacaggttcttcctatcacctcccactgctacccccagacctaaagaactgagatctgtggggagtggacctgaacgaaccttgaagtttgtcccagaaccattgccttggtgagggcagactccacctcggcggaaaccccagatgtggacagacatacctctcagctaagatgccagcacatttttcagcccccagattattttccagacgcatcctctccctgcccctgttccccagcccagctgctgtcctgagccccaggagacaacctcccccttccaagacaccttcctcacagcgcccccagccaggccttggttttcctggtgcggctgggatctttcaggggccagggctgcagacccaagatgtggttcttgcccatcgttccctcctcttacggactgggttgggataggggtggaggctctgcttcctggttccatcctcctccaggccaggtttacaggtctggtttgaatgaagggaagaaagcaaagggaagaggaaagtttctgtgagctgtcttcccagaggccttattcccagaagtgtcaggctcctgaacccacactttcctctgatccgattttactccttagccccaggcctaaggcaaaagctgggcatcctgggggcataacaggattggggtggtagagaaggataggaggggacaggtcctagcagggaggggagctttgagggggtgctcttgtcatgggaaactgagctgccacagagatctgagtcacaggaggtgttaaggatagattgcaacaattatgacacaacatcatgcgtgcttataagactaaaaaatagtgtattttgcattttgttttctgtctatgaagtcaaaagggttagagttactcccctcatgttgctgatgggggaatgaaagctcagaaaaagagggtcccctgtataaagtagcccagcagttcaggagcagggaagagaaaggggtgaagggctgggctcttgacctaacacctcctactcagacgggactgaagggagacctctgagagtgagctgctcactgtcaggtctcgtgaggctggaaacagcatccctgcaggtagggggatggctgagttgacttctgaagaaggtgccctaggctactctttcattgctgctgggaaggctcattcccctaccctggtccttacctctccaataccctggtgagggagcgggcctactgaggagacaggcaagcctttgacactcaaagttaaaatcagacacaactggattcaaatatagggtctgctattagctggtgatctggagttggacacttggttatccccaatacatgtccttatctgtaaataaggatcataagctctatcacatagggttatggaggggattgagacactggcccctgaaatggcaactttagtcactttagtcaaatggcagaactgacccatttgtccttggggatccagaagtgttttccagggctgcaggatagtatgagagaggggctgttggagaccctgggtctctgtactctagtgaatggcaggtggagtccagggctgagccttgatcagtgcggacattgttctaagctgggtttcctcctggacaggacccaggctgggggctggggcaggagcaaccaagaaaccacatcctgccctcgaatgccttgcaccaaggcaaaacaggcttcctcagctgcagcctgcccctaggaaaattcctatgtgtgtgtggtggtggtggtggttggaggaggggacagagatacagacaggtagtctgagacagaccagggggagaagggagtaggctatatgaacccccagttcccaggtatgtgtgagtgaccctgtgtgtaacagtctgtgtgggaatgagtccctgtgtgtgcaacatctcagcatgcaactgtacatctgacagtgtctatgtttttgtgaccctgcatatgatactgtgtctgtgggagggtctgtgtgtgtgtgtgggggggggggcatcttggtgtgtgaatgggtgtcaactagtgtgtgtctatatgtgcaggagagatagtgtgcatgtgagagtgtctgtgtgttcctctgtgtgtgtgtgttggggacagtgtctcagcatgcgactgtgtacctggcagtctgtgagtgattgtgtgtggtgggagagagtctgtgtcagtgtctcagtattgggaatgtgcttgggggcgtgtgtgatgatgcgtgtgaccgtgtgtccacgtgggggtttttgtgactgtaagaacatgtgtgtagtattccttttcctgtcctttcgttcagatatctaaagcccttagggaaaaaaaatggattgtaagctctgagcttttgaaaaaaaagaaagaaagaaagaaaaacaaggggcggtcaaagagacaggggtctgttgatggaaggggtgatttgacttctgggaggtgacacagaggaaggaggttggggtcctgggaggagatgccagggaacctgaagggctggacttagttgggggactccagaaatttgagttggaatccctccttcctccttctgagaggccttcctgcatgtctcccacctctgtgccacctccttcccgtcaccaaaatggtccccagagaaagaaagaatctgatacacttattcgcactgagaaataggagtgcctttcagattggcagccagtgtttggagagggagccccttcctggggtgttggaaagcccaccaccccgggggcttccactccacctgcttccttctctgctgtccttccttccaacgctgcctgcttgtacagggcttgagaagtcacaaagattttcacctgctttatcttgttggatctgtgcagtttgagaagaatgatatgcccattttatggacggcagaactggcaactgatgaggaaactgaggtcctaaaagataaatcgtgtcccacagtcctgcattaacagagctgggatttagaccaagaacttataaatcgctgtccagtgctccttcctgtagaccacaccactccctcctggtgtcctctttcctgtctcctgcttcctccaaaaactcctgaatctgagggatgccccttccttcttgtaacctccaacccaggtgtcgtctccacgtgccttcatccacctcagagagatcccatgaagcctgtcaagtcttgattctagaaactgccatcctgcccttcccatggccctttagaccccctctgaccgctgctttgctctcctggtcagctctgctgccttgtgagggacagggacatctggattgcatccttcccgctacccagaacccacagccccaccttgtcaggcttgcagcagggacttatgttgtgggaggatgaaatggaggagtgggggacactggtgggcagggccttgcccctcctcacagggcatggggtccaaagcttcctccctgcttcactttgccattggctgtggttactgctggaagatctcacaaattaagcagaatgattggtcattggacatgaacatatattcatttcctctttctgggaatatgttgatcctagaagtgaggaaggggtggggccccagtccccaggaagcctggtcactccctcccactctgccctttccactaaacagtagaaatcatggggattgctgccattgactgagccttctccatgtgcccaccatcctaagcattaactcagtccccacagccatcccatgggggaggggctgctgttcccttttgcacaagtgtaagctgagcctaaaacatacaactcttgcactcggttgcaaacctaatatctgggtgacccaggtccaggcccagatctgagcccaaggccagggttgttcagcctccactatgttacctgggcacccaggccctatggcactgggtggccctagcctcatttactcagtctttccccagaccagaacctcccatctgtcccagggcccaccaccactctctccctgccccaaaaaatcctcctgataacagtccacagctctcctctgctctccggagcactgatgtccccacctttgtaccttttccctgctgtgccctcctgctgaagtgcccgccctcctccttgctagcccagtctgcctccaacccccttcaccccagccccacctcacagtccccaatccctcaggcctcttgagtctgcactgaaccctgccccaaccactccctgaacactttcacccactgccttccctgttatgtcacttgtcctgtaaagcattgacccccgagtagcctgaagactctctcaggcagggctcctgcagtcacctttatactccctgcattcccctccacccacgaccacccagaacctggcacagttatggtttctgtaaatacgaggcgtgggagaggccagaagtctgggtagtttgcactgtgtgtgcctgcaggggtgggatgaaggctcgaaggtatttagaagccctgatctggtgtagggaggggacaagatactcttactgtcaggaatccctcacctaagggggagccacagccccatcctcaggaagctccagtctgaggggagacacagccccgtcctcagggagccccagtctgaatatagttttatgtccacagctctgctcagagtaggtgacagcgctgccctggggtgcaggaggccagattggccttcatggcgctgtcgttaacccctccccccgcctctgggaagaactggcttccatacctctctgcctgccccagacacaccttctgccccagttcccagcagtgaccttgtgtgtggtctgctttcattctagaaacagaaaccaagggggatttctccgtctctctgccctccacccccagcagctgctgcatttaggggcagcatggaagagccctttacccggagaagagggaagaagtgagaagggaaacggggcggtgggggttgatccaccaggacttgctctgatgaaaactgtgccacctcctcagctgtggctaatatcatggacaacacctttgcagctgttatgtttgatttcttgttctttttttccccaagcaaatacagttgacctttgccctcagaagagctctgtccttcagggtagcccctgccgccttggcacacttatgccaaggatgctgctggggcttaaagtgagctgggcccttccatggggcctccgaggcagcaaggggtgagcaaggcaacccaagtctctcagggaggtgtgtgataagccagctagaacccgagactggatccagcatgtgcccagcacgctacaaggcaagggggcaagcttctaaaaagaagctattttaatttcagcacacgtggacatttttgtgatttcaaaaagcaaaatgttgttttaaattatgtatgggtcctacattttatacatggggctcttgggtcatttcagcatctgcagcctctgaaggacgaatatttataatttttaaggctgttcaggaaaaaactaaaaagaacgacaaccccaagacatagctgaaggaagtgcacaaaaacactcagaaggaatggtggattctcagtgggatgggtctgtttgggtctgtgtgctgaaaagccatttcggtgacctcactggaagtggaggctcagctctccctactcacaggtgagagggatccctcccattgcacgtgtgacttcagtgttctggaacctccctgaccccttcacctcatgtcctcaggactcttcctttgggtggatagaagctgggttgaatattagatttggttgctgtgtcagaggggagcacggggagggggtggggggtgctgtgttgagtgcatctgtaagtgagtgcgttttggaggaggaatgctaatggcagacatcccagctctttgtagccctgaacgccactactctccccggcccccgcacaccttgcgatattctaccatggtcactgatctgaaggactccagattctagccttaactctgcttcctgggggggctgtgcacccttgattcagttcctctcccactctggcctgtgtgtcttcttctagaatggttgaaagtgcaagaagccctcaggcaggctgactaggcgccagaaggagcttagagtcctgggccctcagaaagtctctctcctaagtgagatcagagatcacaaatgagacacacacgctcctttcctccttcacccacccacctccccaaaagcatcaatttagcagacatttgctgggtgctcgtgacacatcaagctatgcaccctgggaggaatgaagatgtcaaaccatccacctggggcccctgggtggcagtgacttattctcactctctttcagaggtggctgatgcctggcagaatttggggctttgaggtttcatggagattgagaaaccaagtgtgttagggggtgagggggcaggagaggggctggctgaacccacaggcctcccatatatgccctccccccagggtgccactgtgtccctctgggagacggtgcagaaatggcgagaataccgacgccagtgccagcgctccctgactgaggatccacctcctgccacaggtgagtccatgtaggctccccacctttagtgctccccacccaaccaacttctggaggactttgatgaactcaatgtccatggctgggagccatttgcctctataggatgccacccctgccctctgccttcatctcattgtccaagctactccttcacctggataccttcctttctgccgaccaaaatcttccttttcttcaaagtccgcggaagcactgcctcctccagaaaatcttccccaggacttctgccatcatttggcccttactcgtttgctgtagtctgctttggggttgctgtcttatttctgtcttagctgtcttatctgtgtgtccttccctgcaccgccggccagccccccagctagagcctctcagagcaggcacccggcctttccatttttgtcctcagcacctcccagcctgtgcatggactgagggctccacaaacatatttataggaataaatgtttcagggagttcacaaggtggtttaaagagcacgggattggagcccgctgggcctaggttgaaatcctgactgtaattataacacgtgacctaaagaaggttatcttaagtgagatcagaaggaaggtaagctaacatttccctctaatctgtgaagtgcaatttaagaataggcccatagggatttttcattgagcacgtactatgttccattatctatgtagcatatagtcttgatcccacaaaaccctatggggctggaaatactcctgttttacagatcaggaaacagacattaagttacttgctcaaggtcctgccactgataagtggcaagtgcccctgcttggctcttgctgggtggggaaagtgcttggcatacagtaagcattcagcagaggttagtggcatgcagcctccgaggaggggaggggtcttggggaagggagggaaagggccatggccagtcacaagcagggactcagagactgttctttctgctcccagacttgttctgcaaccggaccttcgatgaatacgcctgctggccagatggggagccaggctcgttcgtgaatgtcagctgcccctggtacctgccctgggccagcagtggtgagccccctccccgacctggtacctgccctgggccagcagtggtgaaccccctccccgacctggtatctgccctgggccagcagtccacccccagctctgcctgccgcttgcagctccatccatcacctttaattttatttgagcaggaaataggtcctggtggtgcccgtttatgagcaaacatggttttattgctttctccatgaagataacggccactgcacaggccccctgccagcctttccccaaccccgtccccctgccactcaccaggctaatttac

SEQ ID NO: 1040 - protein, 653 aa, Homo sapiens
MGGYECEGSVPISKMTNPWAFLALETQPPQTFPYGDNHFEPDPPASLGLLLHKHELQNLVLEGHPQEEVSDLKLLDGQREEIDLQGFDLHVLDLARTCWQPGSPGRKWIPGPLLRSLPSLSSRSSDCLARASLRAMPARRTVGAQSWWPPPALPDSQPRSLGEQCPLSPGPGPAEGCGGAGPGVSGGRKNRDPARPLPRAGRPLAGSSPTARHQPGISLRTRFRRWQRWPSPELPAMAGAPGPLRLALLLLGMVGRAGPRPQVRSRDPDDTGGGGWLCGLQAQCPGGGPRDLNETPRPLAGASESLGGSRDWRLGAPGLEGPGEGLDYRGFPPTPARRPLPRHPGPSARAPAAPRPPCADFCSASPLSPALSQLLLNRVSGPGTARHPPGLPLPHSLTQTPLPQCLPRQSTCSKTLRRPWEELRGPGCGDPAPLPFSSAPSTAFDSWLLGPCGGSLSFPVTSQMEPTPRPLPASVANRQKAQCPPGSSQAPPLTHSADLPFSSCTDSRPQEKAYWDTQEHLGSLVPPESRPQVDHRSPSLLPLLLFLPWDPGLGTVGATVSLWETVQKWREYRRQCQRSLTEDPPPATDLFCNRTFDEYACWPDGEPGSFVNVSCPWYLPWASSGEPPPRPGTCPGPAVVNPLPDLVSALGQQ

SEQ ID NO: 1041 - DNA, 39703 bp, Homo sapiens
  source (1)..(39703)
  CDS (201)..(524)
  CDS (3968)..(4102)
  CDS (4517)..(4687)
  CDS (5787)..(5888)
  CDS (6700)..(6891)
  CDS (14506)..(14748)
  CDS (15377)..(15440)
  CDS (16990)..(17067)
  CDS (18612)..(18762)
  CDS (19258)..(19390)
  CDS (20773)..(20889)
  CDS (20987)..(21167)
  CDS (22295)..(22422)
  CDS (23003)..(23131)
  CDS (23354)..(23497)
  CDS (24275)..(24444)
  CDS (39365)..(39503)
gcggtggcggcgacggtggcgagagccgcgggggccgtaggaagccaaccttccctgcttctccggggccctcgccccctcctccccacaaaatcagggatggaggcgcctccccggcaccctcttagcagccctccccaggaaaagtgtcccccctgagctcctaacgctccccaacagctacccctgccccccacgccatggggcccggggccccttttgcccgggtggggtggccactgccgcttctggttgtgatggcggcaggggtggctccggtgtgggcctcccactccccccatctcccgcggcctcactcgcgggtccccccgcacccctcctcagaacggcgcgcagtgtacatcggggcactgtttcccatgagcgggggctggccagggggccaggcctgccagcccgcggtggagatggcgctggaggacgtgaatagccgcagggacatcctgccggactatgagctcaagctcatccaccacgacagcaaggtagccctggacatgggggtgggtgggaggtgggggcttgcggggcagggggccagccagctgcacgcgcccccatctgtctgagtcgtctctgggattgcgaggcagacccctcccttgtgtgactggcaggagatgggctgggggtgcaggagcttggggagagtcgcaggggctggaggtccaagatgagggtctaggggctcaagatggttaagcatgctgcaaggcagacccttctgccccgctgcgggagtctcgcagaagtgtcggggtttggagaaactggtggtggatttaaggtattaggagacactgatcctctgagggagtaaactaaccctggaatgggttgggggtggagggaatgtcagaggtggggagctggattgggggtttacatttaccatggtaacaaggtaaaatcttggcgtaggttggagctggaaggaatagggacagaatgaggaaaattttgagagacttgagagctctagtttatttatcttaacaaaacagcaaggtagtggtgagccctacctgactccttctcatccttctattcccaaccctgttgagcattcccagactgtgggatagatggcatatggtgattggggaaggctaatgatcaagaggtgggcagaggcactgggaaaatgaattggattggggatccacatgggaacccccacaatagcatggggatgaagaagagtcaacatacaaggagaagagaacagaaaagaatggcagtgggggagaggggcaaggaggtagcgtggggataatgagagatcttggggcaccttatggaacttgggtcctgaccttcccttcccttatagcattgtggcctctaggatgtgagaagggaaatgggatgtagggattagggaggtgagttgagggagagagagaaggtaagcaaatttgggtccaggggtattaggggatagcttataatgaggttttttttcccacccctctcccctacatgaataattgggggtgcagggaaggatgtgacacagggaaggagatttaagatctcaaatttatcttcactgacatgtggccccagagacttaaggaattgggttagggtgaaatagagtacacaaggtgagaatttggtgatcttaccaaatatcaaccttggggtgatccaaggatttatattcatttttagaacatcactatacacctagaaataggtgtgtgtctgggataggtgtgtgaggggacagaagtgaggttgaaggtagggtgcttgaagagaagagagcacaaggattatcaggagcttggcaagagaacttaaaatcctttttgactgttactttctcgtggttctcagccttcagtgtacataagaatcaccagaggagtttgttaaaaatacagattctagctccttggtcagggatgaatcccaagtatttatctgtatttttactaatagacatcctatcttggtggattcctgagctgtaagctaaccccagaatgcctatgggaagagcagcagggtacaggaaaataattaggtattagggtacgggaggcaggaagagaagtagaggatcagatctggtagagggtcagacttgggacagtcagagagatcattggttttggggagtggagtgtgaagaaaatgacagggagagatgggtgcaggctttatgataggggatcacaggagataggggaggcctggctgtgagctcaaactcatccaccatgacaggtgattccctggaggtggcggggagcagacgtgggacctgggagaagggaactggagaacatcagaggcatcaagcggggtgggatgggaaggcagaagaaccagaatgtgtcaattggaatgagtcggtttcctgcctgcaaatccagatccttgcaagagcaaagagagggaggagaactaaggaaatctattggggagggggagagaatcacgtggtggagagaatctgcagtgatgaatagtgtgtggaagagggaaacggttgcaagaaaaggtagataagaaatcaggaaacaaaatggggggcatgccttgccctgttgatatgtatcttatatgttcttgtatgtcctcattgttcctattaaccctgtctttagagaagtggaggggcactgaggggctgtgggagaagctgggagcaggatctggagtaatagatgtggggagagtgcaggaaggtgggtcctgagaatggtaaagatttacaaagttgccctagtgggaggcataaagagaaaaccttccaatgttgttgagcactgcccttggccagagtgagggtagggtgggcaacagagaattctcagtgactgctggttcttcagattccaacagcttcccctggctcccccttctccaacttcccaccgtgtcccaaatgtcaggcctcagtgggaggtaagcaggctccagagtgctttctttatttcctttctacttatcctcccctcctggcaacatttcaccctccttagtcccctgagccccctgtctgtgtcccctctgccctggctccccactggctgccatttcgtcttcacatgcattggggttccagcagcttctgaaatgtcatatatcagtgggaggggaacaggcagtgggagacccaaggctggctcttcctcccccatttcccctcctcccaagcttcctttcttctccagctttctgcttgtttactttccctagctccaagcctctctttaaggcacctctcaaattgtctggtttcttgagagttccattctattcattctctctgttctttcctcatcctacattcttccctacttccaccccccagtgtctttttttctaatggacctgtcaaatgtcagcgcccagcaggagggatggatcactgagcgggaccccctactggtcttgttcctgttctctctttacttatcactagctctgaaaagagaagagggaggaaacaaatggaaggtggggagaaggggtttgcagaggtgaggaaggaattttcataatatggctttgagcaagctatctggggatgtggaaagagtttaccgtattcctactgacttcttccacccactggtgtttgaagcatagaaacatggggtaaagggcttggtgacagagggaagggggatgtctgagggtgagctgaaaggaggtaaggtggtatgttcattaataccaaaggaggggtgtgcaggagaggtgatgggtaaggctccagatggaagacagagaaggaagtttaatgaaagaggagaaaaaaggcacttgacaggaagagatgccagaaaggagaagaaaacggtaattaatgatgaaagtgagtaattgagaaaggaactaatttgttcgagaaagataagagcaggaattgcagacaggggaggggccccaggagagcttgccctcatctcctcttgtctttcagtgtgatccaggccaagccaccaagtacctatatgagctgctctacaacgaccctatcaagatcatccttatgcctggctgcagctctgtctccacgctggtggctgaggctgctaggatgtggaacctcattgtggtaagcagggctatgggggtcagaagatggggtcattcccttttgagctctactgaagggacgatggcgattgtgggtttgtattgaaaaggagtgtggaggacctgctactaagattcagagtcctctgcagacctgagctaggcagcctcctagcaacagtggcctgacagtgctgcagctgacctccttcttcagaaggaattgaaattagatcagtgaaagagcatcccggttgtgaggggtgtgtgggcctttgagaatctcttttccttaggcagaccagaggtggggaggtttggagagagtaaggaagagaaacccaaaggcaggaagagggttaaaggaactcttggccactcttggtgtcctcagtgaacagaccctgttgcactcactctccctgccccacagctttcctatggctccagctcaccagccctgtcaaaccggcagcgtttccccactttcttccgaacgcacccatcagccacactccacaaccctacccgcgtgaaactctttgaaaagtggggctggaagaagattgctaccatccagcagaccactgaggtcttcacttcggtgaggaggggttgggcaaggggtaaagggacataagctcaaattccagcaccaggagatgtgacgtgagagtcacttttaggggcaagaacttgattcttcattgaaagagaacgcattccatgtggattaagtgcagttctttctgtagccaggggaaagaatgagttgagtttttgggatcctctctgtctttatgattttatgatttttttcccctgtttgatgccctgttccccagacatatagacccagaatgactcagttctgttaaagtaggttcaatccaaagtgggggcaagagatgggagcgaagatgagataggaatccaggaaggcagcagattccagaggctttcaaggggggtggtgggtgggtgtgaatgggaacagaggggatggagccagtggattacagaggagagagggagaggaaagagagagagagagaggaatgagggagaggagagagaggggcagaaaggcagctgcatggatctggtagttggtactaagagagagaagccgacagacaaggagaggttgagggggaagagggagatttggggaggtagagaggaaatacaggctctacatctgaagaaggcagtctgctccctcccttttattctattctttgggtcttctatccactgtgttcagtggccctttaatcctcccccactttcactctgattcagaccattcttctctgatcctttgtctgtctgcccatttgcctcttgaggttgacatcatgctgtctgtcccagtccttgccttgtcttttcctggttcctttatgtttctttaccccatctttgccttcagtggtaggagtgggtgaatggagtggcttcccccacacagagcctcagcaggggctcaccattcaccttcccacttggaatccacatcctaagaccagatgccttcccgaactcctcacttcagggacagaagctgttgaaggaaggttcagaatggctgcttctttgctctatctgagtattgctctgaaatccccagttaacctctctggtctttattccctcatgcaccccgtgtttttccaacttgttttttattcccacccaagactctggacgacctggaggaacgagtgaaggaggctggaattgagattactttccgccagagtttcttctcagatccagctgtgcccgtcaaaaacctgaaggtcagatggctgggagtggtgggctctgtttacggagggaccaagctgggggacagtgactggttggagaggaaagccaggcgggggcaggttttgattctctgaggcaatagcatctcctggggaagtttagctccatcttccagttgacgtttattcactatacgttgagcgttaccctgcactaagcactttgggatgggaaatcaaagctgtgaagacatctggcttagcccctcaggcattcccgggcatccctcaggagctgtttctttctctgttgtagcgccaggatgcccgaatcatcgtgggacttttctatgagactgaagcccggaaagttttttgtgaggtggagttggatctgaagagggaggggcactgggtgggagtttcccttggttttcttgtggggcctcctcttggcatctgtgcctgagttgatagcatatgatctgaggtgacgattcataggatgtctctgtctgttggctctgactgcatcccttgtctgcacacacatgatactttcttcagatctcatttttctactgctttgtgtttcctgagaagcccatgaattccatctgtcctgactggctggaaaaggccactcagaaatacaggggctggggagaaacttagaaggaagaattgtcagcctttcctactatccccaagacttgtagatttctctttttagttctactgctcttccctgattcccaagaggctaaatagtatcaagtgagataagacaaaaacaaacaaatgagcaaacaaaaactcagccattctcctctgtattcaggtgtacaaggagcgtctctttgggaagaagtacgtctggttcctcattgggtggtatgctgacaattggttcaagatctacgacccttctatcaactgcacagtggatgagatgactgaggcggtggagggccacatcacaactgagattgtcatgctgaatcctgccaatacccgcagcatttccaacatggtgagagtgtggggacttgcagtctggcacctgggagggtggagaggactgagggggccttgcaggggaaagggtggcagggagagggtgcggaatttggatataaaggagaagagggggctgtgcccaccctgaacttgtctgcattatgtttcctgtggatcctacctttgctctgacttccttgggtagagagagaaaaaaaaaaaaacgatggagttgtatgttcagtaggttcctgatgagtggaagggctgttaccatggagacgaggagcagttggtgagaagtcaggaggaaccggcattaatgataatatggatgcttgtatactcaagcacacctttacaggagcactgtgtctgggcagaattgcatttcattttcttggtgatttatgttagtgttttagagttgcttaatattcactcatgattgatatgcaattagcttggatcctgttgctttttttaatgattctttttttagaattttatgtggagaaggggcttttgaaatcatttagccccagacagctggttaatgacagacttggagcgaggaggcgcattctctgatttgagagggctggggcagccctgcagctgaggggcagaagtgagtgtgggtgtgggcacaggggaagaggcttctttgttgctcagcactacattgtaaagagtacaggaattttgggtaagctcgatacggccacctatgtgtctgcttattacaccaagtgtgtacctgctttggagagcatgttaggggtgagttaatggttgtaaagccccaaaatagcttgatttaaaaagttttactaacagtggcatttgtgtggtacttagattcatgatttcagggattctaacagcaaaactctgatgtggacttatctacattttgtagaccaggaaaatgagactcagagtggtttaatgacttgtctcaggtcatgcagctactcagcagtccagctggaattgaatcctagttaaatctggctccaaactgctctgctcatcacttcccatggaaaaccatgaagcctgactaaaaagtttgtacttttatctgctaacactgtttagctactggcaattgctgagcaaaggagaaataagatttaggaagttgactctggtggtgtgttgtgatgaaagatctgctgccacatggactctgatgatacacactgttttgggacattctaaatggactctatgttttaaggtatgttagttgaaaaatacaatgaaaaaattttggaagatcactttcctgtagagtacccaagaggtgagtcatccataaaacctgggaaagtattggaactggctaccaaagccagaaagacttgttggtgccctgagcccaggacttgccaatcgttgcttctgtcttatagcagggagctagaggaggctgacagaaaacagggatttggctggatctagtggctcacacctgtagtccccagcaccttgggaggccaaggcagaggatcactggagcccaggagttcaagaccagcctgggcaatatagtgagacccccagctctaaacaaaaagagagagagagagaacagagagatggttagggacatagagggacacctgagcattggggtgggaagacttggaaggtccctttctgactttgtgtctagagaaagatggttcctgcttttgaggccatagggcttccagtgggaccagcctaaaatgccagtggggaagccaatgttttctgaagaggatagagcagtcttaacaataggttaggggcaaaagagattatagattaatcaaacagcacaaatagaagtggatcaaagcaagggttggacctagggggccggagccatggagacttagaaaagaagcagagttgcttttattccctaaggatggccttatgtttagatcaatagttctcaaactttaacatccgtcagaaccacctggaaaggtagttagttcacaggttatcaggcccttcccctggaaattctgattcagtagatctgggctagggcctgagaactgacatttctagcaagtccctggggatgcagatgtactggtctggggatcacacctcgagaactattagttagggtagtggttttcaactactaccctagactcagacgctatactatctggaggcatttttggttgttacagttgggggtaggggatggggagggatacatgctcctgatatctaatgtgtagaagccaaagatgattctaaatatcctacaaagcacagcccctggcaacaaagaattatcttgctcaaaatgttaatagtgcagagaatgagaaaccctagtttagagaaaacatctttaggggcaatatgtggaaatggagagtgggttagagtggttttagagaaatgtagctgtgggctagaggggaatgtgggaggtggcatcctggagataagattgtgaggaaatcttgattggggtagagatcccatcagacctaggaccagtacaaactaaaaagctacctcaagatatacattttagcccactgtcaagcatccattcttgagagccagacaaggctgttaaaaaaattaggtataaatttgcacttggttgattaactaattgctgtgggttgaggggtctttattgttcagatttccttaagctgcagagtagagtgtctctttgacaatctataactgtatctttactgactcaagggggaagcattctactcttctttactcttggggtggcaggagcagtggtgcccccagtggttaggcgtgttagtggtagtgacctggcgtgagcacagggtctgaccacctgagcaggggaccgcatcgtgctgagcagattaatccctttctttctgggtgatttttttgatgccatatttaccttgaactgaagattggatagaccaatctttcaatttgaagccaaaagactactcaaagtattagcctagctgctatttgtgcaggtgctcttagagagaggcagtctcatgtacagagactgtgtagggtggctggtaagagtatggattagctctgctactcattaatagtataacttttttataggcaagttatataacttttctgtgcctcagttttcttatctctaaaatggggataataacacctcattggattgtttgaggattaaataaggtaatatagtttcctcaggaaaatgctcgatacgtcctaaggactgtatacatgttagccaccatcatcgttatcattatcatcatcatcctgtgtaaggagggatcgatatcaatgaaacatttcaacaaaagagttaagaggactcagtgatttgaaagggtctgatgtaattccaaggcttcagtctcatttactgggagctgtttgggagtaagaaaaaattgagcttcatcttggatattttgattttgagattattcatcatacattaaaaatgcctcagagtcagttagaaatatggacttgaggctgggcgcggtggctcacgcctataatcccagcactttgggaggctgaggcaggtggatcacaaggccaggagttcaagaccagcctggctaacatggtgaaaccccgtctctgctaaaaatacacaaatcagctgggtgtggtgtcgtgtgcctgtaatcccagctacttgggaggctgagacacaagaatcgcttgaacccaggaggcagaggttgcagtgagccaagatcgcactactgcactccagcctggcaacagagcaagactccatctcaaaaaaaaaaaaaaaaaaagaaagaaagaaagaaaagaaatatggacttgaaatattgggctgaaattatagatctgagtatcaataacaaagatgaggttgagagtcaaggaaattcacgtagagaaaatgtaacttacttcatacccagcatttttatacatgttctaatttcatttcatactattttagatagtattattctcattttaaagctgaataaccaactagtgaggtttaataacttgtttgagatttcatagcaggtaaaatgattagaatatgaattcatccatttatctatccaacagactttttttttttttttttttttttagtagagacggggtttcaccgtgttagccaggatggtctcgatctcctgacctcgtgatccgcccgcctcggcctcccaaaatgctgggattacaggcgtgagccaccgcgcccagcctttttttttttttttttttgaggtagagtatccctctgctgcccaggcaggagtgcagtggtacaatcgctgcagccttgacctcctgggctcaagtcatccacccacctcagcccctcccaagtaagctgggatcacagacatatgccaccaagtctggctaactttttttttttttctcgagatagagtcttgctctgttgcctaggctggagcacaatggtgtgatctcggctcactgcaacctctgcctcctgggttccagtgattctcctgcctcagccttctgaatagctgggattacgggtgcgtgccaccatgcccagataagtttttgtatttttagtggacatggggtttcaccatgttggtcaggttggtctcgaacacctaacctcatgattcaccctcctcagcctcctgaagtgctgggattacaggcgtgagccactgctccaagccaagtccggctaattttttttttttctgagatggagtcttgctctgttgcccaggctggagtgcaatggcatgatcttggctcactgcaacctccgcctcctgggttcaagcgattctccgattctcctgcctcagcctcctgagtagctgggattacgggagcccaccatcacacccagctaatttttgtatttttttttttgagacagagtttcattcttattgcccaggcttgagtgcaatggcgcgatcttggctcacagcaacctccgcctcccaggttcaagccattctcctgcctcagcctccggagtagctgggattacaggcatgcgccaccacacccggctaattttgtatttttagtagagacagggtttctccatgttgctcaggctggtctcgaactccggacctcaggtgatccacccgcctcagcctcccaaagtgcggggattacaggcgtgagccaccgtgcccagctaatttttgtatttttcatagagacagggtttcaccatgttggccaggctggtcttgaactcctgacctcatgatctgcccgccttgacctcccaaagtcctgagattacagatgtgagcctccgtgcccaggccaagtctggctaatttttaaaaaaattttgtagagttgggtcctctctgttttgcccagtcttgtctcaaactcctgggctcaaggaatcctcctgcgttggcctctgaaaatgaaaatgttgggattacaggcgtgagccccctgtgcctggctgcctttttttttttttttttttaaaggcagagtctcactccatcgcccaggctgaagtgcagtggcgtgatctctgctcactgcaacctctgcctcttgagttcaagcgattcttctacctcagcttcccaagtagctgggattacgggagcccaccaacacacccagctaatttttgtatttttagtagagacgggtttcaccaggttggccaggctgtctggaattcctgacctcaggtgatccaccctccttggcctcccaaagagctgggattacaagtgtgagccactgtgcccagcctgacttgttttttataatgccttttttttttttttttgagacggagtcttgctctgtcgcccaggctggagtgtagtggcgtcatctcagctcactgtaacctccacctcctgggttgaagtgattttctcacctcagccctcagcctcctgagtagttgggactgcaagtgcacaccaccatgcccagctaattttttgtattttagtagagatggggtttcaccatgttgcccagctggtctttaactcctgagctcaggcagtctgcttaccttggcctcccaaagtgctaggattaaaggtgtgagccactgtgcctggccttttttttttttttttttttttgagcagttttagtttcccagcagaattgagatgaaggtacagaaacttcccatatgcttcccacatgcatagccttctacattatcgacatcctccgccagagtggtacatttgttacaactgatgaacctacattgatacatcataatcacccaaagtccatagtttacattagagttcacccttggtgttatatattctatgggtttggacaaatgtataatgagacgtatctactattaaatactttacagagtattttcactggcctaatccaatggacatttattgttacttcattatggttgggcacagtgctagatgctgatgattaagagagggcatgggatttggtcttgtcctcaagggtagaacctaggcccattgcatcttcaaagcccaggctccttcaaagcccagtgtagtagcaactgctgtaccttgcctgtgccctttgcgtatctcactcctctatctctctagaaagttggagagaaaagtgagcaaggcatgaggaacaaagttatttatttattcttcattcatctatttattctttcattaccgtttgtgttaaaacattccaaacccaaacaattatttgtatggtcccctgtgtattacttgtggtttcccaagaagtagttgctaagcttttccttgtatggtttctgtgaggtaaggaaggaatgatgtgattttctccagtatgtagaatgcagttccaagaggttaagtaatttacttacagttatttagccaaacaaggttactgcaaggtatatgaagtcaggtctcttgacccagttcatgagagagttaaaggaactatcattctttttagctttcatggaaaaagaaggttgagtgttgggaggggtgtgggtaggattgataatggacttcaaaaatgtgaagggtatttctgtagttttcattcttctgaaagccttctaagaggcagtgaaccaaaagcacacaagaatggcaagaagttagcatgctgaagaaatatcctcctggctggcaagcagagtgagaagactgctatcaccttttctagaatcttttggaattgtaggagctgttagatcctgggttaactctatgaagaaagtcagaaggatcagagaacatcagtgtcacagctcttcattggaatatccatgtctcctcctttactctgctctaccttccatcctttgccactaattatccagagtgtttgtcaaaattctctgtttgcagttctgagctagcaactgtacacactaacaccatcagacacagctaatacctactctagtctagtagcttccgatctaaggcagacacatgggtatagttaaagattttgaatgtacatgtgtccaatctgacaacagtaacacaaaccatccattcaagtagaagtgattgagtcagaattggattgcaccccttcccccacacccacacacatttcagttctttcctcatgattttttcctcccaagacatcccaggaatttgtggagaaactaaccaagcgactgaaaagacaccctgaggagacaggaggcttccaggaggcaccgctggcctatgatgccatctgggccttggcactggccctgaacaagacatctggaggaggcggccgttctggtgtgcgcctggaggacttcaactacaacaaccagaccattaccgaccaaatctaccgggcaatgaactcttcgtcctttgagggtgtctctgtgagttaaaacttccttcatactcccctgtcttcccaatcttgagagagactcccaagaggcaccttctacaaacatgcattctctgtttttctcagttacttctttgcagaatcagtctccgaccagagaagtagggaccttcaaattagaagaacccatcaaagactagaggaaaaaaaatgatgtattccatttttttaaacccctcccctcatttcttttcaaactagaccaagtattcatgagtcagatgagaactataggattttgaaagacaaaacagtctgaaaggtcatcttcttattccttttaaaatgaaaagattagtttccagagagatttgctgacttgcttaggccacacaaccagaagcctgctggtgttctgtctggggattttttcccattcaaatctcataagtgaagctccttctccaaagaataatgtttctaaaatctagggtatgggcatctggggtatgtcctatatgcaggcaaatgccataaatagcattcattcagaggctcaattacatcaaaaacagaaggatttaaagagtccctgatgttctctttcactcttgcttttgtctcctttgccttgctccacatgttccttccctcagggccatgtggtgtttgatgccagcggctctcggatggcatggacgcttatcgagcagcttcagggttagtacaggggcaggaggggaccggacatgggggctaggctggggctgggctgggatgccccctggggaagaatgccagagacatcacaagattgccctggcacctcccaacttctgcccttctcttttaactctgttcatcaagcttgtaaataataataataataagcttaactacaagaagattgatgtctttgagttgcactggttttgctcttgaaaagaggtgtgcaggctgggtgtggtggctcacccctgtaatcccagcacttttgggaggccaaggcaggcagatcatgatcatggtcaggagtttgagaccagccagaccaacatggtgaaacctgtctctaccaaaaatacaaaaaaaaaaaaaaaaattagctgggtgtggtggcaggtgcctgtagtcccagctacttgggaggctgaggcaggagaatcacttgaacccaggaggcagaggttgcagtgagctgagatcacgccactgcactccagcctgggtgatagagtaagactctgtctcaaagaaaaaagaaaagaaaagagacatgcaaattaaaaacagctactctctttcccagtggcttccattaatttcaggaatttccccttgagtggcttgggttgagaggttgatgacctgtcagttagactcaagaaagctgaatctaggagaaccgctattttttttttaagggaatctgccaaatttccttgctgtgtaaagcttcaatgtgtatagcttggcttttgtagattgtattttcttgaaacttagcacacaggtatttgcagaacttctaggagttaatttttctgctccactcggctctcagtcttttacggcatggccaagagagctatttcttggcctcctgtgaaaagtttctttcttcctttctccccacctccacatcctttcagctcctctttgtatccaggacaagaggaaatggacttcagccatggtgaaaggagtgtgagttggcttttgaaggaaaagttatggtaacggaaacagttctagaacagaaatcttagaaatgaccaaattttactcaatggcgctttaagaggcagatataacttatccaaggaattaaaacccaagccaacagaagagaatgttctaaaattaaaatgaaagccactgggaaaatagagcctgcccatcatgagaggaagaataagcagaaatatgtgtaaagctttagaagccaaaatcaaagtgagagacatctcgccgagagaggtgtgaggaatggaataggtggcagacatgttgtggagcctcctcactgaagacttttaaacatagatattcttatttatttgagttgtcttgggaaccaccttatattgcttttaagtcatgttgctgattcaagagtctcgtaggtccttccaagcatccttagggcctcaggtgaaaataaaatcagatacaaccatgcaaagctctagggaagtgggaagttgaaaatgcctaggatcagctctttggctacctgtggtcactccttttattgtcgtctgcccaggtggcagctacaagaagattggctactatgacagcaccaaggatgatctttcctggtccaaaacagataaatggattggtgagtggatcttgtttgtattttccttcagcccctctcgacagtcaagggaaaaagtcatgcctttgagtgaggatggaatggtagagactgttaggttggaatgtggctggcagctgggccaggagaaagggttaagtgagagtgaatacaacccctaaggcgtgggtaggggagactggtgtatttggagagggaataggcggtggttagtactatttttaatggtgcattgctggggtaactggggattagaggcagggggtgggcagagggcgggaaatggaaactccatttgggtttcccagatgtcctggtgtcttgatatatttgaaccagctacttcaagcccagagctgtctctttgtctgtctctgtcaggaaaacggttgcttaaactatggaggaggagggaaaacctcatgtaattgtcatctgccaaaatgtgctttttatttttatatgtatttttaaaaattttcctatttttatgtaatttagaggtagacgtgcagttgtgttacatgaatatattgcatagtggtgaagtccgggcgtttagtgtgcctgtcacccgaacagtgcaccttgtacctaataggtagtattacatccctcaaaatatactttttaaagagagaaagcaagcagttattctttgtgtacttggtctaaatgataggacataggagagaaactgaaggtggacaaaaggaaggacctactgataaaagaaagcctccttgagaatgaaggggaggctcaaccattgaagatggctgccgtctgccctgcccagcagatatccagtcattcccagcactgctggagttttgcccttttttttttttttttacaattcgaatttaggacaatgttctggattgctataaatgctgcatggcctaaattattctttaaaaaaaaaactaagcaaattgaaattagttttttttggtgaactctgacaaatttgaacttccccctaataataactggaaaacatatttgggaatattaccctgccaggattaaaatttcagattagctttccttctttttttgtttgtcttaagaataggtgtccacactagatacttcaaggcctttttagctttatgattccataattgtcatttaaaactttgatttgggttataagaaaccttataacattttttaatgatccccttctttctcctcccattttcctttgctgtaagaaagacagaaaaacttaaagaacaaacaaaaacaaagactacaactttggggacatgcctcagcatttcccaacctatggatagaccattcactccatcttctcatctcatttctggttgcttcctaacggccccagtggcactgagcattctgcctgcagtaacctctgtccagtgcagttagggcctcatgtccccagccaatgactgaatgtccatcagcaatctagttctttgcccttttctcctatcccgtcttcattcctttgtcctccttcccttctcttttcccttcccctcttcctcccctgtgccatgcaggagggtcccccccagctgaccagaccctggtcatcaagacattccgcttcctgtcacagaaactctttatctccgtctcagttctctccagcctgggcattgtcctagctgttgtctgtctgtcctttaacatctacaactcacatgtccggtaagtttctcttctgacgttttccttgtctgcctctctgagatactgatcatgttcctggacaggatgagaataaaacctgtgtaactcccatggccatgtatcatggagtttttcattctgacttgttgagaatgaaaacagggaaaccagatataacccccactcctactccaaagtagctaacgggaggaaaaaagaaaagaagagaaaaaaacaacctttggggccaggtctcacagtcttggactctacataaatagcctgtattctagtgggggcctgtgcttgggaagccctctgcaactccatcttcagccccatgactgcattgctctgcctctcaaggctccactgtcttctccaatcctgtcttcctttagcccctggccctgaaattagggtcatgccattgcgtggtatttggagagctcagcctccctggagaagaggggtaattctctctccctctcaccctctccacctctgccctagttatatccagaactcacagcccaacctgaacaacctgactgctgtgggctgctcactggctttagctgctgtcttccccctggggctcgatggttaccacattgggaggaaccagtttcctttcgtctgccaggtgaggaggtggtgggcaaattccttacaggatgtgactctcccacccgtctcaggagcaccttccatgatttatgattctctgcccttcctcctcagctttccctgactcttgtccctgttctttccttctagcatcacccctctgttctctgtttggctctgtcccttctttctgtgtctgcaggccattttcattctgtagtttacttgtcagttccaaggttgccatggcaggccttgcagagaagaggagggagccattgaaggcaaaggaaggggatctgctcaaaggtctcctgaacaatggtggcttgtctgtggtatgggggctgagaatcagaactgtggactttttttgggagcctttgttgggtttggaaggatagaagcagagatggaaacacagcagagagttggggggaagggaccactgccacacagggaggaggggctctgggactgttggtacatggaaggttctagtgctgtggggagaggccagcttcaacagtgatagttgagtggttctcttttccactggtggaaacacccactctttctcctgatctgcctgcctgtccttgctctctctttttcctctgctctgtgctgtcctgatcatacatctgtgcacatggcatttccatgcacatgcacatgcagttcatcaggaatcctctgttcccagtgaggccagagtgcagctggagaagcagacaattagctgtagtgcaataggagaggttccagagtagggatctgcacaaagtgctttgggggcaaagaagggaacacagttcactgctggcgtgattgggtggacctcactgaagaggtggcatttgaatactgaaggacaaataggattttatcagctagagaaatagaggaaggctacttcaggggcatagggagcatcgtgtggctagaaaatacatgaaagagagtagatgaagagaaagtgagtagttcagcatggctggagcgtggggtaggtgtggggctgggagatgagcctagctggacaggtggatgggagcatgttgtgaagggtctgtgtcatatccagaagtgttcaggctataacttatagatattggggagtggttggaggtttttggccactaaagccaggaggttttagcaagatcaccctggtggtgtggaagtagagggtggatgggaggaattgttcaaggtggggagactgctctcctcctgccgctccccgtcctgctcacattttcgcatcctccctgtgccaccatgagctccctgcccgtgctccctgcccactctcccttagggttctgcccatccttactgcagtcccggctactactctaccctgttctgcctgtgccctctcttcctttctaggcccgcctctggctcctgggcctgggctttagtctgggctacggttccatgttcaccaagatttggtgggtccacacggtcttcacaaagaaggaagaaaagaaggagtggaggaaggtgagctgctgcccaatcctcagcccccagatccttggctcctggggcacagagcattttcccctgacgtgcctgttctccccacatatttatccagactctggaaccctggaagctgtatgccacagtgggcctgctggtgggcatggatgtcctcactctcgccatctggcagatcgtggaccctctgcaccggaccattgaggtaccactggagaggaggtgctatggtcaggagaatgagcagggctcagtggccatcagggccctggggctgtgtgtgtcttgagggatgaagctacttggagagagtgccttcctcgtattggaagctcttcctttccttcctagaaggagcccctcataggcctccagattcagctgaagaaaggaaggggtgggaatctgggaagggtgtgtagaacttccaggcatcagggaaagtggggaacaagcacctccaagggttcaggaaaacattcttaggcctagaatgagatttggcatcagcattgagggtctcataggaaaacagttggaagccagagactgagaagcgttgaggagaggaggggaggctggcaaccatctttcttgtgaccttgtttctgccctagacatttgccaaggaggaacctaaggaagatattgacgtctctattctgccccagctggagcattgcagctccaggaagatgaatacatggcttggtgtgtgggatgtgggcaaaggagggcagggatgcacaaaggcaggagggaaggcaggggtagagggcttggagggagaggggtctttggaagaggaggtagagagcttgtcaacccagtttgaacaccctactctttgttattgcactaatcttttctgagaataggggagagttgctcttttgctatgaggagcttagggcccaaagcacagaaagcacagatgaagaacttgtgttcagcagaggaacaagtgggggtaaccccacctccagacttgacattatcttttagatcccccttggccttattagcattgttcgattcatggtcacaaattgcaaacctaccctctgcctggaaagccaccttcccacctgtagggtaagggtgaggcatgtgtggcccagactggcctatttctagatattcaacaagcccttgcctgactgacagcagcttgccaccattgctttcctgtgtgaatcccaggaaaaagtgatgtggtctgggcaagttgggtggacataagggataggggacacagggtgaggtttgctaggtcagaggggttggattggagaggagggccccctttccatttcagagtaggtgaagggcagagaggggatggggattgagtgaggagcattgtggtccttgttgctcaagtgactctctcctgccatcctaggcattttctatggttacaaggggctgctgctgctgctgggaatcttccttgcttatgagaccaagagtgtgtccactgagaagatcaatgatcaccgggctgtgggcatggctatctacaatgtggcagtgagcactgaccccatggcattgaccctgtaggctgaccacagcagcccagatatagaggactaggaagaatcaatgctagatctgggatcggttgcttagaagtcttaaaaagtttgttaattcttcaggtctataaagcactttacagtttacaaagctcactacagacattgtatcattaatcttgcaactacccagtgaagtagatattagtatccccactttataggtgaggaaacagaaacacagagacgttaaattgcttgtctgtggttaatgggctggactctattgacatttcctgccagggaccgactctggaggacccggaatctgtgcatagagatcctgggagttcctgccttgaggggaggggttaaccaagagtgaaaactggtttgggacagtttgagatttttctcaatctatatttgaggatgatcctgaatttggatccttttcaaagggaaagttcaccaggaaactgtctgcatagactccctcccatgggaagtaaactctggatcttgtctgagcctgcagacctgagactccctcaatgtgtctttccctctaggtcctgtgcctcatcactgctcctgtcaccatgattctgtccagccagcaggatgcagcctttgcctttgcctctcttgccatagttttctcctcctatatcactcttgttgtgctctttgtgcccaaggtaaggatctggcttttctcccaccctctttgttcccatgttccctccatccctccttcctatattactgagttcctctgcccttccgttcaccctcctctcactcctccccttgttttgggcccaactcttatcagcattccttccacctccaaccttccatcagccagtcactagtacagtccttgctgggccaccccacgcccaaacatttgcccccagatgcgcaggctgatcacccgaggggaatggcagtcggaggcgcaggacaccatgaagacagggtcatcgaccaacaacaacgaggaggagaagtcccggctgttggagaaggagaaccgtgaactggaaaagatcattgctgaggtgcgggggtgggtgtcagggtagggtgttggagtggtccaggaggcttgcgtcttagcttgggttgtctgaagccaagcctgagatacagggtcagatgttcttggctcatggagggagggtcctaggagacaacctgtaaggagtgaatggagcagcataggggaggggaaagggctgagcaagattctatctcaggcaaaatccagtgttggcctggcaggtggaagggctctggagtgggagctatgtggttgactcagcctccttaaggcaagaggatggctgttggctgtaggtgacaactggagagaggcagctgtgagcctctagtagtcaacactcacagcagctgggtgtagcatgcagccccagcataaaggacctgggcaggcgttcactgtgccccaggctgtcattaggggctggtgcaatgccaaagagagggatgttccaactgggttgacacatctctctgatttattggaagctctgtgcactgacttttctctccttccccactttttccttttgtttttaaattctctcttatttccctgatcgcattttttctatcggtatccttatgttctctggcttttcttgttctgttttgatttctccttttaatttattctgtccacttaccctacgtcctccccctacatttttctgtgcccttcctctctttccctgtgcccttcctctctttccctcctccccactccttcatcacctcctcttctcctactatcccaattgtgcttcttcctccagaaagaggagcgtgtctctgaactgcgccatcaactccagtctcggcagcagctccgctcccggcgccacccaccgacacccccagaaccctctgggggcctgcccaggggaccccctgagccccccgaccggcttagctgtgatgggagtcgagtgcatttgctttataagtgagggtagggtgagggaggacaggccagtagggggagggaaagggagaggggaagggcaggggactcaggaagcagggggtccccatccccagctgggaagaacatgctatccaatctcatctcttgtaaatacatgtccccctgtgagttctgggctgatttgggtctctcatacctctgggaaacagacctttttctctcttactgcttcatgtaattttgtatcacctcttcacaatttagttcgtacctggcttgaagctgctcactgctcacacgctgcctcctcagcagcctcactgcatctttctcttcccatgcaacaccctcttctagttaccacggcaacccctgcagctcctctgcctttgtgctctgttcctgtccagcaggggtctcccaacaagtgctctttccaccccaaaggggcctctccttttctccactgtcataatctctttccatcttacttgcccttctatactttctcacatgtggctccccctgaattttgcttcctttgggagctcattcttttcgccaaggctcacatgctccttgcctctgctctgtgcactcacgctcagcacacatgcatcctcccctctcctgcgtgtgcccactgaacatgctcatgtgtacacacgcttttcccgtatgctttcttcatgttcagtcacatgtgctctcgggtgccctgcattcacagctacgtgtgcccctctcatggtcatgggtctgcccttgagcgtgtttgggtaggcatgtgcaatttgtctagcatgctgagtcatgtctttcctatttgcacacgtccatgtttatccatgtactttccctgtgtaccctccatgtaccttgtgtactttcttcccttaaatcatggtattcttctgacagagccatatgtaccctaccctgcacattgttatgcacttttccccaattcatgtttggtggggccatccacaccctctccttgtcacagaatctccatttctgctcagattccccccatctccattgcattcatgtactaccctcagtctacactcacaatcatcttctcccaagactgctcccttttgttttgtgtttttttgaggggaattaaggaaaaataagtgggggcaggtttggagagctgcttccagtggatagttgatgagaatcctgaccaaaggaaggcacccttgactgttgggatagacagatggacctatggggtgggaggtggtgtccctttcacactgtggtgtctcttggggaaggatctccccgaatctcaataaaccagtgaacagtgtgactcggcaccttgcagtcttcctgtgaacagaatgggcttcaatccaagaagggaggctcagaggactccaagttcatgaaaaggcattaaagcggagggtgaaaagaggtgttttattgatccattgagggcttagcagaatgaagcaggacatgattaagtctgagattagtgagtgaggacactactggttaaaagtgtgggctctggagtcagactgccagggtatcagatccaaccacatgcaaacattttcttagtctctattccccatgtcctcatttatgaaaatgagaataacagtaatacattcctccataggttgggtacaaagactattataaattgtgcattcaggtgcctaggttggcccttgggccatggtatatgttgcgtgaatgttagcctctgtccctgctgtttaatgagttccttgacagtagtgggcatgtattgggagcctggagcaagtgcctaagcatcccctctagggacgctccttcccaggaactaagaagagtaaaagaatgatgactgctagaaggtaatggatgagatggctgctgagtgcttccaaccttaaacatctttgtttaggaactctgagcatcttggaaataatttgctatcaaactgaaaaaaaatcttgaatggacaagggcaaaaacatttgcctgagactttaaacattttttgtgtcatcttggagagtgcttttttgaagctcaaattttcttttattttggcactgatttttaaagtgattctcagatttttgtaagacagctgcaagggttggatgggccctgtcattcactgacctgttaagagccaatttctgaacttccactaaagcatgggctggttgaatcttagaccagtacttgaaaaactttccactgtgattatccaccttggaccagttggacttaatttgagtctctcttcttcccacagtgaaatatccgctaggaaaagagaagaagtctatggagtagataagcctgcagtttggaaaatgaatagttggcatcagaacagcagcaggaggctgggtgtggtggctcacgcctgtaatcccagcactttgggaggctgaggtgggtggatcacgaggtcaggagttcaagaccagcctggccaagatggcgaaaccctgtctctactaaaaatacaaaaattagctgggcgtgatggtgggtgcctgtaatctcagctactcgggaggctgaggcagataattgcttgaacccaggagatgaaggttgcagtgagtttgtgccactgcactccagcctgggcgacagagtgagactgtctcaaaaaaaaaaaaaaagaaaaaaaaaaaagaaacaacagtagcaggagctatagaacagccctgggtagaacctaaaagacccaaattatcatctcaaacttgcattgcacttaagtgggctgtaaattataaacaaagggtgaaaagttctactgtggccaaaggtaagccagacactctgctagcaggagtgcaggagtcgagagccaaacggtgcggctagcagagtgcccagtgcaaaggggtgggaaggagtgagattgagaatattaaaaaggtacttagaagagaacttgtaagatttttactggccaaatttaaaacatgactgagcactatttttcatacaggcctcctactaataagaaaaacaattttgagataactacttatttgagttcacagttaatgttcctgatgattaagatcagttgcaaatgttcatctgtcaatgcttatctacaatgagacttcatgtattcatttctgaaagtgtcttttcagggtgaatggtgctattgattagcactaatactaattattagtacattatatataattacaatgagatatacacacacatacacacacacatatatacatatacacacacacaatgatatataattaatatataattgtaccccaaggggtgcaaaggagatgtgttgccaggtggagaggctaccgcttggcagttctgggaggacttgctccctgtgcactgtgaggcaggctttgcctttcagacctgcctttgggtagggttcagatcactttctaactctggaatgtcctagaatgtagactgcctgcaggcttccatgtcccctgcttttccctgacttagcctgttgcctccctgccctcctgttggttgtctaccagtagagagcactttgtgtgcacttggctgctacattagttaggtgatcttcaacaagtgttgatggtgagttgctgtggcaggtgctttttttggcactgaggcaaaatggtgagtaagatggctttcaagcgttgtaccttctcgacgtgggaagatgaccagtaagcagaaaaacaaacgagatcacttaagagagcaaccaggagtgttgggcatctcacagccattagctctggtgtgaaggacaaatctaaaagcaaggggactgtgtgttcattttctggggtcacaaaactaaggagcaaagccagtattcaaactgcatatattattatctattgccacaaaacctgttaccctaaatggcttcagacaacaataatcatttattatccatcatggtttttgtgggctagaaattcagatagggtacagtggggagggttcaccctgctccacagcatctggaagatctgaagtctgagggttgttgtccaaaagatccttcactcagcatctaaaggaggtattggctgtcagctgagacccctacacatgacctttccatgtggcctggtattcctcatgacctaatgacagttccaaaggcaagtggaggcagttgtagagagtcagccaggtttaagctgtattttttttttccctgacaaagccttgaaagtcacgtagcatcacttctgagatattccactggtccaagcagtcacaaggccatgcctaggttcaggagaggaaacacttcacctgttggtgggatgagcgtaagtcacactgtaaagagaacatgtggaatgggacaaatgtgtgttgcaggctgctttggtaaaagcagtctgctgcatctggtctgcctgctgcaaagccagtgttcacttcactttaacatgttctttgtccgccctctgagctgagcaccctagccttgtatatttgctgtcatacagcctcttaccaggccctggattcctctggatgcttgggggccagctgtgatctcaccccagcagaaaatgggaagtgttgaagatggtcctgccaattgctcctcccacagtccttggtagttttaggacaccctggataggcaacagtttgtttatccactcaggcttttgaaacagataattctgtgactttgcccttgagggaagctatcacttgacatgaagcttaccaaaaggtaggcttcatgttaagggaggctgtcacttgaaggcaggcagaaaggtgctattcattagccaccttatggtgggttcatgttaagtgacagcttccctcaaatgggatgctactcaaaatatttaaccagtatggcatccacttacatggctccctggagtgtggaaggatatgctggagactctcctggaaggtgagttcagcaccagcagcagctgtgatagggacacgtactgaggcctgtgtgggctggacactgggactgatgcagcaaagctagggagacagatgcagaagcaacgtcatgtggcctgcagagtgcattccccaggtgtgtgtagggagtgtaggaaagaaaatccttttcctcttcctgtcttaggttctccagccgtggctgtgtaaattagagtggcataagacagattaatgagagaaaaacaaatagaagtttattaacatttgcttcatgcatgtacacatgggagtacccagtggtgaacaatgcaaaggggcagttagaatttgggctcatggctgggtgtggtggctcatgcctgtaatgccagcactttgggaggctgaagctgggggatcacttcaggtcaagagtttgacaccagcctgggcaacatggtgaaaccctgtctctactaaaaatacaaaaattagccgggtgtggtggcaggcacctgtaattccagctactcggtagggtaaggcaggagaattgcttgaacctgggaggcggaggttgcagtgagcagagatcgtgccattgcactccatcctggttgacagagcgagactctgactcaaaaaaaaaaaaaaaagaatttggagctcatatagttgccccttgaacaacttggggtttagggttactgaccccacacacaaacgaaaatctgcacataactgttgactctctccaaacttagctactaatagcttactgttgactgaaagccttactagtagtgtaaacagttgatcaacacatattttgtatgctatacatcttatatatgtattcttataataaagtaagctagagaaaaggaaatgttatcaagaaaattgtaaggaaaatacatatagggtactatactgtatttattgatgccttaagtttacatcatttacatgatgaatcgtctgtctgaaatggcagcaaccccagcaacagaccttgatctatggtgtatatcaagcaattcaactttttatagagtcatgactttgcttcttgggagaacttccagcatcactgttggcacttcatatgggccctatggtgttatttaaggttcacagtattgctctagacatgatgaaatatatgcaagaatcttgagagaccactctttactgctatacacaatttactggatagatgaactgctcatgcagagatgattagtgtcacttggcattttaggcagatacttgcaacagttgagctctttgcaatagtaagaggaggtggctatcaaattacagtagaacagtatacactacagttaattttatgccgttatgatttaattctgcatcttttgttaagctttctcttgactttgagtggcttatgtatggtctgtaagtgtgtgcgtaagttttgataaattttatttattttttgagacatggtctcactctgttgcccaggctggagtgcagtggcgtgatcttggctcacttcagcctcaacctcctaggctcaggtgatcctcctacctcagcctcctgggtagctgggactgcagatacatgccaccatgccggacaaattttttgtatttttagtagagatggggttttaccatattgctcggattggtcatgaactcctggattcaagcaatctgcccacctagcctccctaagtgcctggccaaatttttggtttttatagtagatttgtgtatattttttggtagtatctacatatattttatacatttatttgttgatgaaaaaagtaaaatttgtaaaatatttgaagaggtttattctgagccattctgaggagttcctgagaacatgtgcccaaggtggttgggttacagcttggtttcatacattttagggagccagaagttgctgacaaagacataaatcaatacatgtaaggtatatattggttcagctcagaaaggcgggacatctcgaagcaagggagctcacaggtcatagggggattcagattttctgattgccaattggttgaaaaagttaagccctgcctaaagagttgaagtcagcagaaagaaatgcttgagttaagggggcgtggaggtggcgttgggggagatgtttgtggaagcaaagattcttgttacgtagatgaagcttccaggcctcagaaagaatagatggtaaatgtttcttatcgcaccttaaaagatgtcagactcattagtaaaatccctcctggatcagaaaaagacctggaaggggaaggggattctctacaaaatgcaaatccccatgacaagaaatggctttgcagagtcatttcaaaatgtcaaataagtatattttggggtaaaatactttgatttccttcagggcctgctatctgtggtgtgatgctgtatcagagtcaggttggagttgactattttattgctacagagaatcttttgtcagtcttatgatctctattgtaatgttaatgctggtcagttgtccctaaactccagaggaaggagggtatcattggcatgtcttacctttcttcctgtcagttagggggcttagaattttatttttggtttacacatgacatacttttctcttatttatttatttatttatttgagatggagtctttgtcgcccaggttggagtgcagtggcaccatctcggctcactgcaacctccgcctcctgagtttaagcgtttctcctgcctcagcctcccaagtagctgagatcacaggtgtgtgccaccacgcctggctaattttttgtattttttaagtagagacggggtttcaccgtgttagccaggatggtctcgattgcctgacctcgtgattcacctgcctcggcctcccaaagtgctgggattacaggcgtgagccaccgtgcccagccctatttatttttttaattgaggctggagtgaggtggtgcaatcacagctcactgcagcctcaaccacctgggctcaagagatcctcccacctcagcctccctagtaactgggactacaggtgcgtgccaccatgcccagttaattttttttttttttgcagagatggggtttccccatgttacccaggctggtctccaactcctgagctcaagcaatgcatccatcttggcctcccaaagttctgagattacaggcatgtgccacagcacctggcccattaatttttccagtgcttctaagctatgtggtttgtgagttttttcaaattgtcacaaatctccaaaaattttcaatatacttactgaaaaaaatcatgtgtgagtgaatccatggagttcaaatcgtgttgttcttagcaactgtataacatcttggctaggtaaaggaaaaggagtttggggcttctgggtgagtggtagatgggcaggcaagttatgggaaagtgaccaggaaaatatggaacaaagtggtttagtaaggtttgttatgtggatttaaactgtcttctccattagtagagttgtacctttacagatagaaaaggtttgttatgtagatttaaactgatgtcttctccattagtaagagttgtacctttacagatgtgaatttatttacaaaaggaaaacttgtatcctgttttacagcattcactagtctgatgattttcaattgttagctcaaaataatccacatgctaaagatagtttgaggtggcatatactggtacccttcaagggtgagcgattaattctgcataggaggagccagaaggtttccccttccctgggagatagaaggataagacagggctgggccctacacataagcatctattcatgattcggtgagcccttcagacgtttgaggtttattttattttattattatttttttgagatggagtctcactctaactcccaggctggaatgcagtggcgtgatctcggttcaccgaaacctccgcctcctgggttcaagtggttctcctacctcagcttcccaagcaaggggtttacaggcacctgccaccagccctggctattattattattattattatttgtatttttagtagagactttttaatttttattagagacttcatatttttagtagagacgaggttcttgaataatgttcctttaaggcttccaactcacatgtcatgttagaatgaatagttaagtgcctgccctcaggagacctaaatcatgtaggtttgaaacatctgtaagggatccttttttttttttttttttctggttgtattcaattcagtagcttctgtatctttctgaaataatctctaccttcctgcttaatcattttgctcctcggtgtaactccttcccccacatctccctatcttaatgcacaacatgcttatttttgtctttagccttttctgttatagaaccaaactggggtctgcttgcctggtgcaataaaaccagatacttacaccaaggattgcaccaatagaaagaaaggcatttgttgcaggacactacgcagggaggaccaggcagctaaacactcaagtcctggcctccctgatgtcttgcaggcaagggtattagcggcagaatgtatcagagttacatggcatgaaaatatgttagcagctgcgaatctgtacaggtctgcagcaacctcaatttttgcctcctcagaagaaagaatctgactgaggggcataaagcagagtaagagaccgaagcaaattttagaacaggagtaaaagtttattaaaaagctttacagcaggaacaaaataaagtaaagccaacttggaagggggccaagcaggcaacttgagagatcaagtgcgtggttttgaccttgacttagggttttatatgttggcagggttccagggtcccttctcccctgaatcttcccttggggtgggctgtctgcatgtacagtggcctgctagtgcttgggaggggctgcatgcacggtatgtttactggagtagtatgcatgctgacttgaggcattcttcccttaccagggagtgttcctataaggttataaaccagttaaatgctgtcatttctcccttagtgcccatgcatgagcccacttgcccaactcctgagatcttagtttcaggtttttctatttattgggagactgtttttccctggcacaggctgtgaccaatgattattttagagagacagcttaacaaccgcctatcacctgatggttgcctgacattcctggtggggaaggaggccctttcctgccctgctcgtgtctgactaactattgtaacatgggtttttaaaggcaggggtaaggcagtgtgcagtggctcacacctgtaatcccagcactttgagaggctgaggcaggaagatcacttgaacctaggagttcaagaacagcctgggcaacaaagtgagaccccaactctacaagaaataaaaaaattagccaaatatggtggcatatgcctgtactcccagccactcagaaggctgaggtgagaggatcccttgaatccaggaggttgaggctgcactgagccatgattatgccactgcactccagcctggacaacacggcaagaccctgtctcaaaaaacaggaaacaaaaaaaggcaggggtaaatttcagaaaagcagaagctacaaggaacattggaaatcagtgcatagaggttccacatttttttttgagatggagtcttgctcggttgcccaggctggagtgcagctgtgtgatcttggctcactgcaagctctgcctcccaggatcatgccattctcctgcctcagcctcccgagtagctaggactataggcacccaccaccacgcctggctaatttttttttttgtattttttgtagagatggggtttcaccgtgttagccaggatggtcttgatctgacctcatgatccgcccacattgcttcccaaagggctgggattacagccgtgagccaccgtgcccggcctccacattggttttgatctaaaagggtgggatatcttgaatcagggacttacaggttataggtagattcaaagatttttctggccaggtgtgggtcatgcttgtaatcccagcactttgggaggccaaggagagaggatcccttaaggccaagagtttgagaccagcctgcgaaacataacaagactctgtatctacacacacaaaattttttttaattagaggctgaggcaggagaattgcttgagcctgggtggttaagctgcagtgagctacgactgcaactgcattctggcctaagtaacagagcaaaagcctgtctcaaacaaaaacaaaaaaaccccaaatttgcaattagttaaggaagagaacctttgtttaaaaatttggggtccagtagaaaaatgttaactgcctagaaggtgttactttctccaagctcctcaggaagaaacttagaacaaaggatgatggttataaagttcagtcattttcctgtcctctgaggtctatgccagcagattcatttggtggggttccgagtttctgagagacaacgcagagacatatgttaagaggttatctttagtttctatgaggaaagcaaacctattcagaacgcttaacttccttggctattgtcttaggctgctattaccttgttgcttttcaagttgctacttatttctcagagccagctaggtgcctggaattttccttgaagaaacacaggattttgctttatttccatgcttaggagtccccaagcccctaaaaagggggtctttgcatcatctcatttctacacagtcagcaaatacttcttattttgtttactcttctgtggttcaaacctctaagaggcttccatgatcactgccgctccaagcactcacacacattattctttaattctgtattcctgtagactcttatttgctccaattcagttgtgtaactgtcatgtatgctggcactatgtgcctgaccatccctattttcactggacattgtgggggttgtgactgagtaactttatattggattttctcacagagtatccaatagatgactgtcacatggaaacaatgaatttaggataagagatgttagtcctaagtcctatgttaaaccatttattcaacaaagcagattcttttagactactttatttaattctctgttgcatttcccctagagtcagtctagaaacgattttactatatacaaacattatagcctctggctgtagggagatgataaacaggagaaaagtgtagacatttctaggtgccagtaagagaaagcagatagagggggtcatgaaaaaaaggtcttactacagtgatttgaaaagtggaattaagcttagccttacctgtagggctgagattatgattatgattatgattatttgagatagagtctcactgtgtcgccctggctggagtgcagtggcatgatctcggctcactgcaacctccgcctcccaggttctcctgccttagcctcctaagtagctgggattacaggagcacgccaccacgccaggctagttttttttttgtatttttagtagagacagggtttcaccatgttggtcaggctggtctcgaactcctgacctcgtgatccgcccgccttggcctcctaaagtgctgggattataggtgtgagccactgcgcctgactgattaggattattaaatataaaatgggggctctacattaagattagaatatgctctaataacgaggtcaaggagacaataagattaacacaaggatggctaggataaagattaggattataatagaattaatgttgctgttctgtgctgatgccaggataaatgttgaatcaaaatcattttatgttggaactagaaataaaactaagattttcctttttcttattttatcggcgtgtactcaaaagggaatttggtattgctgcccttgccagggaaaagctgggagacagcgtatgtgggattggaaccccagaaccttttatatattctctttggagagtaagattcattcattcattcattcattcacttatacatttataaaactgggtgccaattttatgcaaaattctggtccttgccttctgagagcctgaaatctagtgggtgaactaagccagaaacacacacacaatgaactgtaacacaactttttccaaaagttttattgttctgttgtttcttatgctttgaagtatttgaaaaactcttattttaaggaagtgaaaccccttcagctgggggatcatttagatatagttttagattgaaatgatttcctcaaagcttgttgagaagttgaagcttttcacctgggcctgggaggcattatttttaccaaaaggcaaggttaagagcaaggagtctggagccagttttcctgggttcaaatcctgtcttgcacatttgcaagtggtaacataaattctgtgttttagtttttacctctgaaaaaggataataatattatctgcttcatagtgttgttataagggttaaataagtcaatatgtgtaaattgcagggggttcctgactttgaccattttttgactttataataatgcaaaagagatacattcagtagaaaccgtactttgagtaccaatataaccattctgttttttcacttttagtacagtattcagtaaattacatgagatattcaaaactttattataaaatagactttgtattgaggattttgctgaactgtaggctaatgtaagtgttctgagtatgtttaaggtaggctaggctaagctatgatgtttggtaggttaggtgtatgaaatgcatattcaacttacaatattttcagtatatgataggttttttgggaggtaacatcattataagtcaaggagcatctgtactttaagtgttacttgggttaacataacaattacataaatgcttatagtatcataaccatatctatgtctttgagcaaagtacagttcggatgaccctggagcagaagtctgggatgtcacatgcaataccatatttggccggtagatgacaccaaggtccacaatgtgccagcctaaacatgaagatatttttgtgtctttttggctgctcctttacctgcgatttgtgggcattgtaagagaagaaataggactgaagaagctaagtttcctttgtaaggctcaagcctgaaatactgggatatttgattatggtgtgaaagcaacagtgtgtatttgagagttgcctgactgaaaattatggggcctggattttagttctgatgctgtggacactgtgtgttcttgggtgagtttccgaacttagctgggcttcagcttccccttctcttttgctgttatttgaggaataaaatagaatgagaatacaaaacagacatatagtgaagtgggaaaaacatgagggagaagcaaagaagatatggtaggaattagaattggaggtgaaggaatagtggggatatggcaagggaggggaattaaaaatggaagtgataaaggtaggaacatgactatggaggcgaagacttaaagtagaaaaaaatataaaatatacttgatgcctataatttttcgcataaagatacctccctttactacatttcagtcgctgtctcttgcacacatacatgcacacacacagacatgtggctttcatccattcccacaatgtaatgggtgtgaagaaggcagaggggcagggaactcaaactttctgataaaagcacatagaatctcctctcttttaaagcacattaagcagctctccctcagctttgtgtgagccccatttccttccccagcaatctcctgaatgccctggttacctccttgttcctcagggtgtatatgagagggttaagtgaaggagtgcccactgcatagaagagaccaaagaacttgcccctctcttgggcatagggatttttgggctggaggtagacagcaatgactgagctgtagaagagggtgaccacagtgagatgggaggagcaggtcccaaaagctttcctccgcccttttgcagagttaatcctcagcactgcccaggtaatggctccgtaagagacaaggatgaggctgagaggcacaaccaagatgaagacactggcaacagccacctggatctcattgtaggaggtgtcttcacaggagagtcgaattagagctgggacctcacagacaaaatcatccacctgccgatcggggcagaagggcaggtgcagggtggatggtgtctggaccactgactccactagcccaatgacccaggccacagatgccagctgccagcacaggcgggggtggatgatggtggcatagtggaggggctggcagacagccacgtagcgatcaaaagccatca

SEQ ID NO: 1042 - protein, 866 aa, Homo sapiens
MGPGAPFARVGWPLPLLVVMAAGVAPVWASHSPHLPRPHSRVPPHPSSERRAVYIGALFPMSGGWPGGQACQPAVEMALEDVNSRRDILPDYELKLIHHDSKVALDMGCDPGQATKYLYELLYNDPIKIILMPGCSSVSTLVAEAARMWNLIVLSYGSSSPALSNRQRFPTFFRTHPSATLHNPTRVKLFEKWGWKKIATIQQTTEVFTSTLDDLEERVKEAGIEITFRQSFFSDPAVPVKNLKVYKERLFGKKYVWFLIGWYADNWFKIYDPSINCTVDEMTEAVEGHITTEIVMLNPANTRSISNMTSQEFVEKLTKRLKRHPEETGGFQEAPLAYDAIWALALALNKTSGGGGRSGVRLEDFNYNNQTITDQIYRAMNSSSFEGVSGHVVFDASGSRMAWTLIEQLQGGSYKKIGYYDSTKDDLSWSKTDKWIGGSPPADQTLVIKTFRFLSQKLFISVSVLSSLGIVLAVVCLSFNIYNSHVRYIQNSQPNLNNLTAVGCSLALAAVFPLGLDGYHIGRNQFPFVCQARLWLLGLGFSLGYGSMFTKIWWVHTVFTKKEEKKEWRKTLEPWKLYATVGLLVGMDVLTLAIWQIVDPLHRTIEVPLERRCYGQENEQGSVAIRALGLCIFYGYKGLLLLLGIFLAYETKSVSTEKINDHRAVGMAIYNVAVLCLITAPVTMILSSQQDAAFAFASLAIVFSSYITLVVLFVPKMRRLITRGEWQSEAQDTMKTGSSTNNNEEEKSRLLEKENRELEKIIAEKEERVSELRHQLQSRQQLRSRRHPPTPPEPSGGLPRGPPEPPDRLSCDGSRVHLLYKVNPQHCPGNGSVRDKDEAERHNQDEDTGNSHLDLIVGGVFTGESN

SEQ ID NO: 1043 - DNA, 1510 bp, Homo sapiens
  source (1)..(1510)
  CDS (201)..(1310)
ctgataggtttttttttttttttttttcagatattctgatggcaaaacaagtggaagaaaagaggaagcatgactgcagatcagatcagttctctttgtggattatattttcagtaaaatgtatggatctatcttttccttgttcttatatctagatcatgagacttgactgaggctgtatacttatcctccatccatctatggcgaactatagccatgcagctgacaacattttgcaaaatctctcgcctctaacagcctttctgaaactgacttccttgggtttcataataggagtcagcgtggtgggcaacctcctgatctccattttgctagtgaaagataagaccttgcatagagcaccttactacttcctgttggatctttgctgttcagatatcctcagatctgcaatttgtttcccatttgtgttcaactctgtcaaaaatggctctacctggacttatgggactctgacttgcaaagtgattgcctttctgggggttttgtcctgtttccacactgctttcatgctcttctgcatcagtgtcaccagatacttagctatcgcccatcaccgcttctatacaaagaggctgaccttttggacgtgtctggctgtgatctgtatggtgtggactctgtctgtggccatggcatttcccccggttttagacgtgggcacttactcattcattagggaggaagatcaatgcaccttccaacaccgctccttcagggctaatgattccttaggatttatgctgcttcttgctctcatcctcctagccacacagcttgtctacctcaagctgatatttttcgtccacgatcgaagaaaaatgaagccagtccagtttgtagcagcagtcagccagaactggacttttcatggtcctggagccagtggccagcagctccaattggctagcaggatttggaaggggtcccacaccacccaccttgctgggcatcaggcaaaatgcaaacaccacaggcagaagaaggctattggtcttagacgagttcaaaatggagaaaagaatcagcagaatgttctatataatgacttttctgtttctaaccttgtggggcccctacctggtggctgttattggagagtttttgcaagagggcctgtagtaccagggggatttctaacagctgctgtctggatgagttttgcccaagcaggaatcaatccttttgtctgcattttctcaaacagggagctgaggcgctgtttcagcacaacccttctttactgcagaaaatccaggttaccaagggaaccttactgtgttatatgagggagcatctgtaaatctttagccttgtgaaaactaaccttctctgctgagcaattgtggcccatagccatattttgagaagaaattcaagaatggaatcagcagttttaaggatttgggcaacattctgcagtctttgcaatagttcacctataatcctattttaaatctcagagtgatcctgctgactgccagcaaag

SEQ ID NO: 1044 - protein, 369 aa, Homo sapiens
MANYSHAADNILQNLSPLTAFLKLTSLGFIIGVSVVGNLLISILLVKDKTLHRAPYYFLLDLCCSDILRSAICFPFVFNSVKNGSTWTYGTLTCKVIAFLGVLSCFHTAFMLFCISVTRYLAIAHHRFYTKRLTFWTCLAVICMVWTLSVAMAFPPVLDVGTYSFIREEDQCTFQHRSFRANDSLGFMLLLALILLATQLVYLKLIFFVHDRRKMKPVQFVAAVSQNWTFHGPGASGQQLQLASRIWKGSHTTHLAGHQAKCKHHRQKKAIGLRRVQNGEKNQQNVLYNDFSVSNLVGPLPGGCYWRVFARGPVVPGGFLTAAVWMSFAQAGINPFVCIFSNRELRRCFSTTLLYCRKSRLPREPYCVI

SEQ ID NO: 1045 - DNA, 967 bp, Homo sapiens
  source (1)..(967)
  CDS (201)..(767)
ctctctcctacaattaaaagtgaatcattccagccagcgcagtggctcacacacctgtaatcccagggctttggaaggctgaggtggaaggatcacttgagcccaggagttagagaccagcctgggcaacaaagtgagaccctgtttctaaaaaacacataatttaaattttaaaaaataaatgaaaatcctccaataacatgcagcctcttctgtatgaagccaaaacttccttacaaggcacaaaggtgctttccccttgttccttcccatgccctcaactccccagccccctcccagcctgccttgcacccagccctaggcagccacattcttggtgctttctgcctattgttcttggtgctgttcttggtgcttctgcctatagttcttggtgctgttcttggtgctcctgcctattgttcttcgtgctgttcttggtgctcctgcctattgttcctggtgctgttcttggtgctcctgcctattgttcttggtgctgttcttggtgctcctgcctattgttcctggtgctgttcttggtgcttctgccttttgttcctggtgctgttcttggtgcttctgccttttgttcctggtactgttcttggtgctcctgcctattgctcttggtgcttttcttggtgctcttgcctattgttcttggtgccgttcttggtgcttctgcctattgttcttggtgctgttcttggtgcttctgcctattgttcctggtgctgttcttggtgtttctgctattcctgtaacctgcaaggcttttctccacactacaccatggaaagtcctctctagtaaaccgtagcccagcagaaccactcgtgagtcctgtgattccttccaaaccactagacctggggcaccttgggccccagcatggtgcctcactgattttggactgggcacaacacgattcatccaaacaccacttgacaaaggccagcaggac

SEQ ID NO: 1046 - protein, 188 aa, Homo sapiens [sequence omitted]

SEQ ID NO: 1047 - DNA, 12839 bp, Homo sapiens
  source (1)..(12839)
  CDS (201)..(240)
  CDS (962)..(1276)
  CDS (6743)..(6842)
  CDS (11556)..(12639)
  modified_base (3251)..(3350): a, t, c, g, unknown or other
  modified_base (12171)..(12270): a, t, c, g, unknown or other
atagatgtggaagtgttatgttaaatgctatgcaggcagaacagctgatcatgggatgggaggaggcaaaggttgagcaggagcccctgctttggatgttctgctgaatgtgatgtgcctcttctccttagccctggttcacagttccccttcattctccctttctctactgccttcttgcctttctcaactaaagttccatggaggagatgaaggggaacgacatcaaagagtttgagggtataataattgggtcccagcagaaaacaaatggtgcactcagaaagggtttaactgaacagagtttaatggaagaagagagggttaagagaaccagccagaaacggtgaagcacccagggactcacaaccacaggaagctgttaccattgagtgcaaggagagggaagagtgttactgtagtcaggtgagggctagagccatgaaaggggactcacccaataggagcaggctgtggctatagggaaaaacagctgctgaaagaattgggccaggcaggaagggaatcagaagacaaacaccctgacctctctctctgctcctgccctcccatctccttcagggcctggcattggctgaacccagctagaagccagaagacaagggaaccagggcaatgcagaacttagaggttagcctctggggcacacaggagggccaagaaagttggaacctaaatgggatgggggagttaataaagaaaaaccaacattggagaatgagttatgggcaagacagggcatgaagtacaagaccagggtttgagtggttgtaggctgaaagtcttggatcagtgcatcaagttgcaactggagctggggacatgcttgggggaccagggcatggttaaggtttggcacacagagggtctcattagtggtgagaaatcggtaatctcttctttgcctaaggtcctgaccaatatattcctttggtcctaggggagccctcccagcctcccaacagcagttggcccctaagtcagaatgggactaacactgaggccaccccggctacaaacctcaccttctcctcctactatcagcacacctcccctgtggcggccatgttcattgtggcctatgcgctcatcttcctgctctgcatggtgggcaacaccctggtctgtttcatcgtgctcaagaaccggcacatgcatactgtcaccaacatgttcatcctcaacctggctgtcagtgacctgctggtgggcatcttctgcatgcccaccacccttgtggacaacctcatcactggtgagtgcgggcagttggcagcaggagtgtcccctaccccccacttcaacttctcagataaggctggaaatcaaagcttagaagacagatatcattgctgggctggcctcttggccatgccgtggtctcgaactctcaagacagtcttggggctgaagagttagactagaaataagagatttaatgaatttcctgttttctttgtgcctggcatgatgttacttctcatgcattatcttaattcatcctcacaacaatccagtgaagtagagtttatggtcctccccattttatggaagaggaaacatgctcggagtggttaagaaactggtctgtagttacacagctaataggtgtcaaggtcaacattctcacacccatacttctaattattgtattataccattcagtcccactctctcacggagctcgcatgggcagaattagagccagtggggagaagtggaagggaggcaggtttcctctgaatcgggaacgaaaactccactcatttgagctggaaattgagcagggcacagaagagagtcctgcctgtaagtaatgagctctctgtcccttggagtgtctaagcagggactggccggccactcagtggaccacttgacctctaaattcctgccggtgcatcctgcagatgtcagaacagtgccatctactctctactctctcatgcgactggcctttcttgttttagaatcaagtttccaccaacctgagactccaggtgagggactggttttcagagatatggagacccctagaggtctgagcctgcagattctgagctcagagctcccagcagctcactggtcctcaggatccagagcctggacagccctattcagagtgacttcactgactcggggcagagggagccacagcccacgtttctgtaggttctaggacccaggatgtggagccagtgcagagtcagctcccctccacagtaccagctctgtctggtggaaccgttacccactgctgagtcccagcttcctttgccaatgctgaacataaactgcattcctctcctttccaacacatagacacacacacgtgtactcaggcacacatgtgcagagatgcacacatgcatacacataaatacatgcataccagtcaacagtgatataatgaggtcactagctggttaaggtggcgtctccccatctttttcatacactcatatttaaaatattgtttgaatacataaaacattcagatgattcaatagtcaaaaactaccaaaattctccagtgaaaaatctcccttccgcccctgtcctctggcctcccagctcttctccctcctgggaggcaaccagtgttgccagtttcttgtgtctctttcaaacactattttatgcgagtgcaagcaaattgaggacatgctaaggttccaaacagccagtcccgtacttttacttcccaccacaccccacttaaaaatataccatgtatgctgtaaaaaagattcattaaaataaacttacatgttgttatcccatattaataaataaaagagtttctcactattttcaccaactgcttagaattccattgtatggatgtactacaatttattttgatttgtatttatgttgtttctaatagaatcttctgcaattaaataaaacttcacacagcttcactattttttctttcttttttttttttttttttttttttggagtctcactgtcacccgggctggaatgcagtgctgggatctcggctcactgcaacctccgcctcccaggttgaagtgattctcctgcctcagcctcccgagtggctaggattacaggcttttgccaccacacccagctaatttttgtatttttagtagagatggggtttcaccatgtttgcccgtctggttttaaactcttgatctcaaatgacctagctgcctcgggcttccaaagtgctgggatgacaggcatgaaccacnnnnnnnnnnnnnnnnnnnnnnnnnnnnnnnnnnnnnnnnnnnnnnnnnnnnnnnnnnnnnnnnnnnnnnnnnnnnnnnnnnnnnnnnnnnnnnnnnnnngcatgacatgattacgaattcgagctcggtgcccggcctcatttttttgatacagtcttactctgacatccatgctggagcgcagagcacgatcagagcttacttcagaggtcaacctgcctgggcccaggtcctgggactacaggcatgtgccaccaccaatggctaatttttctattttttgtagagatggagttttgtcatgttacccaggcttgtctcaaactcctgggttcaagccatctgcccgcctcagcctcccaaagtgctgggattacaggagtgaggcaccatgcccagctttttcttcctttctttctttttgttttgttttgtgttggttttgttttttttttaactcacatacagaaggttgaatcattcattcagtttacagttcatggcactatgtgatttcactctgttgcaaagctcttcttttgtttatttgtttccttctatatacctattccactctacatctcttctctgacccataggcagccattctgttatatttctgtcttttgtatgcattctcagaaaatgtgctgtgaatggccgggcgcggtggctcatgcctgtaatcccagcactttgggaggccaaggcgggtggatgacaaggtcaggagatcgagaccatcctggctaaaatggtgaaaccccatctctactaaaaaatacaaaaaattagccgggcgtggtcgtgggtgcctgtagtcccagctactcgggagggtgaggcaggagaatggcgtgaacccaggaggcagagcttgcaatgagcgagatcacgccactgcactccagcctgggtgaaaaaagaaaatatgctgtgaatgtgtgcatgttttacatttaaatatttttgttaatatataatttaacatacattaaaatctgcctttttaagtgtatagttccacaggggcttttttgttgttgttgttgttgctttttaaaaagacacggtcttgctctgtcaccaaggctggagtgcggtggtgagatcatagctcactgtgacctcaaactcctggcctcaagagatcttcccacctcagcctccccagtagctgggactacagaaatgcgccaccatgtatggctaattttatttttaatttttgtttttgtagagtcagagtctcactatattacccaggctggtcttgaattcctgggctcaagcgatcctcctgcttcttcctcccaaagtgctgggattactacacctggctgagaatagtatttagaagccaagatctgggttctaggtgtgctcatgggtattggggtgtcatttcttctaggtgctctcaagggacagagctaggaaatatacgtatactaacagaaatatttaacacacatatctttatttctatatctgtccatctgtatgtgtattaacatgagttcagactgatacctctgattctaacccactgtcacagattcattttaacttgaccctcttccttaatggtaacttcattttcagacagtgagaaatctagctgtatttatctacaacatatttacttatttgttcaatcttagtatacacataaggtagtttcattattgctaacatacttctgtgatttgggtttgcctgatattttcccataattaaatccagtttattcagttttgtcaagaatatacaagtttagtaatgacagtacagaatttgtatacagttctttttgctgttatagtatacagtcaaaatactgttttgcaaagttactccagttcgtgtgttccttcttcaccccttcagtgtaaatattattcaatttaaatacaatattattcatttgtaatataattagacttatttgttaatgtttgtattttactttgggtcccccctccccaaccatatcctgatagatgttaattatttatcttgagtaagtgattcattgccatgattctaaaaagtcagaaccatacaaagatatactcagagaggcatcactctcattatctcacctatcccattcatccattatttctacccagttcttatcttctctctgtatggatagctaatctcattattctgatttatcttttctgtatttctttggtacaatgagaaaataaccatatattttcttaatctcttttttctcacatgaagggtaatatagtacagatagtctttatactttgctttttgcaaaccacatgcctgtggttccagctgctcaggaggctgaggcaggagaatggtttgagccaggaagttgaggctgcagtgagccatgatcacaccattgtactccagcctcagtgacagagcgagaccctatctcaaacaaaacaaaacaaaacaaacaaaacaactgatgtctgggtcctgtcactagagattctgattgtaactggcctggcatgggtctgagcatttgttctttgcaaagctctccagatgattctcgtgagcagccagtgtcgagaaccactggcctagaacccaagacagggctatgggagcagagagccaggcagggctggacggtctaaagctcatggaaagaaatcactggtcaacataaagaaaatctcactaatactgttgacccttgaacaacatgggtttgaactgcatgggtccatttatatgagggtttttttcaactaaatgcagattaaaaatacagcaaaacccgtgtatattaggccattctcatgctgctataaggacatacttgagactgggtaatttatagaggaaagaggtttgactcacagttctgcagggatgggaaggcctcaggaaacttacaatcatggtggaaggggaagcacatccttcttcacaagtcagcaggagagagaagaatgagaacggagtgaagggagaagccccatataaaaccatcagatctcgtgatgagaacttactcaccatcacaagaatagcatggaggaaaccactcccacgattcagttacctcccatgggtccttcccatgactcgtggggattatgggagctacaattcaagatgagatttgggtggggatacagccaaaccatatcaccatgtacatacagagggctgcctttttctatacacaggttctgcaaggctgactgcaggacttgattatgtgtggattttggaatacttgggggtcctagaaccaatgcactgtataaacgaggggatgactgtagtgagaactgtccatggttttatgggctggttggttcctcatttctgaaagtctgcaagcagagaccagataacacctagcaggtcatggaggaaagatccaagctcagaggggacctggcttggagggctttcagtctctggctcttgatgcgtgggcatctctcactctgtgggggcctctgtcattgcagggtggcccttcgacaatgccacatgcaagatgagcggcttggtgcagggcatgtctgtgtcggcttccgttttcacactggtggccattgctgtggaaaggtgagaggtttcctggctggattatgcctgagccaactagggcctggcattaagaggagccactgcctctaatgctgggttggctggaaggctggggctgcaccatggtaagtggggctaaatcctgagccacaaggagaagggccctgggcccagctgccctctccctaaacttggggaacctgatgaggacactaccacccccttctggaaggcctgaaggtagccttggttggcttttgttgggattcctggggcctgtgaggagctcaagagcagtccttatttcctgagcagcaggaatcctgccacctctaagtctgagccaggtgagccagagctaagggggccagcttatgggtgggtcacggtatggctggggaggaagggtttctccctgctccttattctgtccccactggctccttgctggttcccggcagcccaggctgtactcaatccccacgttcaccgcttctcgtctctcagcctcatattccatcagattccctggtaagtataaatctatcatgtggccaaaggtatggagcagagccagggagaaggaggcttgcaatcaataaagcactgaacccaggaggcctccatattgcactacatgagtgctcctcccccacagcattgttagcaggggaagggcaccctctgggtgcttcaccccagggaaaggtgggcaggcagatcagctggagatttgctcactcctgccttggtgtatcatgttgggtgggtcacctaactactctgagcccttgtagtctcatctgtaaaatggtagctaccctacaggatggttgggaggcttcagtgagctcctgcttgtaaaagcttatgcacagttcttggcatagagtccaaatatcagttgctaatagtatgttgtttcttctgcacacccatcccctcctccttgttctctccccagcacaggcatatcttaaccctgccctttgtggaatctagtgttcacatcctctctccacctcaagcccagttttttgtaactcagtgaagtaggcagctggagtaatgaagtgggttctactctccacaaggccactaactagctgggtgatcaggagaagtcccttcccttcatcgacctttgttttgttatcattgttgaaggaaatgagagtgtacaacttctcccagtggtgtttgcagtattcttcaagtcccacctcatccaggaagcctgcccagattaccccaagattctcctccacccatttactgctattgcattcatagccagcactacaggctttaagaattatttattctctggagatttctttttctttctttctttcttttttttttttgaggggggagacagagtcttgctctgtcacccaggctggagtgccatggcgatcttggctgactgcaacctctgcctcccgggttcaagccattctcgtgcctcagtccccggagtagctgggattgcaggtgcgcaccaccatgcatggctaatttttgtctttttagtagagaagggtttcaccatgttggccaggctggtctcgaactcctgtcctcaagtgatccaccctcctcagcctcccaaagtgctgacataagccactattctctggagctttcttgagtatgtgaagtatgaagccagtaggtcaaagtcatataggttgagataacaaggcctgagtcaggctgtgggagaggtaaaaggtcaggctatcaggccaaaaactgggttggcaggagggcaggacacagtgtagcgaagtggaaaggacacttgactgagagtcagctctagacctatgttccagggcaggctctgactccaaacagccatgtgaccataagacccccactgggcaagctttcccctccattaaacaagtaagattgactggacattcttcaggtttctattttctggcatcagtagatgacagaagccattctggggaataggagcccctcctttttcctcactattaagcatttgaaatgtctcaagaagtgtggtcagtgtcatctcacttaatcttcacaactacccaacagagtaggtcatactatgggcttcattttacagatgaggaaactaaggctcagaaagtattttgagtaacttcccctctggtcattcatgcatttatctaatcacaacctaggaatactgagatgaaaagtcaaggcatctgccctcacagagcttgcagttgagcaatcgtctttgaaccatgctgcagggggaggtttttacctccccctacagcagctgttttcaactctggttgcacagtagacttctccaggagctttttttttttttggagacaaggtcttgctctattgccttggctggagtgcagtggtctgatcatggctcactgcagtctcagcctcaacctcctgtgaaggggtggcctgcctctccacacctgtgggtatttcaagtcgggtgggatgagagactgagaaagagaaataagacgcagagacaaagtatagagaaacaacagtgggcccaggtgaccggtgctctgcataccaaggacctgcgccggcaccggtctctgagttccctcagtttttatttattattattttcattatttcagcagaaaggaatgtagtaggagggcagggtgataataaggagaaggtcagtaacaaacctgtgagcaatagaatctatgtcataattaagttcaagggaaggtactgtgactggacgtgcacgtaagccagatttatgtttctctccacccaaacatctcagtggagtaaagaataacaaggcagcactgctgcaaacatgtctcacctcccaccatagggtggtttttctctcatctcagaactgaacaaatgtacaatagggttttatactgagacattcagttcccaggggcaggcaggagacagtggccttcctctatctcaactgcaagaggctttcctcttttactaatccacctcagcacagaccctttacaggtgttgggctgggggacggtcaggtctttctcatcccatgaggccatatttcagactatcatatggggagaaactttggacaataccctgctttcaagggcagaggtccccgcggctttccgcagtgcattgtgcccctagtttattgacactagagaatggcgatgacttttaccaagtatactgtttgtaaacattttgttaacaaggcatgtcctgcacagccctagatcccttaaaccttgatttcatacaacacatgtttttgtgagctccaggttgggtcaaaatggctggggcaaagtggctggggcaaagctacaaattaacaacatctcagcaaagcaattgtttaaagtacaagtctttttcaaaatggagtctcttatgtcttccctttctacacagacacaataacagtctgatttctctttcttttccctacactcctggactcaagtgattatcctgcctcagcctcctgtgtagctggaagaataggcaagcatcccctcatctggttaatttttttggtagagatggggtttcaccatgtttcccaggctggtctccaactcctgggttcaagtgatcctcctgccttggcctcccaaagtgctgggattataagcatgaaccatggcacctgaccccaggagctttaaaaacaaaaacagcacataacaaataatgctaaaaccactttctagactaattaggttggaatccttggcctgaaaaaataggcacgggttttgtctttgttgttgaaatgcttcaggagagtctcatgcacatggagggtttacagctactggtttatatggcatatgaagcaagacaaatctgggttcaagactggtccttgcaacttgctatgtgaacttgagccaactgcttaacactcgagtcccagtttccttgtctgtaaatcaacagtgtagtaactatcttaaaggcctcacctttaaaaaataataaagggtgtaataacagatgctgagttgtcctcatgaggaaataaatggtgcagacttgtccttgcattgtagagatactgatactatggccaagatgacatagggacagcctgacatgtaggctctacatctgacctcctgaggttttctggagaatccataaacagaaactgtgttatttgacgcacctaatcgtccttgtcgaggacagactgcgcactctgatcgctctgctagctgccagctaatcagttgacccccaaaagtacacaaatggccccgcaaggaggctcatatctataatcccagaaattcgggaggccgaggccggaggatagcttgagcccaagactttgagactagcctgggcaacacagtgagacctcatctctccaaaaattgaaagaaattagccggcgaggtggcagcgcattcctgtggttccagctactcaggaggctgaggtgggaggagaggatcacttgagcccgggaggtggagactgcagggagccgtaatcgcgccactgcactccagactgggcgacagaaggaggccctgtctcaggaaaaaaaaaaaaaaaaggagaaaagtgcaaaagtgcacacaggattcattgttcccacacgatctgcggtttcctcctcccttctcataaatcctgtagctgcctttgttctttgactactcagccaattcaggtctgagctgttcttcgacgccgccctagatgcgatgatgaaggtcaggtgcccgcatcccacccaccgtcccctcgcaggggccctaggacccacccagatcccgcctgtctctctccccgcggcaggttccgctgcatcgtgcaccctttccgcgagaagctgaccctgcggaaggcgctcgtcaccatcgccgtcatctgggccctggcgctgctcatcatgtgtccctcggccgtcacgctgaccgtcacccgtgaggagcaccacttcatggtggacgcccgcaaccgctcctacccgctctactcctgctgggaggcctggcccgagaagggcatgcgcagggtctacaccactgtgctcttctcgcacatctacctggcgccgctggcgctcatcgtggtcatgtacgcccgcatcgcgcgcaagctctgccaggccccgggcccggcccccgggggcgaggaggctgcggacccgcgagcatcgcggcgcaaagcgcgcgtggtgcacatgctggtcatggtggcgctgttcttcacgctgtcctggctgccgctctgggcgctgctgctgctcatcgactacgggcagctcagcgcgccgcagctgcacctggtcaccgtctacgccttccccttnnnnnnnnnnnnnnnnnnnnnnnnnnnnnnnnnnnnnnnnnnnnnnnnnnnnnnnnnnnnnnnnnnnnnnnnnnnnnnnnnnnnnnnnnnnnnnnnnnnntacgctttccctttggcgcacgggcgggccttcttcaacagcagcgccaaccccatcatctacggctacttcaacgagaacttccgccgcggcttccaggccgccttccgcgcccgcctctgcccgcgccggtcggggagccacaaggaggcctactccgagcggcccggcgggcttctgcacaggcgggtcttcgtggtggtgcggcccagcgactccgggctgccctctgagtcgggccctagcagtggggcccccaggcccggccgcctcccgctgcggaatgggcgggtggctcaccacggcttgcccagggaagggcctggctgctcccacctgcccctcaccattccagcctgggatatctgagggggtccagggagggcgggacgctgcctcagggccccgattggacacgagatacatgcaggcgatagcggcctggtgtggttaggtgaggatgcgtggtccctccctctccagagccaggcagtggtgggcagctgctggtgatgtcttctctgctgccttcaccctcagtagaggcaaatgcgggggacgggaaggaa

SEQ ID NO: 1048 - protein, 512 aa, Homo sapiens
  MOD_RES (357)..(390): Variable amino acid
MEEMKGNDIKEFEGEPSQPPNSSWPLSQNGTNTEATPATNLTFSSYYQHTSPVAAMFIVAYALIFLLCMVGNTLVCFIVLKNRHMHTVTNMFILNLAVSDLLVGIFCMPTTLVDNLITGWPFDNATCKMSGLVQGMSVSASVFTLVAIAVERCDDEGQVPASHPPSPRRGPRTHPDPACLSPRGRFRCIVHPFREKLTLRKALVTIAVIWALALLIMCPSAVTLTVTREEHHFMVDARNRSYPLYSCWEAWPEKGMRRVYTTVLFSHIYLAPLALIVVMYARIARKLCQAPGPAPGGEEAADPRASRRKARVVHMLVMVALFFTLSWLPLWALLLLIDYGQLSAPQLHLVTVYAFPXXXXXXXXXXXXXXXXXXXXXXXXXXXXXXXXXXYAFPLAHGRAFFNSSANPIIYGYFNENFRRGFQAAFRARLCPRRSGSHKEAYSERPGGLLHRRVFVVVRPSDSGLPSESGPSSGAPRPGRLPLRNGRVAHHGLPREGPGCSHLPLTIPAWDI

SEQ ID NO: 1049 - DNA, 1366 bp, Homo sapiens
  source (1)..(1366)
  CDS (201)..(1166)
gctataaaggtgaccctggaggcagatctgggctgagtgagtcacaggagtgggggaaggttaagcctcccggtcatggtctgttacataaagaacctggaggggagagctctgaagctggaaattcgaggggcacccaggggtcccccgtggtcccagcaacacagaatttcacattggtacatcttcctctcgtagggatgaaccagactttgaatagcagtgggaccgtggagtcagccctaaactattccagagggagcacagtgcacacggcctacctggtgctgagctccctggccatgttcacctgcctgtgcgggatggcaggcaacagcatggtgatctggctgctgggctttcgaatgcacaggaaccccttctgcatctatatcctcaacctggcggcagccgacctcctcttcctcttcagcatggcttccacgctcagcctggaaacccagcccctggtcaataccactgacaaggtccacgagctgatgaagagactgatgtactttgcctacacagtgggcctgagcctgctgacggccatcagcacccagcgctgtctctctgtcctcttccctatctggttcaagtgtcaccggcccaggcacctgtcagcctgggtgtgtggcctgctgtggacactctgtctcctgatgaacgggttgacctcttccttctgcagcaagttcttgaaattcaatgaagatcggtgcttcagggtggacatggtccaggccgccctcatcatgggggtcttaaccccagtgatgactctgtccagcctgaccctctttgtctgggtgcggaggagctcccagcagtggcggcggcagcccacacggctgttcgtggtggtcctggcctctgtcctggtgttcctcatctgttccctgcctctgagcatctactggtttgtgctctactggttgagcctgccgcccgagatgcaggtcctgtgcttcagcttgtcacgcctctcctcgtccgtaagcagcagcgccaaccccgtcatctacttcctggtgggcagccggaggagccacaggctgcccaccaggtccctggggactgtgctccaacaggcgcttcgcgaggagcccgagctggaaggtggggagacgcccaccgtgggcaccaatgagatgggggcttgagagccgcccacaggtgcttcccacctgtgcgagcccatgccctggagattcccgagccgtgagctgcctcccacctcgtccctgccaagtgtctggcccgccttcttgggggagccccaaggactttgcagctgcatgtgggggtcacttccctgcatgtcaaaactccccacaacacctgtgtcctggatctcacaatg

SEQ ID NO: 1050 - protein, 321 aa, Homo sapiens
MNQTLNSSGTVESALNYSRGSTVHTAYLVLSSLAMFTCLCGMAGNSMVIWLLGFRMHRNPFCIYILNLAAADLLFLFSMASTLSLETQPLVNTTDKVHELMKRLMYFAYTVGLSLLTAISTQRCLSVLFPIWFKCHRPRHLSAWVCGLLWTLCLLMNGLTSSFCSKFLKFNEDRCFRVDMVQAALIMGVLTPVMTLSSLTLFVWVRRSSQQWRRQPTRLFVVVLASVLVFLICSLPLSIYWFVLYWLSLPPEMQVLCFSLSRLSSSVSSSANPVIYFLVGSRRSHRLPTRSLGTVLQQALREEPELEGGETPTVGTNEMGA

SEQ ID NO: 1051 - DNA, 1309 bp, Homo sapiens
  source (1)..(1309)
  CDS (201)..(1109)
  modified_base (186): a, t, c, g, unknown or other
tggagatattgtctggctgtcattcattagagtatagaccacacctttcatatttgcatgtttgttatttacatgttcaaagaagacgaagattatggaatatgccataagctcctggtgacatcgcaaagaatgtgcagattttatcttctttctacctctgtgagtagaaggtgaggttctganagttctccccagctatgcctactgtaaaccacagtggcactagccacacagtcttccacttgctgggcatccctggcctacaggaccagcacatgtggatttctatcccattcttcatttcctatgtcaccgcccttcttgggaacagcctgctcatcttcattatcctcacaaagcgcagcctccatgaacccatgtacctcttcctctgcatgctggctggagcagacattgtcctctccacgtgcaccattcctcaggccttagctatcttctggttccgtgctggggacatctccctggatcgttgcatcactcagctcttcttcatccattccaccttcatctctgagtcagggatcttgctggtgatggcctttgaccactatattgccatatgctacccactgaggtacaccaccattcttacaaatgctctgatcaagaaaatttgtgtgactgtctctctgagaagttatggtacaattttccctatcatatttcttttaaaaagattgactttctgccagaataatattattccacacaccttttgtgaacacattggcctagccaaatatgcatgtaatgacattcgaataaacatttggtatgggttttccattctaatgtcgacggtggtcttagatgttgtactaatttttatttcctatatgctgattctccatgctgtcttccacatgccttctccagatgcttgccacaaagctctcaacacatttggctcccatgtctgcatcatcatcctcttttatgggtctggcatcttcacaatccttacccagaggtttggacgccacattccaccttgtatccacatcccgttggctaatgtctgcattctggctccacctatgctgaatcccattatttatgggatcaaaaccaagcaaatccagtaacaggtggttcagtttttgtttataaaacagaaatagctttggtttaagaactgagttttcagaatctctagctatctggtaagtgggtatgaaagtggtagatgggagaggtcagctgataccgtaggaaataactcagtgagtacgatgtctggagcaaggtcaactgggaagttacagggcttattcttccatttttt

SEQ ID NO: 1052 - protein, 302 aa, Homo sapiens
MPTVNHSGTSHTVFHLLGIPGLQDQHMWISIPFFISYVTALLGNSLLIFIILTKRSLHEPMYLFLCMLAGADIVLSTCTIPQALAIFWFRAGDISLDRCITQLFFIHSTFISESGILLVMAFDHYIAICYPLRYTTILTNALIKKICVTVSLRSYGTIFPIIFLLKRLTFCQNNIIPHTFCEHIGLAKYACNDIRINIWYGFSILMSTVVLDVVLIFISYMLILHAVFHMPSPDACHKALNTFGSHVCIIILFYGSGIFTILTQRFGRHIPPCIHIPLANVCILAPPMLNPIIYGIKTKQIQ

SEQ ID NO: 1053 - DNA, 1393 bp, Homo sapiens
  source (1)..(1393)
  CDS (201)..(1193)
agaaatgagtttgaatccaggtgctaggactccctggcccttaataaatgacttaatctcttcaagcctctgatttcctctcctgtaaaacaggggcggtaattaccacataacaggctggtcatgaaaatcagtgaacatgcagcaggtgctcaagtcttgtttttgtttccaggggcaccagtggaggttttctgagcatggatccaaccaccccggcctggggaacagaaagtacaacagtgaatggaaatgaccaagcccttcttctgctttgtggcaaggagaccctgatcccggtcttcctgatccttttcattgccctggtcgggctggtaggaaacgggtttgtgctctggctcctgggcttccgcatgcgcaggaacgccttctctgtctacgtcctcagcctggccggggccgacttcctcttcctctgcttccagattataaattgcctggtgtacctcagtaacttcttctgttccatctccatcaatttccctagcttcttcaccactgtgatgacctgtgcctaccttgcaggcctgagcatgctgagcaccgtcagcaccgagcgctgcctgtccgtcctgtggcccatctggtatcgctgccgccgccccagacacctgtcagcggtcgtgtgtgtcctgctctgggccctgtccctactgctgagcatcttggaagggaagttctgtggcttcttatttagtgatggtgactctggttggtgtcagacatttgatttcatcactgcagcgtggctgatttttttattcatggttctctgtgggtccagtctggccctgctggtcaggatcctctgtggctccaggggtctgccactgaccaggctgtacctgaccatcctgctcacagtgctggtgttcctcctctgcggcctgccctttggcattcagtggttcctaatattatggatctggaaggattctgatgtcttattttgtcatattcatccagtttcagttgtcctgtcatctcttaacagcagtgccaaccccatcatttacttcttcgtgggctcttttaggaagcagtggcggctgcagcagccgatcctcaagctggctctccagagggctctgcaggacattgctgaggtggatcacagtgaaggatgcttccgtcagggcaccccggagatgtcgagaagcagtctggtgtagagatggacagcctctacttccatcagatatatgtggctttgagaggcaactttgcccctgtctgtctgatttgctgaactttctcagtcctgattttaaaacagttaagagagtccttgtgaggattaagtgagacagtgcctatgaaacaaacactaagtgcagtgtctctggaactgccttactcacaggcttccacc

SEQ ID NO: 1054 - protein, 330 aa, Homo sapiens
MDPTTPAWGTESTTVNGNDQALLLLCGKETLIPVFLILFIALVGLVGNGFVLWLLGFRMRRNAFSVYVLSLAGADFLFLCFQIINCLVYLSNFFCSISINFPSFFTTVMTCAYLAGLSMLSTVSTERCLSVLWPIWYRCRRPRHLSAVVCVLLWALSLLLSILEGKFCGFLFSDGDSGWCQTFDFITAAWLIFLFMVLCGSSLALLVRILCGSRGLPLTRLYLTILLTVLVFLLCGLPFGIQWFLILWIWKDSDVLFCHIHPVSVVLSSLNSSANPIIYFFVGSFRKQWRLQQPILKLALQRALQDIAEVDHSEGCFRQGTPEMSRSSLV

SEQ ID NO: 1055 - DNA, 1369 bp, Homo sapiens
  source (1)..(1369)
  CDS (201)..(1169)
agcaagaactggatttcaaactggatttgaggacccccaccttttgataggtgacttattctctgtgagtctctgatctgccctctttaaatgaggaagtaaatcccacatggcagggtggtggggagaatcagagatcatacagctggtgatcacaactggtttctgtttccagggtcaccagactagggtttctgagcatggatccaaccatctcaaccttggacacagaactgacaccaatcaacggaactgaggagactctttgctacaagcagaccttgagcctcacggtgctgacgtgcatcgtttcccttgtcgggctgacaggaaacgcagttgtgctctggctcctgggctgccgcatgcgcaggaacgccttctccatctacatcctcaacttggccgcagcagacttcctcttcctcagcggccgccttatatattccctgttaagcttcatcagtatcccccataccatctctaaaatcctctatcctgtgatgatgttttcctactttgcaggcctgagctttctgagtgccgtgagcaccgagcgctgcctgtccgtcctgtggcccatctggtaccgctgccaccgccccacacacctgtcagcggtggtgtgtgtcctgctctgggccctgtccctgctgcggagcatcctggagtggatgttatgtggcttcctgttcagtggtgctgattctgcttggtgtcaaacatcagatttcatcacagtcgcgtggctgatttttttatgtgtggttctctgtgggtccagcctggtcctgctgatcaggattctctgtggatcccggaagataccgctgaccaggctgtacgtgaccatcctgctcacagtactggtcttcctcctctgtggcctgccctttggcattcagtttttcctatttttatggatccacgtggacagggaagtcttattttgtcatgttcatctagtttctattttcctgtccgctcttaacagcagtgccaaccccatcatttacttcttcgtgggctcctttaggcagcgtcaaaataggcagaacctgaagctggttctccagagggctctgcaggacgcgtctgaggtggatgaaggtggagggcagcttcctgaggaaatcctggagctgtcgggaagcagattggagcagtgaggaagagcctctgccctgtcagacaggactttgagagcaacactgccctgccacccttgacaattatatgcgtttttcttagccttctgcctcagaaatgtctcagtggttcctcaaggtcttcaaatagatgtttatctaacctgacagttgcggttttcacccatggaaagcattagtctgacagtacaatgtttaga

SEQ ID NO: 1056 - protein, 322 aa, Homo sapiens
MDPTISTLDTELTPINGTEETLCYKQTLSLTVLTCIVSLVGLTGNAVVLWLLGCRMRRNAFSIYILNLAAADFLFLSGRLIYSLLSFISIPHTISKILYPVMMFSYFAGLSFLSAVSTERCLSVLWPIWYRCHRPTHLSAVVCVLLWALSLLRSILEWMLCGFLFSGADSAWCQTSDFITVAWLIFLCVVLCGSSLVLLIRILCGSRKIPLTRLYVTILLTVLVFLLCGLPFGIQFFLFLWIHVDREVLFCHVHLVSIFLSALNSSANPIIYFFVGSFRQRQNRQNLKLVLQRALQDASEVDEGGGQLPEEILELSGSRLEQ

SEQ ID NO: 1057 - DNA, 1813 bp, Homo sapiens
  source (1)..(1813)
  CDS (201)..(1613)
ttgtatgaggactccatgaggtcatccacttcaagtccttggcataggataattactcaaaaggtgatgacaatggcgcagggagggatggtgacttgcctggagatgcacagcaccgtctctcccatactcggtcattcacaccatcattgattcaccaggcacccactccgtgtccagcaggactctggggaccccaaatggacactaccatggaagctgacctgggtgccactggccacaggccccgcacagagcttgatgatgaggactcctacccccaaggtggctgggacacggtcttcctggtggccctgctgctccttgggctgccagccaatgggttgatggcgtggctggccggctcccaggcccggcatggagctggcacgcgtctggcgctgctcctgctcagcctggccctctctgacttcttgttcctggcagcagcggccttccagatcctagagatccggcatgggggacactggccgctggggacagctgcctgccgcttctactacttcctatggggcgtgtcctactcctccggcctcttcctgctggccgccctcagcctcgaccgctgcctgctggcgctgtgcccacactggtaccctgggcaccgcccagtccgcctgcccctctgggtctgcgccggtgtctgggtgctggccacactcttcagcgtgccctggctggtcttccccgaggctgccgtctggtggtacgacctggtcatctgcctggacttctgggacagcgaggagctgtcgctgaggatgctggaggtcctggggggcttcctgcctttcctcctgctgctcgtctgccacgtgctcacccaggccacagcctgtcgcacctgccaccgccaacagcagcccgcagcctgccggggcttcgcccgtgtggccaggaccattctgtcagcctatgtggtcctgaggctgccctaccagctggcccagctgctctacctggccttcctgtgggacgtctactctggctacctgctctgggaggccctggtctactccgactacctgatcctactcaacagctgcctcagccccttcctctgcctcatggccagtgccgacctccggaccctgctgcgctccgtgctctcgtccttcgcggcagctctctgcgaggagcggccgggcagcttcacgcccactgagccacagacccagctagattctgagggtccaactctgccagagccgatggcagaggcccagtcacagatggatcctgtggcccagcctcaggtgaaccccacactccagccacgatcggatcccacagctcagccacagctgaaccctacggcccagccacagtcggatcccacagcccagccacagctgaacctcatggcccagccacagtcagattctgtggcccagccacaggcagacactaacgtccagacccctgcacctgctgccagttctgtgcccagtccctgtgatgaagcttccccaaccccatcctcgcatcctaccccaggggcccttgaggacccagccacacctcctgcctctgaaggagaaagccccagcagcaccccgccagaggcggccccgggcgcaggccccacgtgagggtccaggaacacgcaggcccaccagagcagtgaaagagcccagggcagacagaggaaccagccagtcagacaggtggggagccgccgacagctttgtccttaaaaaccctgctgagtccgtcaggcctggaaggaggacttgagggaggggaaacaatccagccagaagtctcaggcagttccatgtcagcgacccct

SEQ ID NO: 1058 - protein, 470 aa, Homo sapiens
MDTTMEADLGATGHRPRTELDDEDSYPQGGWDTVFLVALLLLGLPANGLMAWLAGSQARHGAGTRLALLLLSLALSDFLFLAAAAFQILEIRHGGHWPLGTAACRFYYFLWGVSYSSGLFLLAALSLDRCLLALCPHWYPGHRPVRLPLWVCAGVWVLATLFSVPWLVFPEAAVWWYDLVICLDFWDSEELSLRMLEVLGGFLPFLLLLVCHVLTQATACRTCHRQQQPAACRGFARVARTILSAYVVLRLPYQLAQLLYLAFLWDVYSGYLLWEALVYSDYLILLNSCLSPFLCLMASADLRTLLRSVLSSFAAALCEERPGSFTPTEPQTQLDSEGPTLPEPMAEAQSQMDPVAQPQVNPTLQPRSDPTAQPQLNPTAQPQSDPTAQPQLNLMAQPQSDSVAQPQADTNVQTPAPAASSVPSPCDEASPTPSSHPTPGALEDPATPPASEGESPSSTPPEAAPGAGPT

SEQ ID NO: 1059 - DNA, 1348 bp, Homo sapiens
  source (1)..(1348)
  CDS (201)..(1148)
acaacagtaacatcatgtcatgttgtaacatattatttattaaaacagttgaaattattctagtttataatcaaacccaatcaccctggtatccaatagtcccatccaaaagccttgtatataataataacacttgttttgattgttatcatctgcagagagtagattgcgttcccagcagagaccatattaaccagtccatggtgctggcttcagggaacagctcttctcatcctgtgtccttcatcctgcttggaatcccaggcctggagagtttccagttgtggattgcctttccgttctgtgccacgtatgctgtggctgttgttggaaatatcactctcctccatgtaatcagaattgaccacaccctgcatgagcccatgtacctctttctggccatgctggccatcactgacctggtcctctcctcctccactcaacctaagatgttggccatattctggtttcatgctcatgagattcagtaccatgcctgcctcatccaggtgttcttcatccatgccttttcttctgtggagtctggggtgctcatggctatggccctggactgctacgtggctacctgcttcccactccgacactctagcatcctgaccccatcggtcgtgatcaaactggggaccatcgtgatgctgagagggctgctgtgggtgagccccttctgcttcatggtgtctaggatgcccttctgccaacaccaagccattccccagtcatactgtgagcacatggctgtgctgaagttggtgtgtgctgatacaagcataagtcgtgggtatgggctctttgtggccttctctgtggctggctttgatatgattgtcattggtatgtcatacgtgatgattttgagagctgtgcttcagttgccctcaggtgaagcccgcctcaaagcttttagcacacgtgcctcccatatctgtgtcatcttggctctttatatcccagcccttttttctttcctcacctaccgctttggccatgatgtgccccgagttgtacacatcctgtttgctaatctctatctactgatacctcccatgctcaaccccatcatttatggagttagaaccaaacagatcggggacagggttatccaaggatgttgtggaaacatcccctgagcaaagggtcagtgtatccccatcatttacattgccccactaatgtggggacattaatgaacatttgacaggctattacttattatcactaagtcagctctgtaaataactggctcagaggtaagcaaccctctagaggcaagagaaacaattttcagggtacctagaaaagagatacctgagagatgtgatggataaga

SEQ ID NO: 1060 - protein, 315 aa, Homo sapiens
MVLASGNSSSHPVSFILLGIPGLESFQLWIAFPFCATYAVAVVGNITLLHVIRIDHTLHEPMYLFLAMLAITDLVLSSSTQPKMLAIFWFHAHEIQYHACLIQVFFIHAFSSVESGVLMAMALDCYVATCFPLRHSSILTPSVVIKLGTIVMLRGLLWVSPFCFMVSRMPFCQHQAIPQSYCEHMAVLKLVCADTSISRGYGLFVAFSVAGFDMIVIGMSYVMILRAVLQLPSGEARLKAFSTRASHICVILALYIPALFSFLTYRFGHDVPRVVHILFANLYLLIPPMLNPIIYGVRTKQIGDRVIQGCCGNIP

SEQ ID NO: 1061 - DNA, 1345 bp, Homo sapiens
  source (1)..(1345)
  CDS (201)..(1145)
agcctgtgtgtgattatctgtagagatatgcctgtgtgcagaagccataactgtcatcgggcctgtaagtatatgcaggccttgtgcatatggacactctactaatgtattcaaaaatctgaagctcttttttccctatggcacaggtgagggcgctgcataaaatcatggcccttttttctgctaacagcataggtgctatgaacaactctgacactcgcatagcaggctgcttcctcactggcatccctgggctggagcaactacatatctggctgtccatccccttctgcatcatgtacatcgctgccctggaaggcaatggcatcctaatttgtgtcatcctctcccaggcaatcctgcatgagcccatgtacatattcttatctatgctggccagtgctgatgtcttgctctctaccaccaccatgcctaaggccctggccaatttgtggctaggttatagccacatttcctttgatggctgcctcactcagatgttcttcattcacttcctcttcattcactctgctgtcctgctggccatggcctttgaccgctatgtggccatctgctcccccctgcgatatgtcacaatcctcacaagcaaggtcattgggaagatcgtcactgccaccctgagccgcagcttcatcattatgtttccatccatctttctccttgagcacctgcactattgccagatcaacatcattgcacacacattttgtgagcacatgggcattgcccatctgtcctgttctgatatctccatcaatgtctggtatgggttggcagctgctcttctctccacaggcctggacatcatgcttattactgtttcctacatccacatcctccaagcagtcttccgcctcctttctcaagatgcccgctccaaggccctgagtacctgtggatcccatatctgtgtcatcctactcttctatgtccctgcccttttttctgtctttgcctacaggtttggtgggagaagcatcccatgctatgtccatattctcctggccagcctctacgttgtcattcctcctatgctcaatcccgttatttatggagtgaggactaagccaatactggaaggggctaagcagatgttttcaaatcttgccaaaggatctaaataaatgctttcaacttagtctcaaaccttttctatacctatcaattgtcccatatttagcccattctcacctctacatcttccaattatccctgtgttattctcatcgatctcccaatttttttaaatatgtcacctattcaaacccacctctgatttcttttattggaaatctttagtaaaatctgtctcattctcttactc

SEQ ID NO: 1062 - protein, 314 aa, Homo sapiens
MNNSDTRIAGCFLTGIPGLEQLHIWLSIPFCIMYIAALEGNGILICVILSQAILHEPMYIFLSMLASADVLLSTTTMPKALANLWLGYSHISFDGCLTQMFFIHFLFIHSAVLLAMAFDRYVAICSPLRYVTILTSKVIGKIVTATLSRSFIIMFPSIFLLEHLHYCQINIIAHTFCEHMGIAHLSCSDISINVWYGLAAALLSTGLDIMLITVSYIHILQAVFRLLSQDARSKALSTCGSHICVILLFYVPALFSVFAYRFGGRSIPCYVHILLASLYVVIPPMLNPVIYGVRTKPILEGAKQMFSNLAKGSK

SEQ ID NO: 1063 - DNA, 1342 bp, Homo sapiens
  source (1)..(1342)
  CDS (201)..(1142)
ggtaccaatgttgctcaggagaggctaggagaaattgtggagagtattttaccttactcatgaatatatataaagaaagattaatatgttattgtgaatttgactagaaatctgaacaaaagaagaagtggaacaagaattactaataggaatattataatcgtcgctggtgtgcccagcagctttatatggcaggaagaatgtctacgtctaatcacacccagttccatccttcttcattcctactgctgggtatcccagggctagaagatgtgcacatttggattggagtcccttttttctttgtgtatcttgttgcactcctgggaaacactgctctcttgtttgtgatccagactgagcagagtctccatgagcctatgtactacttcctggccatgttggattccattgacctgggcttgtctacagccaccatccccaaaatgttgggcatcttctggttcaataccaaagaaatatcttttggaggctgcctttctcacatgttcttcatccatttcttcactgctatggagagcattgtgttggtggccatggcctttgaccgctacattgccatttgcaaacctcttcggtacaccatgatcctcaccagcaaaatcatcagcctcattgcaggcattgctgtcctgaggagcctgtacatggttgttccactggtgtttctccttctgaggctgcccttctgtgggcatcgtatcatccctcatacttattgtgagcacatgggcattgcccgtctggcctgtgccagcatcaaagtcaacattaggtttggccttggcaacatatctctcttgttactggatgttatccttattattctctcctatgtcaggatcctgtatgctgtcttctgcctgccctcctgggaagctcgactcaaagctctcaacacctgtggttctcatattggtgttatcttagccttttttacaccagcatttttttcattcttgacacatcgttttggccataatatcccacagtatatacatattatattagccaacctgtatgtggttgtcccaccagccctcaatcctgtaatctatggagtcaggacaaagcagattcgagagagagtgctgaggatttttctcaagaccaatcactaaccagttggaggttggagagtctgtcactctaacctaatagaaagcagaaaaacagaagggaatgctgcagccaataacattatttatctgttaactgaagcttttgactttaattataataatgagaattttacccttgtcgaactctccttttccaagttcttttatttctattgctggatcctcaaggcagttttata

SEQ ID NO: 1064 - protein, 313 aa, Homo sapiens
MSTSNHTQFHPSSFLLLGIPGLEDVHIWIGVPFFFVYLVALLGNTALLFVIQTEQSLHEPMYYFLAMLDSIDLGLSTATIPKMLGIFWFNTKEISFGGCLSHMFFIHFFTAMESIVLVAMAFDRYIAICKPLRYTMILTSKIISLIAGIAVLRSLYMVVPLVFLLLRLPFCGHRIIPHTYCEHMGIARLACASIKVNIRFGLGNISLLLLDVILIILSYVRILYAVFCLPSWEARLKALNTCGSHIGVILAFFTPAFFSFLTHRFGHNIPQYIHIILANLYVVVPPALNPVIYGVRTKQIRERVLRIFLKTNH

SEQ ID NO: 1065 - DNA, 12838 bp, Homo sapiens
  source (1)..(12838)
  CDS (201)..(678)
  CDS (1841)..(1987)
  CDS (2259)..(2391)
  CDS (3042)..(3189)
  CDS (4443)..(4586)
  CDS (4932)..(5048)
  CDS (5282)..(5327)
  CDS (6367)..(6547)
  CDS (8469)..(8737)
  CDS (9824)..(9932)
  CDS (10753)..(11021)
  CDS (12352)..(12638)
tgatccgcccgcctcagcctcccaaagtgctgggattacaggcgtgagccaccgcgcccggcctcagtttcctctttttatagtttgatgctgataagttttgagtgggaaagactaacacatttttgtagacccttggaatgtgtgtgaatctcaggctccaggttcacatgtactcagcctaggtcctgtccccttccatgcctctggtcagcccctgccacggggtcccatctgcagcctctgcctcctcaggtgcccacggcaggggccacagggaagactttcgcttctgcagccagcggaaccagacacacaggagcagcctccactacaaacccacaccagacctgcgcatctccatcgagaactccgaagaggccctcacagtccatgcccctttccctgcagcccaccctgcttcccgatccttccctgaccccaggggcctctaccacttctgcctctactggaaccgacatgctgggagattacatcttctctatggcaagcgtgacttcttgctgagtgacaaagcctctagcctcctctgcttccagcaccaggaggagagcctggctcagggccccccgctgttagccacttctgtcacctcctggtggagccctcagaacatcagcctgcccagtgccgccagcttcaccttctccttccacagtaaggcaacttccaggcggagggaacaactgggcagtggtctagaggcagggaaggcaaaatgcaaagtggactgggctcacaatatcagatcatgaagactgggctttgctcacaggcactggggagccagtgaaggtgtctgaggaggggaggagtgtaatccaagtgctaggattacaggcatgaaccactgcgctcggccccactgtcccttgatggttactttgtgggcaggcaggggtgaggatggaagggcaagggcccgtcctgaggctgcagagaaggtcttggtgaaggaggatgaggtctgaatagggtgagagagcagagactggaaagggactgaagatcaagagccccaggaagaattcttcctcagcatcagtgtagactgtttatttcctttcacagaggaggaaactggggcacagagaggatgcccaaagctgcacagctagccaatgggagagccaggatttgaacccagcagctgattggagtggggtaggggtgaggggcggagtatgagaggtcaaaggtcaggaaagcagtggggttgactctgaggtccagaagctgcatcttcccccttgagtgtgacaggtacatgtggccactgccattcagcaccattaaatgctgaatggtggccaggaagggaggagcatcagaaggagcttgaaggtttactggggggttttcatgtctttccagcacctcaagtttgaggcagggctttcaggggtggggggcacagcactttgattgtgtcagtgtaacaggctaatgattatgtccagtgcaacaggcaggcccaggcccgtcagtggtggggggttccccacaccccaggctgggattctgccccgcaacctgggaggatttagggcaaagttgatcctagttgcaaattggcattctgaagaccagactgaacttggtcttgtttggcctgtagagggtttttaaaaaacatggaccagggatttcaaatcacctaaaacccaggctttctcggttatgcattcaaaagatggagctacccagggcctgccttcctcagtggcacagaaagtataccctccaacccccactgtttgtcttcctcatctgagtcccagctaatccctggagacaccttagtcggccgccttagtaggccgcccacgctacctgggcagaggggcccgagcctggagtcagggaggctggtgggtgtggagtcccaggaaccaccaccaagccccgcacatccctcctaaggaggcctggctgggccctctctgctccgtgtgtgtagccgaaggtgtctgcggagggtgctgagcaaggcacatcccaccccatcccgctggggctggcattgctggcgggttctgtaagacacaacccccacgggttggcctcatctgagtggccttggcagagtccactctgcttcttgaagcctcagtttcccctttgtaaagtaaagatcgaggcattcagagtcatgtcagggtggtagggggcagaatgggagggtcctgggacctgaatcggcagcctcggcgggggcctgtccacccctcccccaggtcctccccacacggccgctcacaatgcctcggtggacatgtgcgagctcaaaagggacctccagctgctcagccagttcctgaagcatccccagaaggcctcaaggaggccctcggctgcccccgccagccagtaagtttggcacctggggctgtgaggggaggcaggaaggcatcagagatctggacctgggcagggtgggacctggagtaggggctactgcgaggccttccctgggactggaatgcttctttgatttctctttctgccttctgggagtcaacacatgccccccaggctgagccctctcctgtctgagtcagtaaccaacatcacatccaccatcccaagccctcctccccctcataaagaaaggatgggtggtccacagtacagcccagcagaccaaggctcagagacggcagagccgctccaaggccacagagtaggttggcacaggcggagctgggcccaaacccatggtgctgagtcccaggacagcccccaccacaccattgctctcctttcccttggctcccaggtcctggcctcctctgtctgaccctaccccagctcattctttctctcccacacgcagatgcctgcttttctcttttgtctgctctccactctctcttgcccaccccacccctctctctgcctctgcctctgcctctgcctcttccctgtgtctctgtctgagtctctcgtcctcctgcctcagtctccctggtggcccggccccctccccaccatcaccaccgctttctcctccctgccaggcagttgcagagcctggagtcgaaactgacctctgtgagattcatgggggacatggtgtccttcgaggaggaccggatcaacgccacggtgtggaagctccagcccacagccggcctccaggacctgcacatccactcccggcaggaggtcaggggcaggcctgggcaggaagcaaatgcgggttgggccggggccagatggaggtgggggctgtgagcactccctgaagctcagtgccgtcgcagcctctccctggggcctcccgagaaggttccaggcccgaggatagccatcctaagtcagtagttcaaccgtgggattgaggaccctgtgtgggcacagtggcagggtctgcttcctataccagtctcctggggccacccgtgtgaacagaagaccagcccctaaacgcctgtccacgcaccccccccccccgttttttttttttcgagacagggtcttgctttgtcacccagactggagtacagtggggtaatcatgtctcactgcagcctcaaactcctggtctcaagcgattctcccacttcagcctgtgagcagctgggactgcaggcttgctaccacacctggctttaaaaaattctttgcaaggctaggtgcagtggctcacatctgtaatcccagcattttgggaggccgaggcaggcagatcacttgaggtcaggagttcgagaccagcctggccaacatggtgaaaccctgtctctactaaaaatataaaaattagccgggcatggtagtacatgcctgtaattccagctactcgggaggttgaggcaggagaatcgcttgaacccgggaggcggaggttgcagtgagctgagattgtgccactacactccagcctgggcaacagagcgagactctgtctcaaaaaacatttttttatttttgtaaagacaaggtcttgctacgttgtccaggttggtcttgacctccggggttcaagcagtcctctcgccctggcctctcaaagtgctgggattacaggcgtgagccactgcacccagccacacaccccatcttgagactgccccctgagtggctctggttagctgggaaccacccacactgcccacatggccacccccaagttggctgctgtaggcagagctggcatctgaagccccagacaacagaacatcatgtggttctcccagggctatttgccctggagtcctggattctaaccacaagactccccagccagagctggtagcagggaagggagggatgaggagggctgtcatgagtcaggcttgacttcctgaagaaatgggcttagaagtggcagcgtccaggaacggatgggtgtgtgtgtgtgtgtgctagggtggggggcacggatctaggggtccgcatttggctgagccctaaagggacctctgcaggaggagcagagcgagatcatggagtactcggtgctgctgcctcgaacactcttccagaggacgaaaggccggagcggggaggctgagaagagactcctcctggtggacttcagcagccaagccctgttccaggtatggggtcctcaccctcatgcctcccaggagaaagcagtttttttctgacagaggtggaaagaaggcacgcagatgagctccttcctctgggagtcaaagcctttccttgtaaagttacaaattgcactgcaatgtgcaaatctccctgtgagagggctaagcaatgttcttcttactatagtgtaaatgactacatgggcaaaagtggttccagagggagacgcagcatctcaaggcaatgtgctgggagagggttatctagagagggtaaggggcttctgggcccttcttctcagtcctgaactccctccctactctcttcctccaaccccatgtatctaggacaagaattccagccaagtcctgggtgagaaggtcttggggattgtggtacagaacaccaaagtagccaacctcacggagcccgtggtgctcactttccagcaccagctacagccggtgagtgggggccagccatcaagagaacaagcgcccctcggccatgtcaccctttcctctccctccctccagactcatttgtctttataatgaaacgattgcctgatcgagcagtcaggtccaaatggggcgggtggtggcttgactgtgttctagacttcctctgcctggcctgtaaagttggaggggtggggggctgtcacagaaaccactctcctttcttgtccctacagaagaatgtgactctgcaatgtgtgttctgggttgaagaccccacatgtgagtatgcaggggtctctgggctggacaagtatctggaagagaaatagagtcctggggggtgggggaggtggggttaatcaccgagggcttcctggagaaaggaggactttgaagagagagcgatggcaggctatgagtaggccgggtggaagaatgacacagtcgtgcttttgggggtggacacagtggggtcctggaggactggacttgattggagccccgtgctgtcccctcctcagtgagcagcccggggcattggagcagtgctgggtgtgagaccgtcaggagagaaacccaaacatcctgcttctgcaaccacttgacctactttgcagtgctgatggtgagggtccctgctcccacctcgcagccacaccccaggccgtgtgcttgttctgtgcaagcacttttcatatattcagtcatttattcctcataacagctctccaaggtagcttctattgttgtcccattttatagatgaggaaatggaggctcagagaggttaagcaatttacccgtggccacacagctagtcagtgaaagagctggtttgtagagcccctgctctttattcccaaattttggtgtgtacgaaaatgcagattcctggccctcacctagggttctgatttggcagtgatggggccaagagtgtttctaatgaggcccctgaggtggcctccagtgcccccaagacctcagaattcatgctcccaggactgtaggattctgcctgtgggtatccacctggggcttgaacacccctgggtgtgggaatctcattccctcacaggaaacctattcccatgttaaatgttatagaagaataatcaatgccaggacagaataggggttctctcatgaagggttcttggcctctgtgggtcaggaagccgcttgagaatgtggtcaaatctaaagatgcccccactccagaaaaatgcacttatgggaccacattctgctcagttgggagagggggttcttaggcttccgaggcccaccagggaccccaggttagcccctcacgcagggcaagcctccaggttgtgtgggggacacagaggccagctctctcctgtctcctggggccaggtctcctcggtggaggtggacgccgtgcacaagcactacctgagcctcctctcctacgtgggctgtgtcgtctctgccctggcctgccttgtcaccattgccgcctacctctgctccaggtgaggcctgaaaggggtgggacaggggaggggaccctccattgcacacacctccaccagggcgccgcacacatctccggtcatggcccgcccgcatgacctggaactgtgtgtgtggttaggggagctgtttggggtaagctgacccttgggggccacgtctcctcctcagatcagtggtgtttggataacatagtatttacaaattttagctgtcgacattgtatttatttatttttatttttattttattattattatttttttgagacagagccttgcctctgtcgcccaggctggagtgtagtagcatgatctcggctcactgcaacctctgcctcccgggttcaagtgattcttgtgcctcagcctcctgagtagttgggactactggcgcctgccaccacacctggctaatctgtatatttttagtagagacggggtttcaccatgttgctcaggctggtctcgaactcctgacctcaagtgatccacccacctcagccccccgaagcgctgggattacaggcatgagtcactgtgccaggctaattgtcaacatttaaaattgagagagtccacctaagaatctgtttctttcctagagtaagacaggaaagcaaaataaaaaacttaaaaaaggaaagatttttcatttctgcctttgaataagcagatttgtgagagcactgggtggacacaataatatcacagcggtaatgatcatacttaacgtgtgtcaaacttcccgtgtgccatgcactgttctaagtgttttacatgtgtgaactcaattcatcctcacaacagccctatgaaggaacactcagagagggtaagtgacttgcttgaggtcacacagcaaggaagtggcagaggtcagattgtcagtgcttggcttggcctaaattggggtccacttgccctcagcgctgaacccatttgggtagaggagaggcaccctcggttctcactgtccccagccacgaggaaggagaggaaagtgaagctgtatttatgcgtgtgcacaagcacgtgtgtgcctatatgactgtcctgtgtgtgcacagctgtgtacctggggagctaagtaggtgatggtgatgaggaaggacagctgggtgatgagatgggctcggcggaaggctgggggtggaggcagaagtcctcaacacccagttgctcacaaacatgcccaaggacacagcacaggaacccttaggaactgagcaccttatctgtgtcagatgctttgtgtcagtgtaactctcaccccaaccctatgagggtaccatcctcccacttcacagataggcaaactgagagtctcaaggggaggggaccagctgaagatggtgccatgagttaggggcagggcagggtgggactccaggatggtgacactggggcctgcatgttctgctgcaccctctagggccatgtagaatcctggagtgggggtggggtggggtgtgcacacattgacttgcaaacctcagacagaccgatgcgggcagcccacactcagactcacaggtgcacagttgtgcagacagacgggaagacacagaatgtggatggcatggattctccaacatggtgaaaatgccaaagtgtttccgctctgactttgagagtatctggtttattactgtggttgtcttcctcgctctgcctggctgaggcttctgttaaacgtgcacgtggtgcctgagtctgtgggtgctgggcacacagtaggtgcacagggggatgtggggaacagtttggctgcagccacaggaataggataggggccatgtatgactgcatgtgtgtgtcggggtggggggcagtctgggaaggcttcctggaggagatgtgggcacactcccctctctaccttcccacactggcccaccagggtgcccctgccgtgcaggaggaaacctcgggactacaccatcaaggtgcacatgaacctgctgctggccgtcttcctgctggacacgagcttcctgctcagcgagccggtggccctgacaggctctgaggctggctgccgagccagtgccatcttcctgcacttctccctgctcacctgcctttcctggatgggcctcgaggggtacaacctctaccgactcgtggtggaggtctttggcacctatgtccctggctacctactcaagctgagcgccatgggctggggtaagtggttgggcggggggtgcctcagacctgcctctcccacttggctctggcaaaacccaggcacctggttctgcctctccacctatctctctgacttccctcctggcctccttcactcatcctcaggtgtccttcaccttggctgaatcaaggtcccctttaggaagaagcagtgagccctgtccccaagaaacacttccaaattctccacatcactcactccattgcaaaggggatttacgagcagggccaccgtgtgtgaatgtgcaggttgtgcactgctcaaaggcacccagttcagagatcagaggggctgaaatccagtcccgctccagtcatttaattcactcgggctggcagtggccctgcctcaggatccccctggaccttgggtaacagattccctgtggcttggcattttgttcttggccaatgactgttcaattcacctgtggccagccctcttatgtcagacctacagcccaggggctcatgatgccacaagtctgtttggacattgcacagacccctcaacctccgcatgcccctgactccagcttgctgctcttcgcgggtttgtcattgggccccttctttgtccattcccccatttgcatgaaattcctttggaggtgtctctgtgtcaggactttgtgtttggaggtgggcagccccctctagggagcttctaatctccaccgaacgggcgaggtcaaggcccagtgcagacgtcccctgatggcagaactcttgccgtccctcctaaactgtctgcccctcccatctcccctgtgacatccagccctgcagcagagacccacaggcctttctcccaggggcccccagggtgacgaagggcagggctaaggttggaggagatggcatccccttataggaaacccatactggaatggggagggggagggtccaaacttgggggaacttccccaccagatggggctgggtgggcttcaggagcccaaacttcagaggggcccttgccctccagactccctgaggccagcagggaatgggcaggcctcagagagcgggaagtagagcaacatgcattgccaccctcaggcttccccatctttctggtgacgctggtggccctggtggatgtggacaactatggccccatcatcttggctgtgcataggactccagagggcgtcatctacccttccatgtgagtggctgtgtgcaatgggggcaagaaggtgggtctctgggcacagaggccagagtgcagcccgggcccaggtcatgctggccaggggacacctgggttccagtctcctcgaggaattggcctggcagtggctgaagcactggtctaagagtcatggagggtgagaaaaggcctggatctaccactcactcaccaggtgaccttgcacaggccccggcccttctctgagcctcggtttcctcatgcatgaatgggggtatgggttggagcagatgagcctcaccacattcctcagcagcacctctctgtctccccatgcagatgggaagacagaggctcagggagggaagagatccgctcttggccacactgagggctggtgtgctgttcggaggcagaggatgagtggggttgaagtccagtccttctccactcacctgattcacccaggctggcagcggccctgcctgtggatcccctgaacccaaaccggaagccagggttcctgagctccagcctgggaaggaatccttcccattggctcagtggttttgaaattttcagctctttatgttgtgacccagtgatttctgcctcacttttgtactatctatattattacttacttaacattttcctttaaacaatctgacttgttaactcaaatgtatttttaaaattacatcaacactgtaaatagaaaacaagcgcacttgctgtaaacagtggataatcctgaaaacaaacatgacaaccacagcccaggaaatgctgcccgtgctggccacacgctgagccctcctgcctttgcccgcaggtgctggatccgggactccctggtcagctacatcaccaacctgggcctcttcagcctggtgtttctgttcaacatggccatgctagccaccatggtggtgcagatcctgcggctgcgcccccacacccaaaagtggtcacatgtgctgacactgctgggcctcagcctggtccttggcctgccctgggccttgatcttcttctcctttgcttctggcaccttccagcttgtcgtcctctaccttttcagcatcatcacctccttccaaggtaaggagaagacccgtcccttggcccaggcagggtgtctacacatggagcaagggcagggaagagatcacccagggaacctgaagacttcccttctctgggcctcagtcatcccattcataaaatggggacatccaggccacagtcaacaagtcttgattgagcacctactatgtgcaggccctgtgttaagccacagggcttatggctgagctggttgggtgtgggccttgttcttttggaactcagctctactggggaagactgcgcatgagcaggcaagcatatagccatcaaaggtggtcccagatagtagggacatcgtcgtgagcacgtgctgcacagggcctcggctggggtgggggacaccctaagaagggtggccagggaggcctctctggatatgagacgtgtgaagacaagagaaggatccccccatggagagatgggggggcctccctactccaggcgcggtccacagaccagcagcagcagcgttgttaggagctttttggaaacgcagcctctgggccacccgggccctgccacatcagaatctgcattttcacaaatgcccaaggggtcacgtgcacatgataggatcaggagccctggtctaggggaaggaagctccaggcagagggagaggcaagaacaaagatcctgaggttggaaccggttgtgtgtaggaaggacagtgagggagagcgtggccagatggcggcgggtcggggcggagaggtgggatcccagggcagggtcatgatggctctggcttgatgccaacagggtccctttctgtgcatgtacctgtgtgtgtacattgaggtgcacacacaggcatgcacacccctctgttcctggccgtgcagaatggaagggggttgtatggccaggcccaggggctctcatggggttcaaggccagcctcccatacagggtcaccctagaatgggagctgggagttggtggtggggagatgttaccacatttcggttatttaacattcaagccttcattcctgcctgtgagatgaggggactcaggattgtaagtgaggcccatacattcacacagacatttactaagctgtggatacatcatagtgctattaatttgaggggtgcaaaatctcacagtgcttaagtgggtggacttcagagcctgttcaccacagtttgagccctggctcagccacgtccctttacctgagcctcctgggcctcagtttccttgtttacaaaagagaatagtaatgaataggatgggcctaggaagtttgtgacagtgagaggccacacggggacgcagcacagtgcccggctcataggaggtgctcgctgggtctcatgggtgcccgacagcacgtgcttggcaaacactatggagaggtggggcagacccgagtcacaatggctggggagggaggaggagggatggggtggggctcccccacctgctgaccccgtgccctcactgcccgcaggcttcctcatcttcatctggtactggtccatgcggctgcaggcccggggtggcccctcccctctgaagagcaactcagacagcgccaggctccccatcagctcgggcagcacctcgtccagccgcatctaggcctccagcccacctgcccatgtgatgaagcagagattcggcctcgtcgcacactgcctgtggcccccgagcccggcccagccccaggccagtcagccgcagactttggaaagcccaacgaccatggagagatgggccgttgccatggtggacggactcccgggctgggcttttgaattggccttggggactactcggct

SEQ ID NO: 1066 - protein, 775 aa, Homo sapiens
MPLVSPCHGVPSAASASSGAHGRGHREDFRFCSQRNQTHRSSLHYKPTPDLRISIENSEEALTVHAPFPAAHPASRSFPDPRGLYHFCLYWNRHAGRLHLLYGKRDFLLSDKASSLLCFQHQEESLAQGPPLLATSVTSWWSPQNISLPSAASFTFSFHSRPRYLGRGARAWSQGGWWVWSPRNHHQAPHIPPKEAWLGPLCSVCVAEGPPHTAAHNASVDMCELKRDLQLLSQFLKHPQKASRRPSAAPASQQLQSLESKLTSVRFMGDMVSFEEDRINATVWKLQPTAGLQDLHIHSRQEGPLQEEQSEIMEYSVLLPRTLFQRTKGRSGEAEKRLLLVDFSSQALFQDKNSSQVLGEKVLGIVVQNTKVANLTEPVVLTFQHQLQPKNVTLQCVFWVEDPTWQASRLCGGHRGQLSPVSWGQVSSVEVDAVHKHYLSLLSYVGCVVSALACLVTIAAYLCSRRKPRDYTIKVHMNLLLAVFLLDTSFLLSEPVALTGSEAGCRASAIFLHFSLLTCLSWMGLEGYNLYRLVVEVFGTYVPGYLLKLSAMGWGFPIFLVTLVALVDVDNYGPIILAVHRTPEGVIYPSMCWIRDSLVSYITNLGLFSLVFLFNMAMLATMVVQILRLRPHTQKWSHVLTLLGLSLVLGLPWALIFFSFASGTFQLVVLYLFSIITSFQGGARWVSWVPDSTCLANTMERWGRPESQWLGREEEGWGGAPPPADPVPSLPAGFLIFIWYWSMRLQARGGPSPLKSNSDSARLPISSGSTSSSRI

SEQ ID NO: 1067 - DNA, 10925 bp, Homo sapiens
  source (1)..(10925)
  CDS (201)..(264)
  CDS (926)..(1026)
  CDS (1166)..(1278)
  CDS (4593)..(4873)
  CDS (5051)..(5144)
  CDS (6304)..(6587)
  CDS (10463)..(10725)
  modified_base (2): a, t, c, g, unknown or other
  modified_base (44): a, t, c, g, unknown or other
  modified_base (47)..(49): a, t, c, g, unknown or other
  modified_base (78): a, t, c, g, unknown or other
  modified_base (84): a, t, c, g, unknown or other
  modified_base (89): a, t, c, g, unknown or other
  modified_base (93)..(94): a, t, c, g, unknown or other
  modified_base (96): a, t, c, g, unknown or other
  modified_base (104): a, t, c, g, unknown or other
  modified_base (106): a, t, c, g, unknown or other
  modified_base (133): a, t, c, g, unknown or other
  modified_base (165): a, t, c, g, unknown or other
  modified_base (167): a, t, c, g, unknown or other
  modified_base (179): a, t, c, g, unknown or other
  modified_base (225): a, t, c, g, unknown or other
  modified_base (228): a, t, c, g, unknown or other
  modified_base (268): a, t, c, g, unknown or other
  modified_base (271): a, t, c, g, unknown or other
  modified_base (274): a, t, c, g, unknown or other
  modified_base (277): a, t, c, g, unknown or other
  modified_base (303): a, t, c, g, unknown or other
  modified_base (306): a, t, c, g, unknown or other
  modified_base (319): a, t, c, g, unknown or other
  modified_base (330): a, t, c, g, unknown or other
  modified_base (362): a, t, c, g, unknown or other
  modified_base (364): a, t, c, g, unknown or other
  modified_base (392): a, t, c, g, unknown or other
  modified_base (397): a, t, c, g, unknown or other
  modified_base (399): a, t, c, g, unknown or other
  modified_base (408): a, t, c, g, unknown or other
  modified_base (411): a, t, c, g, unknown or other
  modified_base (424)..(425): a, t, c, g, unknown or other
  modified_base (429): a, t, c, g, unknown or other
  modified_base (431): a, t, c, g, unknown or other
  modified_base (465): a, t, c, g, unknown or other
  modified_base (470): a, t, c, g, unknown or other
  modified_base (488): a, t, c, g, unknown or other
  modified_base (492): a, t, c, g, unknown or other
  modified_base (513): a, t, c, g, unknown or other
  modified_base (521): a, t, c, g, unknown or other
  modified_base (558): a, t, c, g, unknown or other
  modified_base (562): a, t, c, g, unknown or other
  modified_base (680): a, t, c, g, unknown or other
gntgtatagtagaagagatacgtagagcgcagcacgtgacgagntcnnngacgacgggacgacgcaggacggatgagnattcgnaatancganngntgtaggtngnaggaatcgatgacacgacagcagagcnacgacgagcggggcaagcgcagctgccagcgnanagtcatgtgatnatggtagtggaatgagttgatatgggagatatagatgagacgacgntgngatgtggacgagcgtcgtcgacgcgtcagtgcgcaggtcngangantgntttcgtgcagatgttagtatagtatnatnagaatgaatgacntgacacgatangccagccatgcggtcagacgcacgcactgatntngatatgtgatctagtagtagtaagtgtntgtcnanacacgtganganagtaagcgcacanncacngnaccatcagacgacggcacggttacatcgtcatanagtgngattatatataatgtgangagnacgagagacagagagacgtgngacgcgcnacgaagtacagtcgtacgtgacgtgagtgtatgaganagtngagatgtgacagcgagaacgcgagcgagagccgacaccgagatgcgtgatgttagtaagtatgtattgtgcgataatgcaggacgcagcacacagaagatgtaagatgtgtatgtatnatagatgacaggcacaggccccgccgcgccggcattgtagaggttattagtggagagaacaagagccgcgagccgcgaagtgtcgtaaagtatgatatattaagggaaaggagggcaggaaggaagattgtgtaggttataaagtaaagggacgccctcctgaatcgcatcccttggttccgtccttccatccgtgccctcccccaaaattccctttccctctgttcccctggcctcctctccagggaccactggagactggtcttctgagggctgctccacggaggtcagacctgaggggaccgtgtgctgctgtgaccacctgacctttttcgccctgctcctggtaacagccccctccactctgatcccagccatcccaggggcttccagctcctgccctggggagggggctgcctggtggtctttgggtatatgggcctggcctccaactgacgtggtcccggttctggggtcacccacagagacccaccttggaccagtccacggtgcatatcctcacacgcatctcccaggcgggctgtggggtctccatgatcttcctggccttcaccattattctttatgcctttctgaggtgagtgatccccacctccccaccatgtctccctcccgccctcaagggaggcagcagggcagggtgggaagcattcaggttgtgcagcctctgaccgttgtcccctccacacgttagtgtcctcatcccaaaatggggttgggggttgaaatgtgtcagagctatttcaggagcaagtggcagaaactcaactcaaattggcttaaacataatagggaatgtgtggttcacgtaactgagaatagcaaatagcaaatagggttcatgtaattgaaaaacccaaggtgcatggacttctggcagggttcgatccagggggtcaaaagaggtccccagaacttggtctccctctacctctcacagctttgctcgccccttgacagtcacatcgggcagctttaccaccctcaggggccctggctgcctcaggattgcatcatagctccttagctgcttaggcagaaataaaagagatctcctctttccaagtattctaagatgaatcccaggattgagaaggattttattttgagataaaacagaaagatgcaaaaatagtgcagagtcctgtggttcgttctcccagattccccctgtggatacatcatagacaactgtagttcaatatcaaaaccagcagctggtggtacagtactgttgactagaatacagactttgctcagttttcaccattttttatgtacattcatgtgtgtgtctgtgtgtgtgtctgtgtgtgtgtgtgtgtgtgtgtgtgtgcgcgcgtgcgtgcgcgcaggacatatcatttgattggcccagtccaaaatgaaaataaagaaggctgggcgtagtagctcatgcctgtaatcccagcactttgggaggccgaggcaggtagatcacctgaggtcaggagttcgagaccagtctggccaacatggtgaaagcccatctctactaaaaatacaaaacaaaagttagctgggcgtggtggtgcgcgcctgtaatcccagctactcaggaggttgaggcaggagaatcgcttgaaccaaggaggcggaggttgcagtgagccgagatcacaccattgcactccagcctggacaacaagtgcaaaactccgtctcaaaaaaaaaaaaaaaaaaaagagagagagagagagaaagaaaatatatggccccttattcaaaaaattttaagaatgtcaagatggcgacagtagaacattaagtccttctgcgtatggggtcctacagaggtcacatgctcatgaaactggccctgtgtgagcatgtgtgtgcatgtctgtgtatatcagcctatgcagttttatcccgtgtatacaccagagttgagtcttactggtctaacttggaccatgtgcccatgcctgtctgggtcactgtggtcaagagctggaatacacagattggccggccaggccatgtgtctgctcttgggtttgagctaacaaagaacccctggcccctgacttatgagagtggggacgggcgttccttagggaaacctggggctgtgtccagaagaggtgggagtgagtgcaggacaggcagaaacagcagagagcactgcagcctgggcccaggccatggctgagggacccacaggatctgccagcttgaaggagcctaggggagctgccagtgctccagcttgtcctgtcccctgcctcctgggggtccctgggggtggcctaaagcagcccttgggtctcctgcccccgcatccagggccgtccctccgccctctccacgtgcctctgtgtcagcatttggccctaggctgcagccccaactaggcccacccaatccatcacagaccaacccatgagtgtaaatggtgcccctcacccccaccctccaagccctggcctaggacatggtccccatccccaacaagccgagtgtgacttgccagctggccgcattgctggaccctgtgagcggggcttggagcgccaggagaaattaccaccagctccccagggtggggcctggcatctcaggtgaggtggacatgatcccagatgctcctccaggaagcccccggctcccctccctcggctgagagcccttttggatctggtttgctaagaattcagagtgggggctccagagagagggaggtgagcctggtgagtcactggacagggagtctggagcccagggttggagcccctgccctgctctgtgaccccataaggctcccgtccctctctaagcctcactctcctactgcattttcggcttcatgcatccacccatctgtccatccacttcaccaatggatccctggtcccaccactgttaggcctgaagttcacagcatgggaaagacccgaggagagagaggatggggagttacactatgctgctgggaaatgtccagttcagctcaggctaaggggcattcagagatggcctccccagaaggaaacctccaaggggcatttgaaaggcagaagaagaggagtcaggcaaagaaggtgggaggagctggggagcagggaaaggcattgagaacagtgggaagagctgacctctgcgaaatgagatcagcctcaccttggtatagtttgggtcattccaggtgttttttttcttctcttcccaaggctgcctaatctctagccagtgtctggcttttgactgataggtgtgttgctcagttactttgggcccgtgtacgtttgtgtgtcacctccatcccataattttaagtacatgcatgatatgcagcccatatgcatgaaccttaagtagctaattatcatacagggttatgtgaaagaaactttttctctctaatgtaaatgcccatctctgaagagctgccccttactggtttggtccggatcttgccggccacggggtcccttttttatgtcacttttgtcttgcctgctgaacctctgcttttcatctcacttcttgctcacccgtcccattcaccgtgcttctattctctgcttttacttattctgccctttatccaacttttaattccctttgctattctcctgcctcattttctggcctcattttccctattatcctgcctcacattgatcaagggatgaggctggcaggatccggaacccacagggccccgtgggccatgagaggctcctggacttgaacctcaggacactcccactctggctgccggcagggatggaagctggatgagcaggcaggagctggcagtgggggtggagagccataggctattggggtggacaggcttgggtgcctcatgggagctccccatgggagctgtggccccttggggcctcttatttctcaccccaggctttcccgggagaggttcaagtcagaagatgccccaaagatccacgtggccctgggtggcagcctgttcctcctgaatctggccttcttggtcaatgtggggagtggctcaaaggggtctgatgctgcctgctgggcccggggggctgtcttccactacttcctgctctgtgccttcacctggatgggccttgaagccttccacctctacctgctcgctgtcagggtcttcaacacctacttcgggcactacttcctgaagctgagcctggtgggctggggtaggtgctgcctggatggacagaataaacggccggccctgagggtgcagagggaaatagccttggggagagagaggaggggttcccagagctggagggatggccatctggaggggacgtggaggaggaagtgccagtaagccccagtggtgtcatgccatttccccttgtgcccaggcctgcccgccctgatggtcatcggcactgggagtgccaacagctacggcctctacaccatccgtgatagggagaaccgcacctctctggagctgtgagtggcggctgtgggagcaggggtgatgccagctccccggctacacatattggggctggagagaggtggggagaggagggatttctaggaaaatctagaccaaatatgtcaagaccagaagaatcctcagatccagctagctcatggcacagagaagtaaactgaagcctagagagagagaggggaagtgaaatgagagagggggcctgagaaaggagagggagaactggaccaggaggcaggatgccttacttgagcctgggccaacacgagcccacatggcaccttgaggcaaagtaaagaaggtcaccccgtccgcatgcggggtgcgcagcctggagagtggagggtgtgttggatttcagcccccacctgctgcccagccaggtgtccttgttcaggccaccacctgcccagtgattcacagtagccctgggtctagtctgggctctgccctgcctgctatgtgtgtgatcttggcaggcccgatctctcccagggcctcagtctcctcatctgcaccatgggggaactgatcaacatgctctttgaggccctttgcccctgcagtgcagagggcagtggagctgagttcagtttctagactcacaccttgggatccatggggcacccaccactgggcccatggctctgtgctaagaggagctggtgaggccttggacctgtccccaggcctcaaaagcaggggccccaggagctggaggggtcacaaaggtgcaggcagtgggccaggtggggactgcagcggactggcagtcacaagcccatctaattagcggtcagttactatccttcaggagggcatccacagagctgccaggtgtatgattttataggagaagcagaaatctaggtgtttataccaaagcttctgattttaaaggcggccactaattccgtttttttcacaatgtaatatggggcaaatgaaacatgtctttgaggtcactttggcattaaagagacaccagactggagccaggtgacggcccctcccacagcgggagagccagggattgatgggtggaaatgggagaggcaccttcacagacagaaaagctcagccaggggacttcctgggtttgctggccagaggtaccactcccagtcccaccacagctgccccctcctccagatgctggttccgtgaagggacaaccatgtacgccctctatatcaccgtccacggctacttcctcatcaccttcctctttggcatggtggtcctggccctggtggtctggaagatcttcaccctgtcccgtgctacagcggtcaaggagcgggggaagaaccggaagaaggtgctcaccctgctgggcctctcgagcctggtgggtgtgacatgggggttggccatcttcaccccgttgggcctctccaccgtctacatctttgcacttttcaactccttgcaaggtgaggcccctgcaccagggaggtgatgggctgtgttgtctgtcccaggaggtattgggaggtggggaagagggtggtttgcaagacacaggactctgttcaggctagctgaagtcaaggatgttgatttcaaatactcagagcaaggatccagggcagcaaagtttggctgctgtattagtccgtttgtgttactagaatacaaaggaatactcgagactgggtaatttataaagaaaatggggttaattggctcatggttctgcaggctttagacaaagcacaacaccagtatctgctcctggtgaggcctcaggaagcttccaatcatggtggaagataaaggggagccaggcgtatcacatggcgagagtgggagcaagggagtggggaggcaccatgccgttttaaacagcgagatctcgcatgaactccaagtgagcactcactcatcaccaaggggatagtgctaagccatgcatgaggatccgctccaaggatccaatctcctcccctcaggccccacctccaacattgggaatcacatttggacatgagatttggaagcaacaaacatcccagacatatcagctgccttcatgggagctgctaccagaatcagaaaaagccacccaaaccaaagcagatacgttctctatctttttcctggagctatggagtctctcacctagtgtctgtggaaactccttcattctctctccacttaccctttactacccatggccccaaattgttacccaacatggctgccgtaaccctacctgaccttgcaagttgggtgtccatcgtccatctctggtccaatcagctgcgaccagaagggcagaatcatgtgatatgatgtccacatgacatggatgggatctccagggatctatggaggtaggaaggaaatgcttgctgtatttgttactggcccccgcagggcccttcctctgagatcccagcaaaggggtaagagcagtccatgtgctatggtttatatgtgttctctttgctccttacatccacagcccagagaggcatcacagtctgactgtgagagaaacagccaagacaggagtgacgagactcaacctgttcagggaagtcactagaaacccaggcgtcctagatgcagcgggtataagcccccaagaccaggactggctcccagcgccccatgagagatgtgtggcttagtggctagggccaggcagccctgggtccaaatcctagccccatccctgacccagcaagtcactcagctccttccgtcctcattcatcgcgaaattgggataatcccgtacttatctcaccagcttttttttttttttaattgagatggagtcttgctctgtcacccaggctggagtgcagtggcacgatctcagctcactgcgacctccacctcctgggttcaagtaattcttctggtttcagcctcctgagtagctggaactacaggcacatgccaccatgcccagctaatttttgaatttttagtagaaatggggtttcaccatactggtcaggctggtctcaaactcctgacctcagatgatctacctgcctcagcctccgaaagtgctgggattacaggcgtgagccactgtgcctggcctgccagatttcacaatgaacaatgacaatgcatatgtgggaactactaggtcttcaatatgtgggaactatattaataatcatagaaattatgactgtaaggccatctgaggctgtctccaggtggagaatcatgagtccatgcctggagaatcccaggggttgatggttggggagaaatgaactttgaaactatagctgacatcgttattctttcagaggttaccttaatatgtaagcctgcacacttcactctactaagtttccactgggtctgagttattctgtatttctctcttcctctccaatacaacagagcccttggtatacttgaattgcccattgaactcttctcaatatttgtcttgcatatagaggtttagttacagatttccttgaaacatagagtttttctaagtcatgttctgtacttactataatttctttcaccccacactttcccttttcctcttgctggagtgcctcccataataatcctttatagagggagtgatggttgttttgtatgtctgaaaattcctctattttgctctttcttttctgtaataggcataggtagatattttatttgaaggtctctgtttttcatttccaagatttcgatttggttcttttttatttcatttttgaaatggttgtgaaatggttgcatttttgcctttcccagcagttcttgagtggttacggtgggtctcctccctctcagcagccaccagcccaggctgccccactctctgcccacccctttccaggctcaccgaggcctctccttcctaacaggtgtcttcatctgctgctggttcaccatcctttacctcccaagtcagagcaccacagtctcctcctctactgcaagattggaccaggcccactccgcatctcaagaataggaaggcacggccctgcaatatggactcagctctggctctctgtgtgaccttgggcagctccgtgcctctctctgtactccctcagtttccttctctgtacaatgtggctggggagggagaggatgggaccaggttggaccacgtggcatcagaggtcccatccagatccaactataggtccaagagtccacgtaagcaggtttgcaaggctctaaagttcctatagtcctgagaccccctgccagcaaagagtgacagtcacctccatgccctgccctcattgcaaagccctcactcaccttctggtctcagcaagggaggagagtctgttgctggcatagccctggaaggagcccccagcctctcccctcctcctccttgtcactggcctcccacaactccccttctggctgcctgtaaccttgaggggcattcaggaggccagcgttccctcaggcactgggggtttgttttggggggtgggagttgatcctcccacccagtctgcccctggtctctgcccatccaatcagagcccaccctcctggaagagacccccgtgttcagagtgctggcagccctgcacgtgtccagggacactgcatttcaaagaaccactgagtgggtgagctaccttgggcaaaccccccactcctgactctgactgccacgtgggtggcccgacctctgacctgctgtcatcgtagaggtagaaagcaaacaatctggggctcagcacacctgggggtgctcccactcattcagtgtgtggggcccctgagcagaggctgggcattgccactaggacctgagctcctagagaacaaggacctgggtggcctcgcttactgttccagcccaggccaagcacagggtctggctcgtggcaaaccttgaataaatatttgttggctgaatgagtggatgtatgagtttggcaccagcctggcagatccctgagccaaggggggtgtctcaggccagacctaggttgggcagggtacttccagcagctggggctccatgtcacaatcgcatgcaggtttctcagtaggaaacaaaaagaggcagagatagcagagatggggtagagatacagagatggagagaaggagagagagacttaacagacaggctgacacaaagagggagaacggtggcggagagacagatgcagagagatggcagccccacgccggctccagcgacccccctcctcggggggagcagtgagtgttgacatcattcccctccctggagcctcaccgcacaagtccatccctcactctactcacaacttaccaaccattctccctacccggcccccgaccctctccagggagctctgtggactgtcaagccctgtctgcaggtgagaagttactgtcactgttaggcctcccccaacagccctggaagctgcgggctgcagcccacctccccgtccggatgctgggtgctgacgttgactgcaaatggatgcgcttcgcttcccctcccagcccacaagcagttgaaagacaggaaggtgggccctcactttatgcaaggcgctgtgttcctggaagggaaattctggggcgtggacattgcatcatttgagccacaggagcagttctggtggacaaacttggtgtgttttggggcttatcttcacagacatctgtttctcacactgaaggtctcaacttccttatctcaaagcctcagggatggtaacctgagaaacagctgttccaccatctgataggtctgggcttaaatcctggctcggctacttaggagctgtgtgatcctgggca

SEQ ID NO: 1068 - protein, 399 aa, Homo sapiens
  MOD_RES (9)..(10): Variable amino acid
MGDIDETTXXCGRASSTRQCAGTTGDWSSEGCSTEVRPEGTVCCCDHLTFFALLLRPTLDQSTVHILTRISQAGCGVSMIFLAFTIILYAFLRLSRERFKSEDAPKIHVALGGSLFLLNLAFLVNVGSGSKGSDAACWARGAVFHYFLLCAFTWMGLEAFHLYLLAVRVFNTYFGHYFLKLSLVGWGLPALMVIGTGSANSYGLYTIRDRENRTSLELCWFREGTTMYALYITVHGYFLITFLFGMVVLALVVWKIFTLSRATAVKERGKNRKKVLTLLGLSSLVGVTWGLAIFTPLGLSTVYIFALFNSLQGSSVDCQALSAGEKLLSLLGLPQQPWKLRAAAHLPVRMLGADVDCKWMRFASPPSPQAVERQEGGPSLYARRCVPGREILGRGHCII

SEQ ID NO: 1069 - DNA, 886 bp, Homo sapiens
  source (1)..(886)
  CDS (201)..(686)
ctccctatttcataatgaggtgaaacctcggagccgctagatttaataagacgctgctatccttctttcccgcgtttccccgcctcatcaaggtgcttttcaattatgccaagggctctcccggacccccttgatactagaacaacaaaaccaaatcacccccatccccgggtccggacagcatcctccctcctggctccatgggcaccgggtcagacgctcgaccccgggtgcggccctggccacatcgcgccgcggccaggagggccacagcccgcgcccgctcccctcccccacggagcccgggctcaggccaaggcccgcgggacttacgctctcgtggtcccaccgcacgttgctgcgcttctcgtccggggctaggtttcggtcccggcccattaactcatccaacaactgcgcggccgaaatcatggtgcttccttcgggcggctgttcccaccagcccaggcacccgccaacgaaaacacgggcgacaccgtcgccaatctcctcggcccgctctcaggccgaaatccctcctacacacaggagccgacaagacaaaatggccgccgcgcggacgccttcccagcatgccgtgcgcccgtgggacacgcccaggcccgggcggagagggcgagctcggcttccgccgtccgggggcggggcccgcggaggccgggtagggactccgcccctgtctagaggccgcggggacgggtagcctctgcccgcgcgcctccccaagcgcccggttttcccgagcttcttcacggtgagaaattggagcctaggtcttgaagcctggacaccgcttcaaaatggagaaagtgtctcctttagtccacgtggtgcacatggtgcctcatgcagcggaggaaactga

SEQ ID NO: 1070 - protein, 161 aa, Homo sapiens
MGTGSDARPRVRPWPHRAAARRATARARSPPPRSPGSGQGPRDLRSRGPTARCCASRPGLGFGPGPLTHPTTARPKSWCFLRAAVPTSPGTRQRKHGRHRRQSPRPALRPKSLLHTGADKTKWPPRGRLPSMPCARGTRPGPGGEGELGFRRPGAGPAEAG

SEQ ID NO: 1071 - DNA, 34118 bp, Homo sapiens
  source (1)..(34118)
  CDS (201)..(777)
  CDS (840)..(1132)
  CDS (2814)..(2958)
  CDS (11667)..(11859)
  CDS (15571)..(16708)
  CDS (19019)..(19183)
  CDS (20563)..(20774)
  CDS (20872)..(21252)
  CDS (21502)..(21641)
  CDS (29482)..(29640)
  CDS (30690)..(31519)
  CDS (33757)..(33918)
  modified_base (5068)..(5167): a, t, c, g, unknown or other
  modified_base (14848)..(14947): a, t, c, g, unknown or other
acacggacccagccatcgtgacctagattctgggttcaggggtagagacttgtttgctagtgggtcgcactgagtcaggctcttctgtagcacaccccaggtaacagaggtgctgggcggcctgagcaaagggacaactttttgccacccatgccagtgggcagtgggtgcagacactcacagcacaggcacctgctgcgatgcacgcggcgcccacggaaacccgaggctgccagccgccgccctggagaccccagagacagcggcagatgcgtgtgcttcaaggggcagcgtggctgctggggcgctccctaaagggcagtggcacggggtcgcgccgcgagcagaggggcgcgggtgggcgcgcaggagttagcgaactgacacggaggcgccaggcggacgcacggacgcaccgagggccgcagggccgcacagccgggcacacatcgtcgcgcagcggttcaggctcgggggcctcctcggcggaggcggccaactctcaccctcagcgcggggaggggcgggcgccgggggcggggcggcgccgtccgggccctccccctgccccgcctcgggtcggcgtccttagccgctggcgcgttgttggtttcgggttgtcaggcagcgcgcgaggcggcgggcagctagcagctggcggacgcgacccggaggcggtgggggtgcggctgagccatgcccggtggcgcggcctgagcccctccacctgctgcaatcatgaaggacagcggggactccaaggaccagcaactcatggtgagacccttttagaccctcctccccaccccgctccgtggtctacttcagtcggcctccagcgacagagtcctgtcccctcgccgccaccccactgagaggacaggcaacgaccagggccgggactcttcagagcaactttccccaagtcctgcaggatgggtgtcaagaagggaccatggcctttttagactttcctgagcctgaaaattaccccaacttcaaccccacccccacctttccaccctcccattgggagatcccgcccccaaagcgtgcgcagatgaatctcggctctctcatccagaaacgccaggggcagggagggcttgacctaactgcccccagaaggagggtggcggtttcccagttaatcagaggctgctccagccctggtgaggtcaggagtttaaagggatgtgggggtcaccagtaggaagacaagggcccctggtgtcaggatggggcccggagtgcctggttcttgggctgcaacacggatgctgcccaagtccggattcgaagtagttcagagaagtgctagatgcagctaccatggccccacagagccctggggcctgggacagatggggaggtgagagtgggggctgtggaggggaaggtggaattcctgatcatcagtggtgcctgggccagagcaacaagggagatgactcagtgacctcgaggccaccactaggctgtgggtgggtgggtgtctctctcagcaagccccttcctcatcccctaatttttgaggtctggggaagggccctcatcaccagaaggtgggcagtaaggtaactggaggataatgttgctcccagagtcccctacctctcaagggtgggcttgcttctctgaaaggagcctcagctccagcccccaagcaagccctgggctctaggacatcctctctggctttttagaatgtgtctctttgaaaatcactggccttggcatgtattgtgtgccccggggagcagggatgaagggtcctcccctcccgccagtggaatttggctgaagatgccactaaaggtgacccgtcaggtagtgtagttccctctgaaagtgccttttgttttgttttgttttgtttttcttttttgagacggagtttcactttctcacccaggctggagtgaagtggtgcgatctcagctcactgcccctcaagttcaagcgattctcctgcttcagcctcccgagtagctgggataacaggcatgcaccaccacgcccagctaatttttgtatttttagtagagacggtgtttcgccgtgttggccaggctggtctcgaactcctgacctcaggatccgcccacctcggcctcctaaagtgctgggattacaggcgtgagccaccacgccaggcctgaaggagtcttcactcggccagagggccgttcattctatccccacacccagcagctgttgccctttgatcagcacaagacgtgctccccactccaccctgttctttagggagatccacgcacaggatgagacccatttcacactggctggaggacaggcagatgggggtgggcgctctaggtgacactctcctcggtgtaggaatgtggtcacaggctgttgggatgatgggggacattccctgctccatcccacctaccaggcctcatcccagagccgtgcctgcaccttcctctgcagcacgtcattcgcggaaacacagagaggctgctccagtgccagggccccaagttcaagcccaggggagctgcgagtgttttatttgggcgtgaggctgaggcaggctggaggagcagacagctctctcccctggggctctcccggaggccagggctcctggggagactcatcaactcagacacagtccaacactctgtggacctgctgccctctgacctaggtagagttttacttaggacaagggaggcctgagatggctgaatgctagagaagccaggggcttgcttgaggtctctctgaggcccagcatggtcctctccctctaatcccaggggcttggttttccctcccaggtggcgcttcgggtccggcccatcagcgtggcagagctggaggaaggagctaccctcatcgcccataaagtggatgagcaggtatgcagggctctgcagcaggagctgcagggcagaggtctgctcagatggctcagctcacctggtgagggcagaaagggcccctgttgcttgcagcaccctccttcctctactcactgaactcttggctgtgctgttgatgacatcaccaaggaagctgggggctcttcttccaggaagccttcctagattgatccaaggacaactgggagcttccctagcctgggtgggccctgatcctttacctttcacatgctcattgcttgactttcccaccctaatatgcctgctgcccacagagcacatatatatatggttgaggtaaagctcgcctctagggtgtaacgtgtggcaaaatcctcgctctctgtttgcaatcttggtcctcatgtcaccaggatgaggaaggcagggcacacgaggcaataagtgtgtatcaagtaacagcagcatgctgggtactgttctagaaactggaaactgtggtgaacagaaaaggccctgtcctctctccattaccttaagtctagtgtgaagagatgaggcattcatcaaagaattgcatcacaaacaaacgagtttgcagctaacaagggcttcaaagaaatgcttagtggcatgagagtaggtaagaaggggataagacctaaacctggaggtcagcgagggcttccttaagaaactgtgcttgacactttgggagccgaggaggccagatcacgaggtcaagagatcaagaccatcctggccaacatggtgaaacccagtctctactgaaaatacaaaaatttagctgggcgtggtggcacgtgcctgtagtcgcagctactcaggaagctgaggcaggataatcgcttaaacccaggaagtggaggttgcagtgagccgacatcacgccattgcactccagcctgggtgacagagtgggactctgtctcaaaaaaaaagagaaaaagagaaaaaaaaaaaaaaactgtgcttgagctgaaaacataaggggtgaagaagaggtcattagtagcatgcatgaggggagaaatgttgacctgaggggcttgcatgtgcaaagggcctgtggtgagagggactgggatgcaactgggtagctgagaaaaggccagagtggctcaagcaggagagtaaggggcaagaggtgtgaatgggctgggccaaaccacatactctgtagaccatggccaggatgtttgtttgggtaggcagttgaggactcgtgctgggatgtacacaggcacagtggtgggggcaacaggagtgggcttggttccaggtaggagcatcgtggtggtaggatgtgctaatggctcagagaagttgggtggcactgtacaatgcagagaaaggcacacgtgagcacctgatgggcctgggctcaggtcccacgggctggactcatgaagccctgggcccaggataagcaaaccagaggcagatggcacacttccaatgcctgtttacctctgggctccccaggggcaggggcccactcaagcctctttcttcagcagtgatgatggaactgtgggcacagtagagccatgggtagcagcatcctcatttctttgcccatattccttcttggaaaagggtgggcttcctcaaagaccttggggaaagcaggggatgactgggaagacctcgtctaaatgggtcagacccagctggagcagaatgaatgcacataaacagtggttcgaggaggttctgccatttgccagctgtgcagcctggggggttgcttccaggagcttcagttgcctcatgtgtaagtggagacagacatcatgatgccttctttagagggtctttgtaggctaatgtacgcacatgcttacccagtccttggcacacaggaagagtttcatagatgtcagttatcaacgcctgtcagagactgcaattatcccccgctgacgggttggctcacgacaggagaccccgcagctaggaggcgaaaaaccctccaggcaaagcacccccgcctgtacaaccagctcccccgacaaacgagtcccccggccgcttaaaagcgggtacctcccagtcaacactccgcccccctccccctctgtgccggctcaaaattacgcccgccacctgtcgcacacccccctctcacgcccccccccattgtcctccccacgtccacaaccccnnnnnnnnnnnnnnnnnnnnnnnnnnnnnnnnnnnnnnnnnnnnnnnnnnnnnnnnnnnnnnnnnnnnnnnnnnnnnnnnnnnnnnnnnnnnnnnnnnnnaacttctgggctcaagtgatccacctgcctcagcctcccaagtgctgggattacaggtatgagccatcgcacgtggtacaatacggtttttactgaatcagtgtttattgacagggcaggaggaaatattgatggtgatgatgttggactaaattccctgccatgctgggcatgaaacacacaggacacagatttgagacccctgggcctcttcttgaacccctcctctccaacccaatgacccaactccccacccaattgtccaaaaggctcgttggttgccagactctggcctccaccactgtctgggtaccatcctggaaatctcttctctccaaccaggacagagctgagagtcaatcccagacagagagaaagccaggggcttccccaacaggcgggacatggaggcctttgggaaagcctctgacgcgtgctactggtcatgggacacagcagggaattgggaagtgggctgggctcggccctgatttcaagttctgggcctcccgtcaccagctgcgtgacctaggcagggccacttagtctttctgagacctgacacacccacaggatgctgagaagtgaaatgaaagtgctccagcagcatcagaggcggggttcacaggccacgcaaggaagggtttctcactgatgctgattagaagttgtaaaaatgcaatgggctgggccattcccacatattgcccttgacctttctgactcccccatgacatcactagactccactgggtctgagggctttctcaatgagttcagtggttggcgctttgacctgtgtacctgccatatcacaccatggaattagcagagatttccgtctgccagccacctgcactttcagaaattgtgcctttgatagcaagtttccaggggctcagattgaggatctgtgcaaggctcctggggttgcacagagccttaggacaaaagatgtggatgagtggctggtgctggtgggaggaagataaactgaaggagagcttgccttggtagatttacaaccaaaggcctttcaacgcccaagagattaggccgggcattgtggctcatgcctataatcccagcactttgggtggccgaggccggtggatcacttgaggtcaggagttcaagaccagcctggccaacatggcgaaaacccatctctactaaaaataccaaaaattatccaggcatggtggcacgtgcctgtaatcacagctactcaggaggctgaggtaggagaatcgcttaaacctggaaggtagacgttgcagtgagtcgagattgtgccactgcactccagcctggatgacagagcaagactctatctcaaaaacaggattacgtgagcaggtttgcctgtgagcaggttttgctatttttttttaatttttaatttttgtggttacatagtaggtgtatatatttatggggcacaggagatgttttgctataggcatgcaatatacaatatacaatcatgggaaatggggtatccatccatcccctcaagcatttatcctttgtgttacaaacaatccagttatactctttcagctatttttaaatgtataattaaattattttgactatagtcaccctgttgtgctatcaaatactagatattaatagtcacatcatggagaatggggtatccatcccctcaagaatttatcctttgttagttatttttatttatttatttattttgagacggagtctccctctgtcacccaggctggagtgcagtggcacgatctcagctcactgcaagctccgcctcccgggttcacgccattcttctgcctcagcctcccaagtagctgggactacaggtgcccaccaccacacccggctaattttttgtatttttagtagagatggggtttcaccgtgttagccaggatggtctcgatctcctgacctcatgatccacccaccttggcctcccaaaatgctgggattacaggcgtgagccaccgcgcccggcctgttagttatttttaaatgtacaattaagttattgctgactgttgtcaccttgttgtcctatcaaatagtaggtcttattcattctttcttttcttttctttctttttttttgagatggaatctcattttgttacccatgctggagtggagtggcatatctgctcactgcaacctccgcctcctgcgttcaagtggttctcctgcttcagcctccagagtagctgggattacaggtatgcgccaccatgcccggccaacaatgttaacaaaaagagaagccacagacttggataaaatatctgcaaattatctatttgataaagaacttgcatccagaatatgtaaagactgaccaggttgcaagcactatgaacaacagtttccaggcgtgcttcctgcatgcccagcaccactcccaaagagtgatcacaattctcactaacatttctttttatgagacagtgtcttgctctgtcatccaggctggagtgcagtggcatgaacacagcttgctgcagcctcaacctcccaggctcaagcaatcctcccacctcagccttctgagtaactgggaccacaggcagacactaccacatcagactaatttttttttttttgtagagttgagggtctcactatgttgcccaggcttgtctcaaactcctgggctcaagtgatcctcctgcctcagcctcccaaagtgctgggattataggcatgagcccattttcgagatgaagaaactgaggcctggagagatgaagtattaatacagggccaaaggtcacagttcttcagttcaggcagaaccaccaggcatgtctggctctaaagcagtgattgttagtcctgactgcacatttagaaacacctgcagggctttgtgaaatcacaatgctgtttgaaccccagaacaactacatcagaatctctcatcagtatatgctttttttctttaattctccaggcaattccatgtgtagccaactttgaggaccattgatttaaagtgagggaacttaatctctcaaccagcgtttctgaaacctgggatcttccttaaaaatacacagactcccaggcctctctcctgcaaatgctgaactagatgcctggggcagggcctagcaattcgtgtttttcacaatcaccctaggtgaacatgactaccagacctgtgtcttacctaccctctcccgcctccagggctacaaggcaccagaccagtgggtcctggccgctggcccctgagaggcagggcaggagctgtgtgcccctagaagcatgtgccagggggaacttgggccctggagcagctggggcagcaggtggggagaaggagggtaggaaggttaaccctttgcatccatatacattgtgtcttgaagacagtaccaccccatcccactcctagccccagagcaactcaaccttaaccagactgttgcagaaagtggcattttctttctttttttcttttttctttttttttttttttttgagatggattctcgctctgtcgtccaggctggagtgcagtggcaagatctaggctcattgcaaactccgtctcccgggtgcaagcgattctcctgcctcagcctcccgtagctgggattacaggcacatgccaccattcgcggctaatttttgtatttttagtagagacagggtttcagcatgttggccaggctgttcttgaactcctgatctcaagtgatccgcccacctcggcctcccaaagtgctgggattacaggcatgagccaccgcacccagccttgttttcttctctttcttgtagtttggaaattctctttcctgggtgggagcaatggcttagagggcacagggtgggatgagaagcccagattgtagcggggtgccccagtgtgtttttaccacatggacaaagctacggccttgtgaaaaagcatgcaaatcccgtggcatcctcccctttgccaacacagtgtgaagcaactgtgcctcccacatggggctgcaggactcaggcaattagggctgcctgtctctgacttttaaaagaaattgctgcaagccagctggctcctaggggacacaaggagattgaagagaatgaggaaactccaggaagacagaaatagcctctttagcccagatcagatttttaacagctttgctttccttcttggtgtttcccaaggccaagccccgagtgagaacagaggcattgtcttgtgtctggaggcagacagaggggacatttaaagactggcctggtgacgggaagacaacccattcaaggacccagagcaagctcttctcacaagctagcagggcacacagatgaatagcaaggtcagcaaagggcgtctcaggaggtctcccccaacctcttgtgagactagtgctagagggtgggcttccccaagcaaggcctgagcaggagtgtctgcatggggtgacagagcggggacgggagcagtgtcactgccctctggagttttggggggagatcctcccccccgtgggaacctagagtcccagaggcgtgaagaacaccactgtgagtctcaaacacaggaacacgcagaatcagggacgctgtggtccagacatcaaagattcaggcgtctcccgcatccccggggaggcagtcagatgggaaccttcactcactataaaaacaaaactcgtcttgtgcagtgagaatgagcaaagtaattcctggagagaacctccggtggcttaagggaaagtgtgttttccaagctgggaggaaggccaagggagtgatggggaggaggagtgtcagcgtgggagactgggaaggaggcaagctggaaggtcagccctccacattgaactccctagtggaataaggagatgagaacattttcctcttcttcttggtccctggtacagcccctactgggttcctgcgagtggtgggccctgcatggcacctggcaggagaggacttccttccctctttctttgttgttgttgcttttgggacagtgttgctctgtcacccaggctggagtgcagtggtgtgatattggctcactccaacctctgcctcccaagttcaagcgattcttgtgcctcagtctcctgagtagctgagactactggtgcatgccaccacactcggctaattttttttttttttgagacggagtctcagtctgtcacctaggctggagtgcagtggcctgatctcagctcactgcaacctccacctcccaggtttaagcaattcttctgcctccacctgccgagtagctgggactacaggcgtgagccactgcacccggccagaatttttgtatttttagtaaagatggggtttcaccatgttgggcaggctggtctcaaactcctgacctcaagtgatccatcctcctgggcctctcaaagcactgggattacaggtgtgaaaaccgcacccagctttctttctctttcttatgtccttgtgcaccttctggaattccggggtcctgagggactcactctaccctcaaaagaggcagacctccctagaaagcccccatttattttcccccaggatagcactaagcatggctgagccccccaaggaaagtgaaggttgagggcaggacgagttgggaagaggtccccagaattggagaccgatgggggtcagtgactacctgccctcacaactaccttgtggtctccttgacggaaagactgtggtcttttattcactcccgtccccagggactggcacatagaaggggcccaagactcctgtcacctgctgcgttagtgactgtgataccagcgcctaccaggcttctctctacagctctctcccctgttcctcctctgctgaccgtgacaaacaagcaaaggatttgaaaccaaggattcgagaggaaaacacatagggtctgaaagctgggagaagacgcacttctgtggttcaagagaatgtggtaaaccttgaccttgagcaggaaggaggaactgcacacgctccggaggaactcaccaactgtatgacctcgatcacacgagaacgccagctcccaggttgaggaagaaatgaaagaaagcacttaaaacacctgccacctagcaggtgtgcaatactgttaatttacatccctctatcctgagcagaaagctctcctcttaaagggcccatcttcccatcaccctagccggaggctgtttttcttcttttttttccatccattcagctgtaaatccttcagaggtctccagtccactccaggacaaggactgtatcaggacctgagtgggtaggagggtatgaggcagggtgtacagaggctgcagggtcctgcgacttggggcggatccagggcagcgaggactaaggggaagagggcactaggagcgctagtcctggcagccaccatctggcagagctatcccagaaggaagccccccaagaggaatgtttggcactcttggtggttattaccctgtaagtctctccctgtcactctccactctagtctttagcctccgacgtcctcctggcgcccgccccttaccctgggtccgctccttctgcttctgggtctctggggaagcgttcaatccacggtcgcggctccggtgctcctcaaacggcggcgtttaccggttgcttggcaaccccggcctggctccggacgcgcggggcgacgcggaaggaccccggagcacgtgactcctttcctgccacgtcggaagcgcaggccatccctcttctttttggaggtctcctgagttaggagaagaattaaccaataggttggtaacatactaataatgatcatgaatatttgtaggggcgttgccaaggcgcttatccaagcctacgtttgtatgcatttgcatcgagcaaggcacccagaaaatgcaaggaagaatagtcagtgcttgggaagccctgatccctgggtggtgatggcgggctctgcttaccatcttggccgactgtgttgtcctgccttccttcagtttccgcatccattcagtgggaattataactctgccctcccctctgctaccatccttcctccactttctgtaataaagacatcttcccgcaccaccagaatggaaactccttgggagtagaagctggggaatttttttttttttgagacggagtctcgctctgtcgcccaggctagagtgcagtggcgcgatctcggctcactgcaagctccgcctcccgagttcacaccattctcctgcctcagcctcccgagtagctgggactacaggtgcccgccactacgcccggctaattttttgtatttttagtagagacggggtttctccgtgttagccaggatggtctcgatctcctgaccttgtgatccgcctgcctcggcctcccaaagtgctgggattacaggcgtgagccaccgcgcccggcaaagctggggatttttacagcttagctgggtgattggcacgaaatgtactgtgttcattgaatgaatggttgaatgaatgaaacgagtcatgtttctcagggagttaaggcaattgcgatcatgtaaattaaaacaagggaatttggggctagaaaaaaatgaatttgaatcccagattggctacctactaatctcatggccctgggcaagttcctttccttttctaagactcagctatcctcatctgcaaagtggcaggacagtggcggtgcttattagataatggggaggattaagtgagagacaacacaggggcgtgtccagcccccgtccagagctactggtgcctgaatgagtggcagctcggggaatgaggttatcccgagttcagatgctgacatcggaaatttggactgggacagaagaggagtgcgtcatccaagaagtgggattggggttggaactgggccttgaaaaatggttatgagttgcagggaagaggagtggggagggcgttccagattgggggagggcatggcgtgagcaaggaaggaaggggcagtcgtcatggaagaaaggcattttgcgaggatggtgggtggatcagtctggctggggttgagagtccctgcaggggaaaaatgagagaggaatttgcaaaggtcagccagggccagtctgtggggggtcccaagagaggcaggctgaggggcccagacagctttccatgggaagccctcagcgggtttgggatctgtgaaaggacaggaaggaagcaaacgtttctctcccacttcccaacttctccatatatgtgttgtcaccactacccacctgcctttagtggggcaggtgcaaggaaattcccaatgagacggcaccttgcagggccgcactaaccaaagacaagcacctaaatgactgctgccaccaatctctcctgatccgttctggctcgcaccagtttctcgggacaaagaactcttaggggtgggtgctgagggtcctgacaggggctgggtggaggagctcctgaaagacgcattgaaatggctttgtgtggtcagaggtgaatcagacccaaagtctccaagaataggaaacgatccactccatgatgaggtagtggctggctggggttgcaatcataatgcaaccctttccactccacctccagccctgggaagccgagggctctctgaagacacattattttgtgggtgggaaagtgggttagaagcggaaataggaaaagttgaaaggaaactgcagccacctttaccatattatccaacaatttagtacaggctccccacccccaccctcacccagaaggctgcaggccaccgaccacagagggcagctctgttcactggccaaacagttaccccttggccggctgcctcggcgtgaggtcatataattagaagtattcacaaggacctagtttgaaaacaattgcggtgcctctcagatcttcacccaatcacagcataattggcagcagaaattctttgctgagagccgcccctggccctggacatccccaggcattgccacaacccgttccactgctgtgtccccctttagtcccaatttttgtgtgcgtggtgaactacacataaaatttaccatcttaaccatttttcagtgtatagttcagtggtattaagttcattcacattgttttttggtctcgctctgtcgcccaggctggggtacagtggtgtaatcatggctcactgcagcctcaacctccagggctcaagcgagcccccctcctcagcctcccaagtagctgggaacacaggtgcacatacccatgctcggctaatttttttcattttttgtagccacaggtaagaggcaggacttgattctggaggcagggctcagacaccagaccagactgagggctagctaaaatagggaagaggcggaagcagctctccataagacacgcccaccagtgtgccatgtcaatttaccattgccatggcaacacctggaagttatccaccccttccatggcaatgacccaatgacctgaatgttaccaccctttttctagaaatgtctgcatgatccacctcttaatttgcatgtaattaaaaatgggcataaatatgactgcaaaactgcttctgagctgctagtctctgcacactgcctacaggtagccctgctctgcaggagcagtcatgagctgtagcactgccacctcaatcaagcagttttcctctgccactggctcacccttgaattcnnnnnnnnnnnnnnnnnnnnnnnnnnnnnnnnnnnnnnnnnnnnnnnnnnnnnnnnnnnnnnnnnnnnnnnnnnnnnnnnnnnnnnnnnnnnnnnnnnnntctagatcctgaggcctctcccccatgtggggctagcaagatccgtatgtcctatcccactggctttcacacctgcccaggcacccctcccagagagggtcaggcactgaggcggcccagatgccagaaagtctcacaaccccagatgaggcggttgcccctcgaggtcagggctcagaaactgcccagctaagcccctcagcctcaaagtgaggaaactcctgcaaggggaatggggtgctccctgactcccccgcaaggggaatggggcgctccctgtctcccaggcaggtgggttgctgtgaccatgtggatgcttttacctgccctagttctgtgtctgggtggggggaaagctcaacaaaggggagtgaaacccctaaaccccctggcttgtgggaccctccctgggttgtttttacccagaaactgagtggttcaatcatccctttaccactctgagcatcggtttattcaggaccaagaacgttccttcaagtcagctgtgaaatcagctcttgaaaccaggcatcttgtctaccacgcctcacctggactccaccccagccctagggtggccggcgcctggccatccaggggaccaggcttgttgccacctccaggctcgccttgcccttcccagacccacagggaccacctaggccaggcctttattcccagaccccgaggctacttgggggtccggataagggtgtggtatacgggcttgacgatgaggtgcaggtgcagggcgttctcaaccaggtactcggagttgcgccgctgcaggtcggcgtgcgccaggaagtcgccggcctcctcgctgctctggtggaagctgtaggcgtggcggaccagcaggcggccctgctggcgcgcccccaccagcaccgtcttctggaagctcacgcccgccgcgtcgccgccgctgctggccggcgtcaccaccagccgcggtcggccgtcctccgggcgcgcggcgggcagagcagtgcccgcggcgtccgcgtaaacgggccgcaggctgacgggcagccagcgcggcgagaagagcacgttccaggtgacccggcggcccgcgtcgtggccactcgggcccagctgcgtctggaagctggtgctgcggtcgtcgcgggccgggttgttgatgacccacggggcgccccaggcgggcgcgaggtagttgcggggcaggaaggcgctgccgttgacgtcgaagaacttggcgtagtgcagcggcgacgcggcgtggaactggtaggcctgcagcaggaggtcggccaccgcggggccgtggcgcgccagggctgccgagcgcgcctgcagctggaacagctgtgccggtgggatcatggggtagcgtatggcgcgcagcgcccgctcggccacggcagggggcggccgcgcgcgacccagccaggcctccagcgcgtggaacagctccagttcatcctgcagcaccaggtccgagcgttgcaggagctgccagagcagctcggggctcacggcgccccactcggtgctggccgccacggccgacaggttccaggccaggaactgcaggcagctctcgcgcagggcctcgtccccggtgcccaccgcgtagtggtaccagcccaccgccgggcccgcgcctcccgccaggtgcgcgcgcatgtagtcggccacgccgcgctgcagggaggacacgccgtacttggtggccagtctgtgcagggggatggcctgggtcagcagcacggtcagctccccgcagtacaggtacctgcgggagagaccgagaggtggggcggggtcagggcggtacccacctcccaggatagattttttagagtccacaggggacccggcctggagttggagcttcactgtccgggtgcaaacacagtggaagccccaccctgaggcttcccatgttttctttcaaggacccttccaggccattcttacttcacaggctcttctttccgtttccgcggtgatgtagaaattgcctgcattgactgtgcctctactaggcgtgcagccctaggctggaacaaaacagacgtggctcctgcctttggggtttccagtctggttgggatccatggcctgccttctccttgccatgagtctgggcaagtcacttaacttcagtgaaccttaggctaatcaatcacctaggaaagggggagtggcacacacccctcagggttactgtgacaaccagaggagaataaagaatcttgctacaggccaggtgggtgctagtggctcacacctggaatctcagcactttggaaggccaagatgggaggattgcttgaggccaggagttcaagaccagcttgggcaacatagcaagaccctatctctacaaaaaataaaaaatgttaaaacattagtcatgtgtggtggtgcacgcttgtagtcccagctgcctgggagtctgaggtgggaagatagcttcagcctaggagttcaaggctgcagtgagctatgatcatcatgccacgacactccagctttttttttttttttttttttttttgagatggggtctttctgtattgctcaggttggtctcaactcctggacttgagcagtcctccaccttggcctctcaaagtgctgggattacagtgtgagcccccatatcttattgcagcctcacctttctttttcctctcctactgttggtgatcacttctgctgagtatctcttcgtcttacttctgccactgtcccatggctcacctttcctgccagtccccaccggcacacggcaccgcacttgcctctataggagtgtggcagccactgccagccatcttccccaacgtccatttctcccctttcccctgcgtgattgcctctgggaataaaagaccacatttcccaggctccctcattctggccttggccatgtgactaactgctggtcaatgggcgcagtttgggatttgcaggaaggctgattaaatgcaactgattccgggttaacaggaagaccctttttgcccttctgtcttatcccctttcctgttgcctggaacttggaagcaatgtatggaattctgcaggcatctcgtctgagccgttagaacagagttactttcttagacactagtgtgaatggcaccccctgagcagcatcacggcaggaggcaggaggtggagagagccgtctaactttttcagctccctagccctgtggttccaaacctggccaaacaccaaaaccacagcgatgctttcaaataaaaaatattcgtctataatggaatatttaggaaaataaaaagtaaataaataaaataaaataaaaaatgattgctggccctaaccctagacctgaaactgacaatccaggttgggatccgtgaaactgtagtttttttgtttgtttgtttggttggttggttggttggttggttgatttttttcagacagaatcctgctctgtcacccaggctggaatctagtggcacaatctcagctcactgcaaacccaaactctgcctcccaggttcaagccattctcctgccttagcctcccaaatagctgggattacagtcgtgtgccaccacacccagctaattttctatatttttagtagagacagggtttcaccatgttggccaggctggtcttgaactcctgacctcaagtgatccacctgcctcagcctcccaaattgctgggattacaggcatgagccaccgtgcccggccccaaaactgtagtttttaaaagctgtctatggccaggtttggaaacagctctgagggggttactaggaaccgaaagtgacatcaaactgcacagatgacacgggcaaagacagggagctgtacagtggaagaagggatgcaggggtcactgtcatcccagtgatgtccggggaaatggacataacaacctctaagggcctgggcttccctgaccctgtaggtggaggagccgggggctgaggaagggatgaagccatcccctagtcttccgcgtccccacctgatgaacttgtcgaagacagcggcgcagtcctgtggctcctgcagcaccgcctcgctctggttacttagcagctccaggaacagctcactgtgcagtcccagcagcaggcggtgggcgtggaatacccggacctcatcggtgcccgcagcctgcacccgcagaaccacatcgctggcgttgcctgccgcagcagctcctgcaagcgctggagcaccgcctgggagtggttgatggaggtgccagctgcctccccgccaacatcggctctctgtgctgcagcaggaaggaacacagcatagcctgagaaggtgcccgggcccagaacctcagtcaggggtggagagggaccagctggagacatatgcatgggtgtgagcagagggcaaggtgggcctaggcgggttgtatgtgcatacctgtttgtgcccacgaggcgcgtggatgcatcggtgcacatacaaacgcaccctgggtgggaaggtcatgccaatgcaaaccccaagaggatgctcttggaagggggtgcattcaggcagggggaggttgtgctcaggtttaggacaacatgcccagaactcatctccatgctgccagccccccaggcaagggttgaggaaactcgtggtcccacccttctcacttcctaaagaattatccatctaaccccttggagcagtagtcagaagtggtgcattcactaacaaatatttattgagcacttactatatgctagacattctcctaagagcttgggatgtggcagtggacaaagcaagccaagttcttatgctcataaaagcacgaattgacatatcaaacgggtaagacacacacaaataagcactccagttttaaaggagccagccagggaaccagtgtcaaggcaggctccagccccgcaaaggcccttgaacggaatgggcctggggtactgggagcagagagagcattagggaggccacagcagtagcaggagagaggggcgggtgtgagacgaggctgcgggtgtggaagggaagctgttttccaggcccagccctgccctcttgggtcctgatctctgagacagaagccgattttctggggtggccagcaggggacaggagaaagtgcgaagggccagctggtgctggaatagaacttcctgggtaactgagcattgaggctggcaggccggccctttgcttatgctccaggatgccccgacagtcagatggggatatgcactcagttatagaaactgtcagcagctttcccaagccgagaacagcgaggggagcctcgcagagggaggcgggcgggggcctgattgcagcagatggccgcagccacatgtgcacgcacagcacatgcaggcccgtggtgcacacaggagagaaggctcacacaggagcagagcatctgtgcatgagagagggaggccgagggacaaagggagggtgaaagagaagcgggtagtatgtttcccagcacggccttccccagctgtcactttgaaggacctgaatgctgatggcgtccccattcagcctctgcccaggacaatgggcaatggagggtcctcttgtccttaagagccctgcccacctgcctgccaggcccctccttccttcagacagatgagtccgtggagctgtccggtccaccccgtgctctccccagcagctggacaccgccccctcctggccggccgcgtgcagccagggctgggacgacctgccgctccaccctgccccgcacctggcccactgcccgctcacctgcatgggtgaccaggcccaccaaggtcagcatggcccagaagctgccccaggacccaggcttggagtagcctctcctaggcatctttatgctcagcccccaagtccactggagggacggtgaagcccagaccactctgctcacatccctcttccttatataggatccggcacaaggggacggcaccccccttcctgcttggcctccctcccccactcagcctcctccatggattggtggaaactggccccagctgttgcccaggcaaccacttaagccagagagcggcagccccgggggctattgtgctgcctgtgggcccccaaggggaacagatccggaaccctcctcccccaatctccttaccacccagcagggctagccgtgcctctccctggaaagtttcaggctctctgcagaataggcgaggggctccaggaccactggcagccattggcctgagggtccccagttccctcccccaaccccaggcctcggccctggcacagagcacacttggcagcgtcgtgcctggagcaccatggtgagccggctgcaaaggaagggcctggaagaggaaaggagaggcggctgaggctcccacccctcccccactcccattttggggtggggcagctcctcagagagaagctcagagatctctcgaatagggcccatgggcaactgatgtcagtttcatattctttgttgaagaaggttcctggaatgctgtggggagggtgatgggctggcaggaaagttctgtggggactgtgactgtcgcctcccccaggggcaagctgagccaggtggcagggctgggcatagagcagatgcaccctgccccgtgcaccactgcatgggtgacccctgcccagagcggggctggccaccttctagctctgcgctccagccagcccaaggctggggactgtctgccctgctatttcctgacttgaattctccttccccaagtggcctcaggtctctgggttcacctccttggaaggcttgttttaccagcttctgtcttatttcccactgtaatttttccttttccaggctaaggaggcatgctgcagacctggtgtttcactcccaatgtaaggaaactgaggcagggagctaggttgcagtctcagttgggttagtgcagaggagtgctcttctaaaaacaaaggcaacagagagaggaaagtgagtctggagctcagcaaaagcgcgcgcgcatgtgtgtgtgtgtgtgtgtgtgtagggtggcatgctgtgagtcctcacctttgcagggagccagcagggtctgccccagttcttcgtgggagggactcctttgagcttggctaaccgaagtgggtgactcccaagggatctgactccgaggcagggctctaggttggggatgaattaaatcttcctctccctggctctctggatcccaggggccagctcgatgcattgatttctgcctctgcgtggcacagagacccagcagctccaccccctctctggagccgcagagagagcaagaactgggtctggcacctgcctcgtccgggttggcagagttggagctctccagcccagcgcaaacccctccagctgccctgagtttcatgcctggctcccctcgtccaaatccactatcccttgcccactggctgcccgcctgcccttcccatgggctgtaccatgtcctggctcaacccagcaagtccaagtctccatgcagcagggcagccctggtccctgagggcatcccagcttccaagcacagtgctttcgataggaatgttattgatgataagagaacccgctactcagaaaactgtcgtttgatatttgtgcctctcaactccagcctccttcagcctctgcatcagtcattctttgttttgttttgcttttctagaggcagaatctctcagtcaccaaggctggagtgcagtgacacaatcatagctcactgcagcctcaaactcctaggcccaagcgatcctcctgcctcagcctcccaagtagctgggacaaaggcagtgccaccacgcctagctaattttgtgtcagtcattcttgaagggtagccacctgcattagaatctcccatgctccaccttggaaccaggattttcaggggcagggtctggctgtctgtattttctaagtactcccagacaattgttatacgcaccccaagacaagcgctacctactagagctagattggtggcatttcaagtgtgaaggaagctgggaggccctggatcatcaagaagacccggaagagtcacctctgactccccatctctgacaggccccacctcccattatttctaatctcccttatccctggccctcttcgaatgatttagaaactagctttccacatagaggcattctctgttctcattttctttttttctttttttttgagacggagtcctgcaccattgcccaggctggagtgcagtggcacaatcttggctcactgcaagctctgcctcctgggttcacaccattctcctgcctcagcctcccgagtagctgggactacaggcgcccaccaccacgctcagctaattttttgtactttcagtagagacggggttttaccgtgttagccgggatggtctcaatctcctgacctcgtgatccgaccgcctcggcctcccaaagtgctgggattacaggcgtgagccgtgcccggcctctcattttcgtaacagagcattgctggagtgtgtgtgtgtgtgtgtgtgtgtgtgtgtatggtatgcatgtgcacatgtgtgtatgcagtgcgtgtgtgtgcatgtgcctatttatatgtgtgtgcgtattgtgtgtgtccatgcatgtgcgtggtgtgtgtgcatgcatatttgtggatatgtgtgtgtggtatgtgtacatgcatatgtatgtgtgggggagtgtcctggggcgggagagaggaagccaggtatttgccctgagccctttttttttttcttttgagatgaagcctcgctctgtcgcccaggctggagtgcggtggcgccatctcagctcactgcaacctccaccttctgggttcaaacaattctcctgcctcagcctcctgtgtagctgggattacaggtgtgcactactatgtgcagctaatttttgtatttttagtagagatgaggtttcaccatgttggccaggctggtctcgatctcctcacctcaggtgatcctcccgccttggcctcccaaagtgctgggattacaggcgtgggcacggtgcttggccaagtctttgagaggaagaatctgcagcactgcatatatatatatatatatatacacacacacacacacacacacacacacacacacacacacacacacacacatatattggccccatggatctgggagcgccataattccttgaaggcaagtctgatgaattcacaagccagcaccatcctagagaggagtgttacttcccgccccagacgggagtgtttatagcccaagccatgtgtctgaggtcttatgaccaggaacctcagaggcaggatttatttttcgagttctgagttgtgcttgacttttcttttttctgatttttgttgttgttgttgttagatatggggtctcactctttcacccaggctggagtgtggtggcactgtcatagctcactgcagcctcaaattcctgggctcaagcaatcctccagcctcagccttccaagtagctgggaccacaggtatgaaccactgcacctggctacttgacttttctttccacaaccccatgttgtgtttttgttttgttttgttttgttttgttttgtttgagatggagtctcactctgtcgccaggctggagtacagtggtgcgatctcagctcactgcaacctctgcctcctgggtgcaggcgattctcctgcctttgcctccggagtagctgggactacaggtacccactacctgtagtggctggctaattgttgtatttttagtagagacggggtttcaccatgttggccaggatggtctcgatctcctgacctcgtgatctgcccgcctcggcctccccaaagtgctgggattacagatgtgagccaccatgtccagcccatgctgtctttttggggaagtttttccaattgtgataagtgatccctttggacaaggaatctctagtactgtaaaagcaacggaaaactcttgcaagcttgggaccagataaagagtttctgaatctgcaaagggggtgatcagacactggactgtggtaacacctcagaggggtgggctccagacgcagcctggccctacctggcaccctcccttgcatctgtagtgcctcctgtcctgacttagggttccctgagtcactgggccacttggactggggacaggagatcatgggtttaagttccaggccccgtgtacacaggggagcacataaaggtaaatatgaggccgggcatgatgtctcacacctttaattccagcactttgggaggctgaggcgggtggatcacttgaggtcaggagttcaagcccagcccgggcaacatggtaaaaccccgtctctactaaaactacaaatattagccaagcttggtggctggtgactgtaatcccagctacttgggaggctgaggcaggaaaatcgcttgaacccgggaagcagaggttgcagtgagctgagattgcacccctgcactccagcctgggcaacagggtgagactctgtctcaaacaaacaaaaacttaaataagaaggaatccttggccaggtgtggtggctcacatctgtaatcccagcactctgggaggccgaggcaggtggattgcatgagcccaggagctcgagaccagcctaggcaacatggcgaaacaccgtctctacaaaaaatacgaaaattagctgggcgtgttggtgcttgcctgtaatgccagctatttgggaggctgagatgggaggatcacttgagcctgggagttcgaggctgcagtgagctatgatcacaccactgtaccacagcctgggtgacagagtgagaccctgtcttgaggggtagggaggcagaaggaaaaaaaagagagagagagaccctggtgctcaggcctggtggctctggctggactgatcagggctgaagacttcagagaccaaaaaggtcaaggtgtggccgggtgcggtggctcacacctgtgatcccagcatttttgggagacccaggtgggcatatcacctgaggccaggagctcaggaccagcctggctaacacggtgaaaccccgtctctactaaaaatacaaaaattagccaggcatggtggcaggcacctgtaatcccagctacttgggaggctgaggcaggagaatcactggaacccaggaggcagaggttgcagtgagccgagatagcaccattgcactccagcctgggtgacagagcgagactctgtctcaaaaagaaaagaaaaaaaaagtcaaggtgtgcggctgggtcttcataacatctttcaccttgcccaggctggctcagaggtgactgccttagtggataggatcccttccaccgtgggctagcagcctaccctggtcactgacaccacaccatgtaggaaagaatcgccaccaccaagaaggggcctctcacctctgtataggctgtgtgctggctgatgacgtggttgccctgtcctgtctgctgctgccactgagctggacatctccaggctccatctcttgaaccatggatcccagcgttgttagcaatgagtattatgatgttgcccatggagcaaaagatccagtggtccccacttccctgcaggacatcactgctgtcctgggtacagaagcatatactgaggaagacaaatcaatggtgtcccatgcacagaaaagccagcattcttgtctcagccattccaggtggctgaggtctccacaggtcacagggggaagctgggacctccgaataaggccatccaaggactccagcagtttccgccaggtgaatccagctgcctcccagaacaggccttctatggggtgggatggtaagttgctggaaggacgtgcatggggcatcattgtagcaaactcagtccccctcctccatctctccctctcctcgctctgaatccagggagctctagttttctgtgtagcctgtgtgacagccttggttgaaacccttgtgttccgtctgaagaatatttaaggtttccagtcaagtgtacatccctcaaagaaacaaagtgggcttggcatggtgactcacacctgtaatcccagctctttgagaggccaaggcagaaggaccacttgaagcctggagttccagaccagcctcggcaacacagcgaggccccaaactctctctatatctatacataaaatttaaaaaacaaagtgtagggacagggtgggcactcggtaaatgttggcaggaccctccttgcccctcacccatggcagctccttgaagagagggtcagcctcctctcacccctagcctcctgctgcaaggaggtggtggcctggggcgtcatctgtgctacttgcactttctggggctggggtcccagcactccaccagtagactctgagcgggcagctccgtctccagtcccactgtgccacccagggtgcctagccaaaccatgggactttcaggcttgcagggtcaggatgtggccaccagggggcagcagggcctgcgctgtgagtatccgagggggggttgggatggggagttccaggctctgatgtgagatctaactcccagagctgggaagctccctatatttcctgccatattttctgctgcattcccagaggacaggccatgggaggtgattccaggggggcctgagctctcctcccgagaccgtccacggggcatccatgtcccgggtacctgcttgtgggctgctctggtcactcttcctctagggcaggagagccagtctggcctcttctgagtgcacaccagcaacggctgttgtttatttgccagggattgatattcttgagggatggtccatttcaccagggccagggaaacaacagcttgcaggactgtggtttcccagcaccggctgcaggcagcctcgtccggctgctcccagaggatgccccaccctgtgcacggctgcctgccatcctgcccctgggggtagcctccacctcccccaccatggccactgcaggactgaccctgtgcacctggtcccctgagcctcttgggatcatagccctgtctgtggcagccttaccactcctacctggcacgacttccccaactcctcacagaggtgccctactctcttccctttcagtctggatgctcatagagtcagcaccctgagtccttctgcctgtccccaaagtcctcagccccaggtttgaccccagctgaacacaggccagctcacagagtgccccggggcacgaggcagccccccagaacccccatcctgccatcctgcctcttctcctcacttcctgctcccccaggcatagacatacctgtgaaccccatgccaccctcagctcgtctctcctgaagctgaagcccctgcccagcccgaccccttcccctgcctgtgcgccttagagcaccctggtttgctccaccagcatctactctagctctttccccggtgcctccgcccaccagttccttcctcctccttcccccgccccgccccctgcactaacaggctcagtgtctgcgtaaggatcctggggcaaacaaccacttggagagccaaggggtgagaggtacagctggcgatgctgacagggagctgcggggaccctcagaaaaagccacaggtgacccaggactcaggcgcccagagcatggggcttgagggacgagagacaggtaaggcatcttgaagtggggtgtgctgggggcaataaggtggaaaggcaggagggaacaggaggcaggttagggacctagagggtggagtaggggccaaagctgagagtgagtgagcagtgaccccccggcctcagcaggaaacgaaaagctggagttcagcctgaaagagacgcgcagtgtggcttcaggggaacaggggccagagtggacggtgcttatcctagaccagccaccttacccctgtggactgagtttccccatctgtggacttgggccattccagctttagtggtgctcacctttgaagagggtatctttagtttagaaaagagggggccctaccaacagcctctccttagagggggacagctgttgagtggagctgtgcagacctggggcctccactgtggacctcctagagaggtccctgtgtgtggctggcatcacccgggtcggaatcacccaggttgctgattacaagcacggctgctgcaaccccgcttcagaccctctggcccggaggcggcccaggagcctgcacctcgacaagtgccccctgtttcagagcccctgctaggccgggtgagggcccatggggaggacccatggggagcaatggtctctatggcagcaggccgtgctgccagggacttcccatcagtgggggagccgggccactgagggagtggggtgacatggggtgggggtgagggtggtcttggcaagaattctcacagcaacagacagtgcactcagctgggtctgactagagggtctgcacagagcagggtgactagaaagaccccaggtcagggcggggctgcgcccagccaggttagaaatagaccagaggctctgactctgcccatccgcaccttctagctggccagccacgagtgaccctgctgcccacgccccacgtcagcgggctgagccaggagtttgaaagccactggccagagatcgcagagaggtccccgtgtgtggctggcgtcatccctgtcatctactacagtgtcctgctgggcttggggctgcctggtgagtggggagctggggtctggggacttgggcttggccagaaatggggatcctccttcaatgggtgccagtcctctgtgtttgacccctgaggccctggatcatagacccctggtctttccttgccattgtcagggtgttctgggtcactggaggggaatacaagtaaggggctaggattgggggtgctcacagctaaacccaagttttccccagcagtgagcgcactcttaggataacaaaattcacataggaactggctcagctcagtacaaagctccccgtgctgcccatgccttcagagagcagagcttggggcagaggtgggtgtgtggatatgggaaggacgggtggtctcggccctggggatttccccaagtctgatagctaaacccatgcctgtgtctagggacgcctccattctggaggacacagaaaacctaaaaaggacttggaggacaatgccataggacaggtagctttttttttttttttgagatggagtctcactctgtcacccaggctggagtgcagtggcatgatctcggctcattgcagcctccacttcccaggttcaagcaattctcctgcctcagcctcccaagtagctgggattacaggcatgcaccaccgtgcctggctaatttgtatatttttttaacagagacggggtttctccatgttggtcaggctggtcttgaactcctgacctcaggtgatctgctcgccttggcctcccaaagtgctggattacaggcgtgagccaccacacctggccaggacaggtggctgctgaggacccttccatgtgcacttacctgtgcataaccggggtacagccagtggcctgcagtggatggacagggcagagctggcctgggtggccttctgggcaaagtggggtttcagaaggatctggaaggagaaaaaagagaagccagcgcagcctctgcacatgcagatggggaggtgcgatggcgacaccttggaaagcagagtctgagctctcttctgatgcctctcccctccctcacctcggctgccctcagtcagcctcctgaccgcagtggccctggcgcgccttgccaccaggaccaggaggccctcctactactaccttctggcgctcacagcctcggatatcatcatccaggtggtcatcgtgttcgcgggcttcctcctgcagggagcagtgctggcccgccaggtgccccaggctgtggtgcgcacggccaacatcctggagtttgctgccaaccacgcctcagtctggatcgccatcctgctcacggttgaccgctacactgccctgtgccaccccctgcaccatcgggccgcctcgtccccaggccggacccgccgggccattgctgctgtcctgagtgctgccctgttgaccggcatccccttctactggtggctggacatgtggagagacaccgactcacccagaacactggacgaggtcctcaagtgggctcactgtctcactgtctatttcatcccttgtggcgtgttcctggtcaccaactcggccatcatccaccggctacggaggaggggccggagtgggctgcagccccgggtgggcaagagcacagccatcctcctgggcatcaccacactgttcaccctcctgtgggcgccccgggtcttcgtcatgctctaccacatgtacgtggcccctgtccaccgggactggagggtccacctggccttggatgtggccaatatggtggccatgctccacacggcagccaacttcggcctctactgctttgtcagcaagactttccgggccactgtccgacaggtcatccacgatgcctacctgccctgcactttggcatcacagccagagggcatggcggcgaagcctgtgatggagcctccgggactccccacaggggcagaagtgtagaggagggggcccagctagggagctcagggtggctcatggccacatgtactggggcctttgaggttgtacccaaaacacgtttatcaacagcttgctttccttgggtgggggtggaggctcctcctttgggtgtggctcccaggtagagaggaggacaacttagccagctcttatgtttgcttcaccagcaatccctatttcctgggaagatgaaagggcactgccaggcacaggctaatagcatcagtgctgtgggcattcctttgcggggggcattttgcctggctcatcgtgaatgccagattaatgttggttgaatggatagaaaaacggacagatggaggccgggtgcggtggctcacgcctgtaatcccagcacgttgggaggctgaggcaggcggatcacgaggtcaggagatcgagaccacagtgaaaccctgtctctactaaaaatacaaaaaattagctggacgcagtggcgggcgcctgtagtcccagctactcgggaggctgaggcaggagaatggcgtgaacccggaaggcggagcttgcggtgagccgagatcccgccactgcactccagcctgggcgacagagtgagactccgtctcaaaaaaacaaaaacaaaaacaaaaacaaaaaaggacagatggatggatggatggatagatggatggatggatggatggatggatgtgaattgtctccagcccacccccctttcctggtgcctgcttctcattccctgaatggatcacctctccagctcctagtggcaatgccagagtttgaaaaggaagatatcttcaggacttaaggcatttcttaggctggaggaaacaaagaaattgagctgagcaatgggagggggctgcttgggggataaaagcccccagggccagtcagaaaggggtgatcttaaatcagatgtgaggagcccaggcctgtgtctgtccagccacaggagacacagccccttaggtctcaaacaccctggttggattccacattactccctgccctaaaccagtacaggttcatgggcccagaaccagcactggggctatagtttttgttgttgccaatgaggagaaagaaaatggtctcttaacccagggtactaggagaacaggaaaggaggacctagctggagatgaccctgagcttctgctgagccccccgagctcacgccccttggggaaaggtcttttcctccaccactgggaggcgggagttggcagagtccatcagagccatgaggagctctgctccccaccctcagcctctccagggaggctctccagggcccctctctcctctcagcaccaccatcccggagaggcagctgggagagatcagcagatggaactcccagctgctccaggctgtgggtaaacacattagcagctgagctaggaccactttctgcttcctggtcaggctgagctgacctttgtcctgaatgggaggttcagacctgcccccaccctcttagtgggatgacatcagtcaaagagctgtttgtgcacccagcacacagtcaatgcagaatcaatgcttggctttccactttgcctctctgcttctccccagagcagggatgtccagacagggaggttcagctaacccagaaagaggataatgtgggtctccaatgcatttgccatgattctcaactccaaaaaactctgaaaaccaaaacatgtttccgaaatgtgccacaaacacgtttagcggcacagcgtgacccggtgtgaggtgatttctggtcccgaagttgtcctgtgattgtgagtcctgccagccccaccagggactgttagtggagtgatcatgtactgctgtccacaccccacggaatcgtgatcgaacgcgcaccactacatgcacacagcaccttcctctgctctgacgtattctgaattccaagacatgtggtgccgagttcagagaaaggactgaagacctgtaagcccaacacttctgctccggggtggtctacactgaccctgagcaggtgttaaggatggaggaccccctcacccgcccacacctccatgtgcacacacagatgtatccccaggcagggttgatgcacctgcgctttattctttgcttaaggaggagggggatgcaaatgcaggtacccggggagggagaaggtccaccggaggaccagataatgtcggccccagcccagcctgagcctgccctacagaagcgggcacgggaagaaagcacaaagttccatggatgaagaactaaatggaacaacctgcagggaccctgcaggagagaacccagtatcagggaagagcatctgtgtctccatggatggcaacagcagctgggtctaggccagaggcaggatgccttcctcagctggctggggggctgtctttcaggaggccagctgcaatattagctcaactgtctctgagcaccagtgaaaccaggaacttccagaaactgttggggaggctctttcaagacacagttttgttttgttttgttttgttttgttgacatggagtctcgctctgttgcccagtcgctc

SEQ ID NO: 1072 - protein, 1464 aa, Homo sapiens [sequence omitted]

SEQ ID NO: 1073 - DNA, 1541 bp, Homo sapiens
  source (1)..(1541)
  CDS (201)..(1006)
  CDS (1044)..(1341)
catttcactttcagcacgtgctctctacggttaatgtcatccttgggaagcccgtcttgaacacctggaaggttttacaacagcaatggaccaatcagagttcacagctactacattcagtggaaagattttcccaagcactacaattaggaaatagccctcctttgtccttctcccaaactaatgtgcagatgagcagcatggtaatcatgtccagccacccaaaaacctatcaacagaggtttgttttcccatactttgacctctggggcaatgtggtcattgacaagagctatctagaaaacttgccatcagattcacctattgtcaccatggctttcccaactctccaagccatccttgcccagggtatccaggaaaataattttgcagagagcttagtgatgacgaccactgtcagccacaatgtgactatgccattcaagatttcaatgacttttaagaacaacagcccttcaggcggcgaaacaacatgtgtcttctggaacttcaggctttccaacaacacgggggggtgggacagcagtgggtgctatgttgaagaaggtgatggggacaatgtcacctgtatctgtgaccacctaacatcattctccattctcatgtcccctgactccccaaatcctggttctctcctgggaatactactggatattatttcttacgttggggtgggcttttccatcttcagcttggcggcctgtctagttgtggaaactgtggtgtggaaatcagtgaccaagaaccagacttcctatatgcaccacacctgcatagtgaatattgctgcctcccttctggtcgccaacacctggttcattgtggttgctgccatccaggacaatcactacgtactctgcaagacagcctgtgtggctgccaccttcttcatccacttcttctacctcagcatcttcttctggatgctgacactgggcctcatgttgttctatcgcctgcttttcattctgcacgaaacaagcaggtccactcagaaagctattgccttctgtcttggctacggctgccctaccggccatctctgtcatcgtgctgggagccacccagccctgggaagtctatatgaggaagaatgtctgttggctcaactgggaggacaccaaggccctgctggcttttgccatcccagcaatgatcattgtggtggtgaacataaccatcactattgtggtcatcaccaagatcctgaggccttccattggagacaagccatgcaagcaggagaagagcagcctgtttcagatcagcaagagcactggggtcctcacgccactctgggggcctcacttgggattttgatctcaccactgtgttcccagggaccaaccttgtgttccatatcgtatttgccatcctcaatgtcttccaggtgagttttacagtgcgggactttcaggaagattttattcctgtaggacaaattaatgatagaaacacaaacaagagtaggaatggggaaggatttcagcccagaggaagcctcagctctaaagattagt

SEQ ID NO: 1074 - protein, 367 aa, Homo sapiens
MVIMSSHPKTYQQRFVFPYFDLWGNVVIDKSYLENLPSDSPIVTMAFPTLQAILAQGIQENNFAESLVMTTTVSHNVTMPFKISMTFKNNSPSGGETTCVFWNFRLSNNTGGWDSSGCYVEEGDGDNVTCICDHLTSFSILMSPDSPNPGSLLGILLDIISYVGVGFSIFSLAACLVVETVVWKSVTKNQTSYMHHTCIVNIAASLLVANTWFIVVAAIQDNHYVLCKTACVAATFFIHFFYLSIFFWMLTLGLMLFYRLLFILHETSRAALPAISVIVLGATQPWEVYMRKNVCWLNWEDTKALLAFAIPAMIIVVVNITITIVVITKILRPSIGDKPCKQEKSSLFQISKSTGVLTPLWGPHLGF

SEQ ID NO: 1075 - DNA, 1036 bp, Homo sapiens
  source (1)..(1036)
  CDS (201)..(836)
tcttgcctggggcatgaggccatgcgtctggtcctctatggccatgatcccaccgtctcccaaggcactctggagaagcaagttggtgttacgttggtcatctctccacaagccttccagagcatgaggaagtgagcgcattgctgcgtgcagaggggtgagggctgccaggttggcggcaccagaggtcctcacggcccatggccttgcccagggccctgtctgtggctggcacctggctgagcccagcgtgcaaaaccaaaggccctgagcgtgccccctgttcctgtccccagtaccagggccgcatcaacgagctgctgctgtcggtcatcacctgggtgggcattgtgatctccctggtctgcttggccatctgcatctccaccttctgcttcctgcgggggctgcagaccgaccgcaacaccatccacaagaacctgtgcatcaacctcttcctggctgagctgctcttcctggtcgggatcgacaagactcagtatgaggtgggctgggactctagggcaggtgacggccagcgcctgggggccgggagaagaagggggacacctgtccaggcagcagcccctcaccctcagtgctccccgcagattgcctgccccatcttcgccggcctgctgcactatttcttcctggctgccttctcctggctgtgcctggagggcgtgcacctctacctgctactagtggaggtgtttgagagcgagtattcccgcaccaagtactactacctgggtggctactgcttcccggccctggtggtgggcatcgcggctgccattgactaccgcagctacggcaccgagaaggcgtgagtttccacctcccagccctgcaccctcccacctggttccctgctgggcggcaccccttggaccaggaccctcagggcggtagtcccttcctcctcctgatcccagaggctgcagcctgcagagtcctaggccttcatgagtcgctgggaatggctcctcggcttctctctataccccggccctgtttcctttacagctgc

SEQ ID NO: 1076 - protein, 211 aa, Homo sapiens [sequence omitted]

SEQ ID NO: 1077 - DNA, 1003 bp, Homo sapiens
  source (1)..(1003)
  CDS (201)..(803)
ggtgagagctctgggcaatggaatcttaccaaacgtgcagtgctctgttttggagacagtgacaccctttttgtttatttcagatataaaacaatgcaggctttgtcctgaatatcattatccaaacaagaaaagggaacataccttctcaaataggagaccttcctggcctatgatgaaactttgggcctgactctggcatgcacagccttgttctactctgtcctctctgttctgatccttgtggagtttgtgtggcaccaaaacactcccatagtcaaggccagcaaccagactctgagctacaccctccttgtctccctcacactctgctttctctcttcctcgctcttcatcggccgccccagccctgccacctgcctcctctcacagaccacctttgcagctgtgttcacagtggctgtgttttctgcagggccttccaggctataaggccagaaagcaggatccgaaagtggatgggtccccaaaaaacaaattctgttgtcttcctttgctcctttacccaagtgaccctctgtggaatctggctggggacagagcctcccttcgtaaacaaggaccctcagttcatgcctggctacatcattatccagtgtaatgagggctccgtcactgccttctactctgtcttgggctacttgggcttcttggttttagggtcccttgctgtagcctttctggcaaggaacctgcctgatgctttcaacgaagccaagttcctgaccttcagcatgctggtgtcctgcagtgtctgggtggccttcctcccgagttactaaagcacccagggcaaggccagagtggccgtgagatcttctccatcgtgggctccagcactgggttacttggctgcatctttgctcccaagtgctatgtgatcctccttcatctagaaaggaacactattcaatgtttaaagaagcctagtccaggcatggtggctcacacctgtaatcccagcactctggaggccaaggcg

SEQ ID NO: 1078 - protein, 200 aa, Homo sapiens
MHSLVLLCPLCSDPCGVCVAPKHSHSQGQQPDSELHPPCLPHTLLSLFLALHRPPQPCHLPPLTDHLCSCVHSGCVFCRAFQAIRPESRIRKWMGPQKTNSVVFLCSFTQVTLCGIWLGTEPPFVNKDPQFMPGYIIIQCNEGSVTAFYSVLGYLGFLVLGSLAVAFLARNLPDAFNEAKFLTFSMLVSCSVWVAFLPSY

SEQ ID NO: 1079 - DNA, 1441 bp, Homo sapiens
  source (1)..(1441)
  CDS (201)..(1241)
ggcccctggggtctgggaacatgtctggagcctggagaactcctggcggtacaggaggtggctccagcttcctgccttggccgagctcgagctgtctctgagaggcggtccttgggttttcattctctcccccttcaccattgggcagtctcaccctgtgttgtgtgattgtatcgtatgtgtgtgagtgtgtgtcgtgtatgtatgtgttgtgtgactgtgtgtcatgtgtgtctgtatctgtgtgtctgtatctgtatgtgtgtgtctgtatctgtgtatctgtgtgtgtctgtatctgtgtatctgtgtgtgtctgtatctgtgtgtgtgtgtctgtgtttgtgtgtgtctgtatctgtgtctgtgtctgtgtgtgtgtgtctatgtgtgtgtctatctctgtgtgtgtatatctgtgtttgtgtgtgtgtgtgtctgtgtgtgtctatgtatctgtgtgtatgtatctgtgtgtctttctctgtgtctgtgtgtatgtgtctgtctctgtgtgtctgtgtgtgtatctgcatatctccgtgtatctctgtgtgtatgtctgtatctgtgtctgtgtatctgtgtctttgtgtgtatctgtgtgtgcgtgtctgtctttgtgtgtctgtatccgtgtatctgtgtgtctgtctctgcgtgtctgtgtatgtgtctgtctctgtgtgtctgtatatgtgtgtgtgtcttcgtacctctgtgtgtatctctgtgtgtgtatgtatgtgtgtgagtgtgtgtgtgtctctgtctctctctctgacccccctgctttggtccctgtctccggggctttttctccccaactctgtgcctcctctctgattctcctcctcccttcctcgtggtgtttccttctcctctggcctctctcctctgtttctaactctgccttccccaccccgcgccctcttatttccctctctgcctcctctcatttcctctccctgtctctgtttttatctccctcccttcctgtctgtcttttcttccctttccctccctttccgtgtcttcttctcccttctctcctcctgcccctcctttattttctctcaccgtccctcctctctgctgtctctggaagcttctatctgggccccatccctctctccccgctgccttacaccggtgcttttcacccacatccagttttctccttccaacctcggggccacctggaaattggcgagaaactcgacatcatccgtcagaagtgagcccctcccctggctccccacgcccctctcccagctgcctgcaccccgacagctggctcctgcctcattggcctcagcgtgagatgtggaaatgccatgaatctttgatgccccagccccacccagcagccgggcctcttcccccgggtgttttcatccccacattccctgccagcctggcccatgtgcacccgcctgtc

SEQ ID NO: 1080 - protein, 346 aa, Homo sapiens
MYVLCDCVSCVSVSVCLYLYVCVCICVSVCVCICVSVCVCICVCVSVFVCVCICVCVCVCVSMCVSISVCVYLCLCVCVSVCVYVSVCMYLCVFLCVCVYVSVSVCLCVYLHISVYLCVYVCICVCVSVSLCVSVCACLSLCVCIRVSVCLSLRVCVCVCLCVSVYVCVSSYLCVYLCVCMYVCECVCVSVSLSDPPALVPVSGAFSPQLCASSLILLLPSSWCFLLLWPLSSVSNSAFPTPRPLISLSASSHFLSLSLFLSPSLPVCLFFPFPPFPCLLLPSLLLPLLYFLSPSLLSAVSGSFYLGPIPLSPLPYTGAFHPHPVFSFQPRGHLEIGEKLDIIRQK

SEQ ID NO: 1081 - DNA, 1000 bp, Homo sapiens
  source (1)..(1000)
  CDS (201)..(800)
ctgctgaaagtgccgtttactcatctgttctgttcgcctcttcagggtgtgcccactggcgtggcggggccctgctctgctcttctgtgagggccttgcccaccaaggaggcgctggctaagctggtgggaaatggcagatgaggaggcctggctctcccgagaagcagccagggctccctgggggtcaggagcgagggcatgtctgggaaacgcccctctgctgcagtgcagggctggtttgggagagcaaggctagagctgggtggggagacaagggtttctcacatgctacaggcccaggagccagcaccatcctggggacgcggggctgcagagaggacggcagagctggtgaggatgaacggcaggcctgtggctgagggaggagggcctgccagcctaggggtgggtggatctgcaatggtggagagggaatccaggaagaaggcaggcagacacaggggaaaggttatatgtccaaagggtccctatgccgtcaggtgcctggggtttttggcagtgcttccatccacttgtgcaggtgagactgcccaaggagcacagggactggaacgggagactgcccggtccatgctggacttgctgatctcagctgaggtcgagggtattcagagcccgtcgtggtgttttatacggtcctgtacttcctgttatccttggtccattttcttctacactatcttccctccagtttcacacacttggacagaagggagtggttgtttttcactgaccgccaggaaccacaacaggcttctgtgtgttccagtgaaataagccctatctgtctctcgggaatggagcagtgttaagctttttttaaaagcacaatctgaagacactggggtctggaaacccattttttcttgttctgaagcctgtggggcctccgcggttgggccttgctgaataatttggggttttaggttgggtacatcaagggtaaagggcttctgtttggatcaaacaggaggtgg

SEQ ID NO: 1082 - protein, 199 aa, Homo sapiens
MSGKRPSAAVQGWFGRARLELGGETRVSHMLQAQEPAPSWGRGAAERTAELVRMNGRPVAEGGGPASLGVGGSAMVERESRKKAGRHRGKVICPKGPYAVRCLGFLAVLPSTCAGETAQGAQGLERETARSMLDLLISAEVEGIQSPSWCFIRSCTSCYPWSIFFYTIFPPVSHTWTEGSGCFSLTARNHNRLLCVPVK

SEQ ID NO: 1083 - DNA, 1408 bp, Homo sapiens
  source (1)..(1408)
  CDS (201)..(1208)
aatcgtgattagaaaaggtaagaagccatctatactttcccgttccatccaatacatttttgttactattttatttaattcaatgtttttcttttttaaaaactattcagcttaaatactgtaccaaaaataattttaatattaaatatctgcaattctattctagctcctgtgacaaaattcaagaaaacctgacataaatgaacaacaatacaacatgtattcaaccatctatgatctcttccatggctttaccaatcatttacatcctcctttgtattgttggtgtttttggaaacactctctctcaatggatatttttaacaaaaataggtaaaaaaacatcaacgcacatctacctgtcacaccttgtgactgcaaacttacttgtgtgcagtgccatgcctttcatgagtatctatttcctgaaaggtttccaatgggaatatcaatctgctcaatgcagagtggtcaattttctgggaactctatccatgcatgcaagtatgtttgtcagtctcttaattttaagttggattgccataagccgctatgctaccttaatgcaaaaggattcctcgcaagagactacttcatgctatgagaaaatattttatggccatttactgaaaaaatttcgccagcccaactttgctagaaaactatgcatttacatatggggagttgtactgggcataatcattccagttaccgtatactactcagtcatagaggctacagaaggagaagagagcctatgctacaatcggcagatggaactaggagccatgatctctcagattgcaggtctcattggaaccacatttattggattttcctttttagtagtactaacatcatactactcttttgtaagccatctgagaaaaataagaacctgtacgtccattatggagaaagatttgacttacagttctgtgaaaagacatcttttggtcatccagattctactaatagtttgcttccttccttatagtatttttaaacccattttttatgttctacaccaaagagataactgtcagcaattgaattatttaatagaaacaaaaaacattctcacctgtcttgcttcggccagaagtagcacagaccccattatatttcttttattagataaaacattcaagaagacactatataatctctttacaaagtctaattcagcacatatgcaatcatatggttgacttttgaatggaaaaccccacaatattaagaaaagcattcatgtgactttattagggacactaaactacatcattaacatgtcacagcttggttgacaataatcaccaagaaaatctctttggtttttaaaaataaataaacatatattcataaaactcaaaaaacagttatactgaacgttgagatggcagaaact

SEQ ID NO: 1084 - protein, 336 aa, Homo sapiens
MNNNTTCIQPSMISSMALPIIYILLCIVGVFGNTLSQWIFLTKIGKKTSTHIYLSHLVTANLLVCSAMPFMSIYFLKGFQWEYQSAQCRVVNFLGTLSMHASMFVSLLILSWIAISRYATLMQKDSSQETTSCYEKIFYGHLLKKFRQPNFARKLCIYIWGVVLGIIIPVTVYYSVIEATEGEESLCYNRQMELGAMISQIAGLIGTTFIGFSFLVVLTSYYSFVSHLRKIRTCTSIMEKDLTYSSVKRHLLVIQILLIVCFLPYSIFKPIFYVLHQRDNCQQLNYLIETKNILTCLASARSSTDPIIFLLLDKTFKKTLYNLFTKSNSAHMQSYG

SEQ ID NO: 1085 - DNA, 1405 bp, Homo sapiens
  source (1)..(1405)
  CDS (201)..(1205)
gctgaggactgaaaagagagggtgagtaattcttcatgacctgtaggatcccaaagatggcgacctgccagcctggactgccagcgaaggccagaatcgtgctgtagctctgaacccacagctcctctgcccctggcccatgagaatttcagctggagagatagcatgccctggtaagtgaagtcctgccacttcgagacatggaatcatctttctcatttggagtgatccttgctgtcctggcctccctcatcattgctactaacacactagtggctgtggctgtgctgctgttgatccacaagaatgatggtgtcagtctctgcttcaccttgaatctggctgtggctgacaccttgattggtgtggccatctctggcctactcacagaccagctctccagcccttctcggcccacacagaagaccctgtgcagcctgcggatggcatttgtcacttcctccgcagctgcctctgtcctcacggtcatgctgatcacctttgacaggtaccttgccatcaagcagcccttccgctacttgaagatcatgagtgggttcgtggccggggcctgcattgccgggctgtggttagtgtcttacctcattggcttcctcccactcggaatccccatgttccagcagactgcctacaaagggcagtgcagcttctttgctgtatttcaccctcacttcgtgctgaccctctcctgcgttggcttcttcccagccatgctcctctttgtcttcttctactgcgacatgctcaagattgcctccatgcacagccagcagattcgaaagatggaacatgcaggagccatggctggaggttatcgatccccacggactcccagcgacttcaaagctctccgtactgtgtctgttctcattgggagctttgctctatcctggacccccttccttatcactggcattgtgcaggtggcctgccaggagtgtcacctctacctagtgctggaacggtacctgtggctgctcggcgtgggcaactccctgctcaacccactcatctatgcctattggcagaaggaggtgcgactgcagctctaccacatggccctaggagtgaagaaggtgctcacctcattcctcctctttctctcggccaggaattgtggcccagagaggcccagggaaagttcctgtcacatcgtcactatctccagctcagagtttgatggctaagacggtaagggcagagaagtttcaaagtgcctttctcctccccactctggagccccaactagatcagcaggagctagggggatgagagcacttgcttcaggcaattgacccctgtcccagcatcccccacccccagactgacaggtaactgaggcagagtcctgactttcttctataatcagtttccccattttcaa

SEQ ID NO: 1086 - protein, 335 aa, Homo sapiens
MESSFSFGVILAVLASLIIATNTLVAVAVLLLIHKNDGVSLCFTLNLAVADTLIGVAISGLLTDQLSSPSRPTQKTLCSLRMAFVTSSAAASVLTVMLITFDRYLAIKQPFRYLKIMSGFVAGACIAGLWLVSYLIGFLPLGIPMFQQTAYKGQCSFFAVFHPHFVLTLSCVGFFPAMLLFVFFYCDMLKIASMHSQQIRKMEHAGAMAGGYRSPRTPSDFKALRTVSVLIGSFALSWTPFLITGIVQVACQECHLYLVLERYLWLLGVGNSLLNPLIYAYWQKEVRLQLYHMALGVKKVLTSFLLFLSARNCGPERPRESSCHIVTISSSEFDG

SEQ ID NO: 1087 - DNA, 3024 bp, Homo sapiens
  source (1)..(3024)
  CDS (201)..(401)
  CDS (1211)..(2824)
ccatgggaaaaagatgtagagaaatagagatgcgcacacactcaaagatacaaagcaagtgtttagccagagtcctggggtgacaggaaagtgaaggacagagaaaccaacgagagagtgcacacactaaagagatagcttgagagacaggtgagacaagcagtagagtgttagagatcaatggagagagaggcagagtaatgcagagagaacttaggcagggagagacagaaaccacacggagagacacagagacaagagggtccgagaaagacagagcaagcgcacacgtgccagtgagagacagaaggagacacccagagaacccgagggagacgcagaaacaagagagttggagagacacggagacgggcagagacacagcgaacgacattgaacaggtgcgctagggacccacaaagatgaactgctggggaaatagactgagagagaaatggagagacaagagagcactagggaaagacggagacacacatgaactagcgagcgacacagtgacaggcagagacacagagagacagaatggatcagaaagagactgagggagagacgggcaagactgtgagaaagatagggagcgagagcgcaagccctgcagagaaagtgcgctagcgaaagagacacacacagagagactgagtgacaaacagagtggaagagataaatgagagtaacaggaaagagacagcgtgcacgtgctatcgagagacggagaaacagagacagacataagtgagagacaaggatgagaaagaatcaggaaacggtgagacacatacagacacacaacccgagagataaagaaaaaaagtgcgctagcgagagacactggagaagagacagaaactgacggtcgtaaacagacagaaacagagagcgcacgcgcatgcgctagcgctagcgaccaaaactccccggagccagagacagtgtgagagacaagcagagaaagcgcacgcacgcacgcgccagcaggagaaacagatgagaggaaatcagagccctggagagagacaggcagacagatctggagagtccggaaaggagccatagaagctgcccgcactggggatggagccgtgcggaaacccggggtagggggtcctgcagcgtccttgctgggcgcggaggcttctccccttgacgggtgactaactctgcctgcgtgtttcttttgtcaccagcataggcactgagtgcggtctgtgcacccctttgccacccaccggtgccggcactgagcctgcaacctgtctcacgccctctggctgttgccatgacgtccacctgcaccaacagcacgcgcgagagtaacagcagccacacgtgcatgcccctctccaaaatgcccatcagcctggcccacggcatcatccgctcaaccgtgctggttatcttcctcgccgcctctttcgtcggcaacatagtgctggcgctagtgttgcagcgcaagccgcagctgctgcaggtgaccaaccgttttatctttaacctcctcgtcaccgacctgctgcagatttcgctcgtggccccctgggtggtggccacctctgtgcctctcttctggcccctcaacagccacttctgcacggccctggttagcctcacccacctgttcgccttcgccagcgtcaacaccattgtcgtggtgtcagtggatcgctacttgtccatcatccaccctctctcctacccgtccaagatgacccagcgccgcggttacctgctcctctatggcacctggattgtggccatcctgcagagcactcctccactctacggctggggccaggctgcctttgatgagcgcaatgctctctgctccatgatctggggggccagccccagctacactattctcagcgtggtgtccttcatcgtcattccactgattgtcatgattgcctgctactccgtggtgttctgtgcagcccggaggcagcatgctctgctgtacaatgtcaagagacacagcttggaagtgcgagtcaaggactgtgtggagaatgaggatgaagagggagcagagaagaaggaggagttccaggatgagagtgagtttcgccgccagcatgaaggtgaggtcaaggccaaggagggcagaatggaagccaaggacggcagcctgaaggccaaggaaggaagcacggggaccagtgagagtagtgtagaggccaggggcagcgaggaggtcagagagagcagcacggtggccagcgacggcagcatggagggtaaggaaggcagcaccaaagttgaggagaacagcatgaaggcagacaagggtcgcacagaggtcaaccagtgcagcattgacttgggtgaagatgacatggagtttggtgaagacgacatcaatttcagtgaggatgacgtcgaggcagtgaacatcccggagagcctcccacccagtcgtcgtaacagcaacagcaaccctcctctgcccaggtgctaccagtgcaaagctgctaaagtgatcttcatcatcattttctcctatgtgctatccctggggccctactgctttttagcagtcctggccgtgtgggtggatgtcgaaacccaggtaccccagtgggtgatcaccataatcatctggcttttcttcctgcagtgctgcatccacccctatgtctatggctacatgcacaagaccattaagaaggaaatccaggacatgctgaagaagttcttctgcaaggaaaagcccccgaaagaagatagccacccagacctgcccggaacagagggtgggactgaaggcaagattgtcccttcctacgattctgctacttttccttgaagttagttctaaggcaaaccttgaactgtccataacacgagaaacaagaggagatttcttttcaatggacccacaattcattaatgccaaaccataccatttcaggcaaaggtgttgcacacacatgctcttcaccacaaggtagataaatatatagaagaggcaggaactggggtctttccgtaaaagcatggacttga

SEQ ID NO: 1088 - protein, 604 aa, Homo sapiens
MQRELRQGETETTRRDTETRGSEKDRASAHVPVRDRRRHPENPRETQKQESWRDTETGRDTANDIEQALSAVCAPLCHPPVPALSLQPVSRPLAVAMTSTCTNSTRESNSSHTCMPLSKMPISLAHGIIRSTVLVIFLAASFVGNIVLALVLQRKPQLLQVTNRFIFNLLVTDLLQISLVAPWVVATSVPLFWPLNSHFCTALVSLTHLFAFASVNTIVVVSVDRYLSIIHPLSYPSKMTQRRGYLLLYGTWIVAILQSTPPLYGWGQAAFDERNALCSMIWGASPSYTILSVVSFIVIPLIVMIACYSVVFCAARRQHALLYNVKRHSLEVRVKDCVENEDEEGAEKKEEFQDESEFRRQHEGEVKAKEGRMEAKDGSLKAKEGSTGTSESSVEARGSEEVRESSTVASDGSMEGKEGSTKVEENSMKADKGRTEVNQCSIDLGEDDMEFGEDDINFSEDDVEAVNIPESLPPSRRNSNSNPPLPRCYQCKAAKVIFIIIFSYVLSLGPYCFLAVLAVWVDVETQVPQWVITIIIWLFFLQCCIHPYVYGYMHKTIKKEIQDMLKKFFCKEKPPKEDSHPDLPGTEGGTEGKIVPSYDSATFP

SEQ ID NO: 1089 - DNA, 976 bp, Homo sapiens
  source (1)..(976)
  CDS (201)..(776)
ttgaccccaacctccacactccaatctacttcttccttagtaacctgtctttcttagacctttgttatggaacagcttccatgccccaggctttggtgcattgtttctctacccatccctacctctcttatccccgatgtttggctcaaacgagtgtctccttggctttggccacagcagagtgcctcctactggctgccatggcctatgaccgtgtggttgctatcagcaatcccctgcgttattcagtggttatgaatggcccagtatgtgtctgcttggttgctacctcatgggggacatcacttgtgctcactgccatgctcatcctatccctgaggcttcacttctgtggggctaatgtcatcaaccattttgcctgtgagattctctccctcattaagctgacctgttctgataccagcctcaatgaatttatgatcctcatcaccagtatcttcaccctgctgctaccatttgggtttgttctcctctcctacatacgaattgctatggctatcataaggattcgctcactccagggcaggctcaaggcctttaccacatgtggctctcacctgaccgtggtgacaatcttctatgggtcagccatctccatgtatatgaaaactcagtccaagtcctaccctgaccaggacaagtttatctcagtgttttatggagctttgacacccatgttgaaccccctgatatatagcctgagaaaaaaagatgttaaacgggcaataaggaaagttatgttgaaaaggacatgagccttctttgcttctaaacgtctaaaataacacaacgtccctgatggagaaaatggtttaaaggatctgactttatctttggaagtgattgacatatgagaagcttcaggaagtgctcccaccccaaatattattcctactgagacttgaattgccattagaggtattatttttgctctttctttacatagaatattgtt

SEQ ID NO: 1090 - protein, 191 aa, Homo sapiens
MAYDRVVAISNPLRYSVVMNGPVCVCLVATSWGTSLVLTAMLILSLRLHFCGANVINHFACEILSLIKLTCSDTSLNEFMILITSIFTLLLPFGFVLLSYIRIAMAIIRIRSLQGRLKAFTTCGSHLTVVTIFYGSAISMYMKTQSKSYPDQDKFISVFYGALTPMLNPLIYSLRKKDVKRAIRKVMLKRT

SEQ ID NO: 1091 - DNA, 1365 bp, Homo sapiens
  source (1)..(1365)
  CDS (201)..(767)
  CDS (800)..(1165)
tacttgatttaaaaaggaaagagagaattctgggataggatgaagaatttttagataagatagagcccattatctatttattatacagtgatcattaagtaattctccttacagaatctctggttgttttggcttccagatgggcctggttcccaggtgttcccagtactcaacttcggagcctccagctttaacccactatggaaacaatcacctgtaatggatcaggggactcctcaaccaccttctaccttatgggcatcccctctctgccaaaatcccttttccttcctattttctttgtctttctcctcctctacgtgctcatcctgatgggtaatacctttatcctggtggctgtggtggccaagcccagcctccacaagcccatgtacttcttcctgataaacctctccaccttggacattcttgttaccacaaccactgtccccaagatgctgtccctgttcttgtttggggacagcttcctcagcttccctgcctgcttcctgcagatgtacctgttccacagcttctcctgctcagaagccttcatcctggtggtcatggcctatgaccgctatgtggctatctgccgcccactgcactaccctgtcctcatgacccctcagaccaacactgtcttgacaaccagtgcctggctcactgccctcctcctgcccattccagcagtggtacagacctcccagatggcatttgacatcattgtccacatctaccactgcttctgtgaccacctggctgtggtccaggcctcctgctctgacaccacccccagaccttcatgggcttctgcatcgccatggtggtgtccttcctcccccttctgctggtgcttctctcctatgcccacatcttgacctcagtgctttgcatcaactgccaagaaggacgctccaaagccttctccacctgcagctcccacctcctggtggtgggcacctactattcatccattgccatagcctatgtggcctacagggctgacctgcccctagacttccacgtcatgggcaatgtggtatatgccattctcacacctgttctcaaccctgtcatctacaaactgaggaacaaggatgtcaaagcagccatcaccaagattgcatgtccccaggagccaaagaatgctaggaaaccctgattcaaagaaataacttcatcttctctcataaacatcaataacatagagggaaaagtggaaaatttagaaagcccagtagttagaacactcattctcaaaatattgtcctaggtagtcctccattataataaaatgataatttttttcttaattcatagaaaaaagagtaggatttttaaattcaattttaaggtgtgaac

SEQ ID NO: 1092 - protein, 310 aa, Homo sapiens
METITCNGSGDSSTTFYLMGIPSLPKSLFLPIFFVFLLLYVLILMGNTFILVAVVAKPSLHKPMYFFLINLSTLDILVTTTTVPKMLSLFLFGDSFLSFPACFLQMYLFHSFSCSEAFILVVMAYDRYVAICRPLHYPVLMTPQTNTVLTTSAWLTALLLPIPAVVQTSQMAFDIIVHIYHCFCDHLAVTFMGFCIAMVVSFLPLLLVLLSYAHILTSVLCINCQEGRSKAFSTCSSHLLVVGTYYSSIAIAYVAYRADLPLDFHVMGNVVYAILTPVLNPVIYKLRNKDVKAAITKIACPQEPKNARKP

SEQ ID NO: 1093 - DNA, 1006 bp, Homo sapiens
  source (1)..(1006)
  CDS (201)..(806)
  modified_base (543)..(642): a, t, c, g, unknown or other
agtggttgtacaattttacatttccatcagcagcatatgagagttcaaggtcctccacatggtatggtcagtcttttaaattttagccactctcatgggtgtgttgtgatatctcatcgtgtttaattctcattttttaatgaataatatttaaaatcatcttgtgtgctgtttgccatctgtatatcttctcttgtgaaatgtctgttcatatcttatgctcaataagatttttggattcactgagttttgagtgttctttatgtattctagaggcaagatatagatgtcctttactagccatattttttgaaaacttttttctcctaatgtgtggcttctcttatcattctatttatgtatttaagttttgggatacatgtgcagatgtgcaggtttgttacataggtatacgtgtgccatggtggtttgctgctcctattgacctgtcctctaacttccatcccctcaccctcctactccccaacaggcctattgtgtgttgtttccatccctgtgtccataggttctcattgttcaatnnnnnnnnnnnnnnnnnnnnnnnnnnnnnnnnnnnnnnnnnnnnnnnnnnnnnnnnnnnnnnnnnnnnnnnnnnnnnnnnnnnnnnnnnnnnnnnnnnnnaatgcaaaaaaaaattgctggagaaaactaagaattatattgtcattataacttacaaaatggattttgaacattttcctgtagagaagccttctttgtcctggtgtttcttatcactctctggtaataaaagtaaaagcttattagttgttccaaaccattaggacaggacagcttgtcccttttaaaataccattctcagggtggttttttcttcaaggttagttttataagataacagataaatgtaactgttagtccaaatttctttgcttttgatgatagtaaatcttgatcttcactctttagattttcttcaagtggccaattttcaaacatttaagcctgggcacccaaacccact

SEQ ID NO: 1094 - protein, 201 aa, Homo sapiens
  MOD_RES (115)..(148): Variable amino acid
MSVHILCSIRFLDSLSFECSLCILEARYRCPLLAIFFENFFLLMCGFSYHSIYVFKFWDTCADVQVCYIGIRVPWWFAAPIDLSSNFHPLTLLLPNRPIVCCFHPCVHRFSLFNXXXXXXXXXXXXXXXXXXXXXXXXXXXXXXXXXXCKKKLLEKTKNYIVIITYKMDFEHFPVEKPSLSWCFLSLSGNKSKSLLVVPNH

SEQ ID NO: 1095 - DNA, 11002 bp, Homo sapiens
  source (1)..(11002)
  CDS (203)..(458)
  CDS (785)..(897)
  CDS (1075)..(1154)
  CDS (1244)..(1580)
  CDS (2136)..(2263)
  CDS (2498)..(2586)
  CDS (2691)..(3528)
  CDS (10703)..(10802)
  modified_base (1)..(78): a, t, c, g, unknown or other
  modified_base (10814)..(10913): a, t, c, g, unknown or other
nnnnnnnnnnnnnnnnnnnnnnnnnnnnnnnnnnnnnnnnnnnnnnnnnnnnnnnnnnnnnnnnnnnnnnnnnnnnnnacgcactctaataggtgcctagtgcagcacctggcccaggtttcctcttctgtggctcccccgggatcccccagcacctgcctctggcccaggcttccctggaagcagttcccaacacccaggccctcctccatgcctgacccgaagcagagcctgtgctctgggcgggccccggtcgctgacctgccctggcctgggccctcagtttgcctgcacagtcattgccatcctgctgcacttcctgtacctctgcaccttttcctgggctctgctggaggccttgcacctgtaccgggcactcactgaggtgcgcgatgtcaacaccggccccatgcgcttctactacatgctgggctggggcgtgcctgccttcatcacaggtactcccacccattcccagtcttggggtcccacatccctgggtccacctttgtgccatgttctctccacccacatacaggccctgaggccccacatccccatgccccaggccgccttattcacaggtgtccctctggtttaacccagactctgcagccgccacccaggcgtcactcccttatcctggggagatcggtaggggccgatggtgggcagaacccttttccatgcttcatgcctggccctgtgagcccacctgcccgcagccctacttcccaggcccctcatcacccctccactgctcccgtctgtctccatgctccagggctagccgtgggcctggaccccgagggctacgggaaccctgacttctgctggctctccatctatgacacgctcatctggagttttgctggcccggtggcctttgccgtctcggtgagtgctagcaggtgggttgggtgtcacctgtggccctcctttgctgtcctcctgctgctggggccgcgtgtcctcaggactccctttaggaacagctgaggccacggggccctgtgggctgggtggaagctgtttgtccccactgagcaccccatgccctctgcccctgcctagatgagtgtcttcctgtacatcctggcggcccgggcctcctgtgctgcccagcggcagggctttgagaagaaaggtcctgtgtgagtatagggttggggtgcctgggccatgggcaggcaccagcatgggaggtctcatggccggactcatggcctgtccctatccccagctcgggcctgcagccctccttcgccgtcctcctgctgctgagcgccacgtggctgctggcactgctctctgtcaacagcgacaccctcctcttccactacctctttgctacctgcaattgcatccaggtacctggcccagcctgtggagaagggaggcacctgggctgtggatgcctgaatatgcacagaccgttgctgcctcttgcctgccagggccccttcatcttcctctcctatgtggtgcttagcaaggaggtccggaaagcactcaagcttgcctgcagccgcaagcccagccctgaccctgctctgaccaccaagtccaccctgacctcggtgagggagccaggggtctcaggagggcggtgaagggagggagaggcaggaggcccagtgagcctgtacttttggccccactcccctttctcttttctccatcccttcctggaaggtggaaggggaggtgaaatgctgtgttcggcctggggaggagatgttggaaagggtgtgtaggattttgacttgagggagatggggctgagacagataatcaggtaataagtgccttgcacctgagaatctctcatgaattttagtaaattttctgtctcccaaggtgctctcaggagacaatttctggtctcatcttttacagagccattatatagtgagtccaggatccctgggggcatgcaggggtagcacagctgtggcagagctgtgaccactgccaggcctcaatatggggacagcggagaagcagggccctctctttcagacctgagcatgtggaaggtggaacttagggcaagttccctccaccctccttcttcccagcctggggccagccatcccactccccacttactgacctctctgttccctgcctagtcctacaactgccccagcccctacgcagatgggcggctgtaccagccctacggagactcggccggctctctgcacagcaccagtcgctcgggcaagagtcagcccagctacatccccttcttgctgaggtgaatcccggagatgggagggtggaggaggggaggaggggcccacgcatgctggacccaggccagccagctgttgggagttgaggagcacacactgtggctgacgtgggggccagcttggattagaagctgtaagggacccacagcaggaaccaggatcccaggggagaggagagactgggaccctgggcaaggggccaggctgacccctccagcatggtctcatcttcctagggaggagtccgcactgaaccctggccaagggccccctggcctgggggatccaggcagcctgttcctggaaggtcaagaccagcagcatggtgaggacagaacgctctggccacccagcagggcagttggctggcttttactgaaggtgggtggaggtggctgggctggctgtgatctctccctggcctcctagatcctgacacggactccgacagtgacctgtccttagaagacgaccagagtggctcctatgcctctacccactcatcagacagtgaggaggaagaagaggaggaggaagaggaggccgccttccctggagagcagggctgggatagcctgctggggcctggagcagagagactgcccctgcacagtactcccaagggtgggccagcactggggctgtggcctttggggccagtgggaggacagtgggcctggggttcttgggaagcaggactggggtggtggcctcctggctatctgccctctgtgggcctcatctacttcctttccccaccagatgggggcccagggcctggcaaggccccctggccaggagactttgggaccacagcaaaagagagtagtggcaacggggcccctgaggagcggctgcgggagaatggagatgccctgtctcgagaggggtccctaggcccccttccaggctcttctgcccagcctcacaaaggtgagtggggcacccccagctgccgagctcccctagtcagcagcctcatacctcacattctcctgtggccgcacctcacagccccgccccggcccacaggcatccttaagaagaagtgtctgcccaccatcagcgagaagagcagcctcctgcggctccccctggagcaatgcacagggtcttcccggggctcctccgctagtgagggcagccggggaggcccccctccccgcccaccgccccggcagagcctccaggagcagctgaacggggtcatgcccatcgccatgagcatcaaggcaggcacggtggatgaggactcgtcaggctccgagtgagtgtggccgggtgggcgggacggggtgcagcccctcggaggcctcacctgggcccagagctgcctccgggcctccccaggtgactctggatggcatttggaggacaaatgggcagaactggcccagctcccttactatgccgtgcccacaaaccatggtgccttgcggggagggccacccctcctaggctctacgcggcgcagcccagcctagggcagagtgcgggaggatggggagctgggggtgctttcctgtttccttcgtctggtgaaagctttcactctctcctctgtttcaactaaccctctgtctgccttttctgccactttcctttcctgcctctccagatttctcttctttaacttcctgcattaaccctgggccgtggttcctacgcccgaggctcccttcccttccccagccgcactcatgccctgctcctgtcttgtgctttatcctgccccgctccccatcgcctgcccgcagcagcgacgaaacgtccatctgaggagcctgggccttgccgggaggggtactcaccccacctaaggccatctagtgccaactccccccccaccattcccctcactgcactttggacccctggggccaacatctccaagacaaagtttttcagaaaagaggaaaaaaagaatttaaaaaaggatctccactcttcatgacttcagggattcattttttttatacgctggaaattgactcccctttcccttcccaaagaggataggacctcccaggatgcttcccagcctctcctcagtttcccatctgctgtgcctctgggaggagagggactcctggggggcctgcccctcatacgccatcaccaaaaggaaaggacaaagccacacgcagccagggcttcacacccttcaggctgcacccgggcaggcctcagaacggtgaggggccagggcaaagggtgtgcctcgtcctgcccgcactgcctctcccaggaactggaaaagccctgtccggtgagggggcagaaggactcagcgcccctggacccccaaatgctgcatgaacacattttcaggggagcctgtgcccccaggcgggggtcgggcagccccagcccctctccttttcctggactctggccgtgcgcggcagcccaggtgtttgctcagttgctgacccaaaagtgcttcatttttcgtgcccgccccgcgccccgggcaggccagtcatgtgttaagttgcgcttctttgctgtgatgtgggtgggggaggaagagtaaacacagtgctggctcggctgccctgagggtgctcaatcaagcacaggtttcaagtctgggttctggtgtccactcacccaccccaccccccaaaatcagacaaatgctactttgtctaacctgctgtggcctctgagacatgttctatttttaaccccttcttggaattggctctcttcttcaaaggaccaggtcctgttcctctttctccccgactccaccccagctccctgtgaagagagagttaatatatttgttttatttatttgctttttgtgttgggatgggttcgtgtccagtcccgggggtctgatatggccatcacaggctgggtgttcccagcagccctggcttgggggcttgacgcccttccccttgccccaggccatcatctccccacctctcctcccctctcctcagttttgccgactgcttttcatctgagtcaccatttactccaagcatgtattccagacttgtcactgactttccttctggagcaggtggctagaaaaagaggctgtgggcaggaaagaaaggctcctgtttctcatttgtgaggccagcctctggcttttctgccgtggattctcccccgtcttctcccctcagcaattcctgcaaagggttaaaaatttaactggtttttactactgatgacttgatttaaaaaaaatacaaagatgctggatgctaacttggtactaaccatcagattgtacagtttggttgttgctgtaaatagggtagcgttttgttgttgttgttttttcatgccccatactactgaataaactagttctgtgcgggtacagcactgtcactgtccgcttctgtgtggtaccctgtcctcccacagggaggaaggtctggtctctggaaaacagaagagccggcagggcccagaaggccccaccgggaggtcgggagactcagacaccactggctgataagcctgtccctctgcccatgtccatgacactgctcccaaatagctggatcagcacagagcccatttcctggcatttccaaggaagacatggtgggcgggcaggaaggtgtccttttcaccaggacggaaaggacttctacggtgggagaggctgcacggggcaggcagccttccagcccagcccctcagggctgagtcctagacagggatgagttttctggggcagaattcaagaagcagggagggctgcattgagaggctggttggaattgaatggtggtcagtgactcagtgcctcctaactatactgctcagggttgttttttgttttttttttcccattggaaaatgaagcagctactcatactgaagccaagtgtgtgctttgcaacattacttctcagcctaagttttgtttttgtgtatatatatgatatatatttaaaagtatatatgctttttaaatttaatagaggcggggtctcactatgttgatcaggctggtcttgaattcctaggctcaagtgatcctcccgccttggcctcccaaactggggtcacagatatgagctaccgcatccggcctagttccaagttttgtgtttgtcgaagttccattcaataaactagaaaggcagctgggtgcggtggctcatgcctgtaatcccagcactttgggaggccgaggtggacagatcacctgagatcaggagtttgagactagcctgggcaacatggtgaaactctgtctctactaaaaatacaaaaaaattagctgggtgcggtggtacatgcctgtaatcgcagctactccaggggctgagacaggagaatcacttgaacctgggaggtggagattgcagtgagctgagatcgtgccactgcactccagcctggtgacagagcgaggctccatctcaaaacaaacaaaaaaactagaaagggagttaacctggggacaatatagggtgatgattaagaacacaaaccctagctgggcagtggttcacgcctgtaatcccaatactttgggaggccaaggcatgtggatcacttgaggccaggagttaagagaccagcctggccaacatggtgaaacccatatctacaaaaaatacaaaaaagccagctgtgttggtgcatgcctgtagtcccagctactagggaggtttaggtgggaggatggctcaaacccaggaagtagaggctgcagtgagccaagatcgcaccactggcactccagcctgggtaatagagccagaccttgtctcaaaaaaaaaaaataaaggacacaaaccctagaaccagactgaatggattaatctttgtgagccttaagtttctctgccccaaaatgaggatgatgataaaagcatccacctaattgagcttttatgaggattaagtgagttaacacatgtagagtgcttggaagagttcatagtacatagtaagaggccagtaaacactggctttctgtgttgttgctactgggtgcaatggaagagtgcacagagagaaaaagtagaaagccaggcccaaagggaaggagacaggcaggtggctgaacaagaagggcagccatggcaggagggcctcctccctgactggcactgcttactgaaagtgctgctgaagcaggtttagagtgggaggaggtggggtggggacaaaactcaaggctgaccaagagggcgaacaggatgtgccatgccctctccagccgccaggtggcaacaacacatgggtctgcagcttgttttgcctctaaggacccaccctggacatggctccacacaaacatgtcaccttctggcctcacccaggtgtgtacctaagcctgctgaccttccagtgcttctattggcccaggagccaccaacaggccctgctcactagacaccagtgcagggcgcagctgggaagcacacctgaggtttcttgccttacgccaaatttctccagagctgaatactccgtgtctgtctgcataccccttccctcccaccgattcctggaatcccagaggctgcgggagttgctgcagaattcagggaaaggtgcatatctaggcattgtcactgaagtaggtgaatgtgccaggtgaaccttggaatcagccacaaaaaggggaaagcagtgatgggcctctggctccagggacagggcaaggacactttggtgcctaagtcaggcatttatggccaaataggcatgggtgggggcaccagctggcagtcccacttctctttgcccacttacctgctgcttttctcaagtcatggcctgaccttcagggagggaagtttcctcaaaactcagaaggaattgaattggttctgattactagagttaaaggctgcaaaaaaagggaggccctacaccaaatctgttaaacgtgtctttgttattccttcaacaaacaccatcttgcactcgaatatcttctgaataaataaactaaatgctctgctacacacaggtcacaacactagggtactgcagaggtttccggatcctgacgctcacccccaagtctaacaggggagatgaggagagcacagacaaccccagtgatgttagttggagcctgactaggtgttccagcagctctggctgaggtgatcagggaagatgaacaccacaaagggccttcacgtctcacagggagagcaaacaagaagctggtgcgtttctaggaggctccattattttgccagtaaaggacattcaagtttaggatataaataagaatctacctagatcctagcttaatagcctcacatactgtgaattaagctacacttaactttcatctggaccttccaatgatacctgagacctggggaaaggcagcctgtccttgtctaatgccaacaaggggagcagtcacagcctgataagctggaatctcaaggccctagggcctattcaggcccctgcctaggaggcccatcctggctccctgcctggaattagagatttactccaaatttgttagaaattggagcagggggctgggtgcggtggctcacacctgtaatcccagcactttgggaggccgaggcgggcggatcacgtgaggttgagagttcaagaccaacctgaccaacatggagaaaccccatctctagtaaaaatacaaaatgagccagatgtggtggtgcatgcctgtaatcccagctactcggggcggctgaggcaggagaatcccttgaacccgggagacagagattgcagtgagctgagatcgcaccattgtgctccagcctgggcaccaagaacaaaactccgtctcaaaaaaaaaaaaaaaaaaaaaaagagaaattggagcaggggctgggtgcggtggctcacacctgtaatcccagcactttgggaggctgaggcgggtggatcacctgaggttaggagtttgagaccagcctggccaacatggtgaaaccccgtctctactagaaatacaaaaaattagccggacgtgggtggcaggcgcctgtaatctcagctactcgggaggctgagaaaggagaattgcttgaacccagaaggtggaagttgcagtgagcccagatcgcgccattaaactccagcctgggtgacagagcaagattctgtctaaaaaaagagaaagaaataggagcaggatcgacttccagatatacagagaatataaaaatacattcactttattttagaaaaatgaagactcatagagtaagcttatcacaaactggcctattaggagtcacagaattcacaggaaacaatttctgaagaccaggtgcctgctgccacctctccaagcaggccagagtccagtagagaatgcgattcaggaagatggctcctcagagggcagggaggttagctacggaggccgctcacgtggaaatgtccagtgaaccaatgccaaggaagaagataaaattctctggggctgaccacaacagtgggggtggataaagacaaaccacttgcctgtacttctcatcttctatttgttcatttcactgctggaaggtgacctcttttcccctaatcttctttcaacccagagagtttaagtcttctccagctcaatcctaatccaccccatttcccatggtctctactcctgggagaccagccctggtggcatctcttcctcctgtccctgggccagaatctgctggagtcagggtctgctgggtagaggcgagtccaggtactgactgtagtggtttgctactgaagtcttgcttgctgtcctgatctctttacctaaagaaatagaaggaataactgctttaaaatgcccttcttcctcaagcccatttgtcacccagcagaattcaagctcctcagggtgggaagaaatgggatcccccttcccctgccccaggctcccctcctctctccatctttccatacaaaattcagggctgatgtgcataacagcttggaatcccagatgatggcggggtagggagacaggatgggcaagggaggaccagactgacctggtaggtcctgggactgccactttcctggggggctgcagattgctgcgagtggcacccatgacaggaagatttagtcgctgggaaacaggaacttcatgggggttaacaaaagaaatgagttagcagcaagtttaactgacctcgaaaagaaatactggatgaagggagcgagtgtgggattagtactctccccctgaccatgaggtatttgaaaactaagactcagactctgtccagccccatatcctctctgtaactcagtctccccatcttccaattgaattgcaataaggatggcaaaagtggtcactgttgacagctctgggagggtgaggacacgctgggcaagggcgggcattcttcctcctgacctcttacccttgtgtccactttcccgcactctgtgtcctgcagtgcttggtcttggaagcccttttcgagttgacagagaatccggaggtagggcacctctgccaggtggcacactccggctggtgagtggcattcgtgtgtcaggcctggggatggccgagaaaatgggcagttgactggaagatagnnnnnnnnnnnnnnnnnnnnnnnnnnnnnnnnnnnnnnnnnnnnnnnnnnnnnnnnnnnnnnnnnnnnnnnnnnnnnnnnnnnnnnnnnnnnnnnnnnnncggttcccaaactctctgcaacaggggctgccttgcgtccctgtgcactaagcaggtcaccacccactggccatgggagcctaggcaga

SEQ ID NO: 1096 - protein, 646 aa, Homo sapiens
PPPCLTRSRACALGGPRSLTCPGLGPQFACTVIAILLHFLYLCTFSWALLEALHLYRALTEVRDVNTGPMRFYYMLGWGVPAFITGLAVGLDPEGYGNPDFCWLSIYDTLIWSFAGPVAFAVSMSVFLYILAARASCAAQRQGFEKKGPVSGLQPSFAVLLLLSATWLLALLSVNSDTLLFHYLFATCNCIQVPGPACGEGRHLGCGCLNMHRPLLPLACQGPFIFLSYVVLSKEVRKALKLACSRKPSPDPALTTKSTLTSSYNCPSPYADGRLYQPYGDSAGSLHSTSRSGKSQPSYIPFLLREESALNPGQGPPGLGDPGSLFLEGQDQQHDPDTDSDSDLSLEDDQSGSYASTHSSDSEEEEEEEEEEAAFPGEQGWDSLLGPGAERLPLHSTPKGGPALGLWPLGPVGGQWAWGSWEAGLGWWPPGYLPSVGLIYFLSPPDGGPGPGKAPWPGDFGTTAKESSGNGAPEERLRENGDALSREGSLGPLPGSSAQPHKGEWGTPSCRAPLVSSLIPHILLWPHLTAPPRPTGILKKKCLPTISEKSSLLRLPLEQCTGSSRGSSASEGSRGGPPPRPPPRQSLQEQLNGVMPIAMSIKAGTVDEDSSGSEESGGRAPLPGGTLRLVSGIRVSGLGMAEKMGS

SEQ ID NO: 1097 - DNA, 12374 bp, Homo sapiens
  source (1)..(12374)
  CDS (201)..(705)
  CDS (849)..(918)
  CDS (1346)..(1412)
  CDS (1574)..(1659)
  CDS (1958)..(2080)
  CDS (4096)..(4489)
  CDS (4627)..(4722)
  CDS (5085)..(5124)
  CDS (5727)..(6439)
  CDS (12085)..(12174)
  modified_base (7154): a, t, c, g, unknown or other
  modified_base (7165)..(7264): a, t, c, g, unknown or other
agtgaggaacttctgtgaacatcagtaaatgtgtgtgtgagctgagcgctgggtgtgtgttgggcaggtggcattgggcctccttgtgtctgtgagcgtgtggaagcctgagtgaggcctccttttgccacctacctgtggacgacctgtgcagactcttccctatgcccccttggccttctctgcacagtgccagcaccatgcatgccaggcacagggcctgcccagctgtgacgtggcaggtgctcatgtctgtccccctccctgccagccccgtctgtgcgtgggcagcctgcccacccgcctccctggatgccgagtgctgtgtgtgtgtcaccaggcccgtgtcgtgctgtgtgtgggtgcaggaaggcgggggtgcctggcagggctctgtggggggcggggctcaggtgggcggctgtggcagcgcccagcagcgggcgtgggaagcccggcgcctcctgccctggcggctgctcagggccactccctcccattccctctccctgcagggcgtgtgcaccatgacggctgccttcctgcacttcttctttctctcctccttttgctgggtgcttaccgaggcctggcagtcctacctggctgtcattgggcggatgcgcacccgcctcgttcgcaagcgcttcctctgcctgggctggggtgagcagggccagtgctggactctgctgctgggccttggtgggcaggggcagcaagagaggttcagctttggccctggcccagctctctgggcacaggggtcagctgggatgggagtctgggagaacaaggggtccctgaagaccagcaaccatctcactctggcacccctgctcccccaggtctgcctgccctggtggtggccgtgtctgttggctttacccgaacgaaaggatacggtacatccagctagtacgtgggcctcccgtggtgggtggtagcgggtagtggatctgttagggaatcggactgggcagctggctgaaatcctagcccatgcctgttttgggtctttgggcaagttcctccccatttctgagcttcagtttccctgactgagggaatgtgctaggactgggtaatccctaagggactgtttagctcaggagtcagccttgcttcatccccatgggagcactgggggatgagcctaatgttctggacctttgttggaggggaaaccgaggctcagcaggagccagtggctcactctcaccgtctggggctcagactgcactggtgatgcgggcatggcagcctgggaggactgagggatggtgtttgagggtggggagggaggctgctgggtgtctgacacccttcttctcccccaccccagctgctggctctccctggagggcggcctgctctacgcctttgtgggccctgcagccgtcattgtcctggtatgtgcccgttcagcatcttggaaggggcatggccccagagggtcatcctgtttctccctctacctcctccctgcgctccagctcccacatggggatttccctgccaggagggcacctggtgatcctgtctcccccactccactctactgggcccccaggtgaacatgctcatcggaatcatcgtcttcaacaagctcatggcacgtgatggcatctccgacaaatccaagaagcagagggccgggtaaggggggggcctctgagacttggcctttctggaaatggtgcagggagggagggacatgggtgctcttggagactcagggctcgatgatgcgaccggggctccccaaccttggtgcatcaaggttgcaggcaaggtgggcacccggagtgctcagccgcagcccctcacccaccctaacccagctctctctctctcgtctgccctcccctcccaccccactcggggctcattctgccccatctcccggcttcccatgtgtttcccctccttctcccatgtctgtgccgcccccgaggtcggagcggtgcccctgggccagcctgctcctcccctgctcagcgtgtggagcggtccccagccccctgctcagctcagcctcggccaggaacgccatgttagtcgtgccccctggggggcggtgggggtgggtggggcaaaggaattggggggggcagtgcccatggtggggggaggaggagggatatcagcccagtgccctggaaagcttgccctttcctgccagccaccacacactctcaagggctcggcaagaggtggccaaggcgatgaggagtggatgtctgtgcctcccacaggtgcccggttccttcgcccacccttggatcccgcccctgccctcactcccagctaatgttctatcctgcaccgccccacacccccaacctacagaggctcagacaatcttaagccttagaatttttgagctatagaaccttagaattagaatgatagaatcttagaataagacaatcagaagctaagaatgttagaatgagtgaatcatccagtcttatcatctgtcatagaatctgagacttagcatttcagaggcattgaatctcacactcaattggagacagagaatcacagaggtagagaattatttcactgagacccccgccctagcatctgagaatcttaaaatcccagctatgcaagggtaaaacaaatccacaaagaccttaggctcaacctcccacccaggtctggaaatccacccaagcctccatgcccagtgaggtccagctttatcttgcacacctgcagggtcagggagctcagggcctctggaggcagctggcaccgtcaccacgaagctccctctgtcttgggctgccgtctgcctccctcaccccgtctgcactagctgtttcaatgcttgggctttggagtcggtcaagctgtgtttgtatcccaactgtgcctctccctgcccagctgggctcactccagtttcctcatctgtaaattgggataataatcccatgcctgttaattggagttgttttgatcatgatttgaagtaatatatgtaaagtgttcagtgtagggcctggtagagaattggtggttaatcagcgtagctcttattactgtgattagaccctctcttagtcttggctacacctccggggacttcagagtccattgtgcctgccccctgccaggctgaacagccctgaactgcacttcctagggcaggtcttggccccctgcccatctctctgctttggcctcccccggctgtctctgcggaatggtgccaccctctgccatgcctagagctgtgcctgactctcccactgggggtgtttgcgaaggagagtgggctgagtgtggcacctggcccgggagggtatggtggcctggctgtccctcatgtgctatagcaggttagggaggggtgggaatggcttggatgccaggccccatctgctttttttctgccctcccctggcagggaggccagggaggtgtaggcctggcccgaccccagcttttagccccagctctgagccttctgcccaaggctctgagcagtccgtgggagcctggcgtcttctctgtgtgtggggggagttctgcttcactggtcctggccccctgtcttctccctgaggattcgtgctctggatgtcccccgcgtgctctgcctgtttaatctttctgtctgggtgtctctgtcgcatgcgttctctcactgtggttgttgttgctttgtccctcttccagtccccctccccagcctacccagttaggctctggggatgccgtcccggccccgtgcatttttaaaaagctcctcaggtgattctgtgcatctgtctgcctcctcttctctctccccgtccctttccactgtctgtggctcggtcccactgtgtctgcgtgtccttccccaccttcctggtccctgctctgaccccgtagttcgctgctttcggtctctgttctgtttctctggctctggctcctcagcccctctctgcttggggacattactgaggccctggggtttggggccctcccagtcttgggcagctgaagagctccagctgagtggaggcctaggctcaagccatcctgtcccccggagtgtcactctgatgggctctgccactgtcccctcagggcctcactctggagctcctgcgtggtgctgcccctgctggcgctcacctggatgtctgccgtcctggctatgacagaccgccgttccgtcctcttccaggccctctttgctgtcttcaactccgcgcagggctttgtcatcactgctgtgcactgcttcctgcgccgagaggtggggctgggcctctcccgcctgtgtgtgcccaccacacctgccaggcccttggcttctcctcactgtgcagaccgggaggatcgaggccccgaccagggtgccccaggccccatctgggcagcccttactgtggaagctgatagcccggggtacccgcaactgtcccttatgcttatccttggcctcctgggtctcctcctcccgttgcaccctgcccaggtgtcatcaccttccccaaggttggatgtgttgccttccttctacacttgcctgggcatctggggtgggaagcacagccatctgtggtcgggggccctgcagtggcctcaggcccagcaggcgccctctgtccccaggtccaggatgtggtgaagtgccagatgggggtgtgccgggctgatgagagcgaagactcccctgactcgtgtaagaacgggcagctgcagatcctggtgagttaggggcctgggcagggcctgggcagattctgggcaccccccaccccaatcctcctgccctagaccatttaccttccccatccatggcagggttgggacagggattgggtttgattcaggctcagccactaacacctgggtggcattgggcaagtccttcccccactcagttttcctagccatcaggtgggctggggtaggccatgcctgggctctgctgggccatgggctatgggccatgggcagccctaaggcaggcagactgggcaaagctggctggggagggcctgagcctcctcccaccctgatacattaatcctccctctgcccacctgcccctccctttctgcctatagtcagactttgaaaaggatgtggatctggcttgtcaaacaggtgagtgtgccgtggcagaactgagaatggtcctggggttggagaagaaggggaggccttgagccccatcatgggaggccctgatggagttctggctgctggagtccagcttcgaagttagacagccctgagctggacgcaaggctgcgaatgtcccttactgtatgaccctgggcaaacaacctgcctctctaagcctcagttaacacacctgtaaaggagagaatactgtcctcccagggcaggtggggggcttaggggcatgcatgaattcggggacatcgagttcttagcaggacccatggcacagagtgttacgttattatatcatttccagattcttaccagaatctttccatttctgtctcctggggagctgatgcacagggaggtgggaagacaaagccctttgacagccgtggggctgtggggtcaaagtcgggacctgcaccaggacactgggagctgggccttgcctttgtttcttgccctgtctcaatgtggggactttggagccgttgtcttcttaacccctcttatatgtgagagattaccaaccacccagccatctctccaggacccagtttcctttcctgtccaagcgcagaagcttggtacctccccagcctgggcaatggcatctggaggttccttctcctcaggactcaccccctccctcccactcctgcccccagtgctgttcaaggaggtcaacacttgcaacccgtccaccatcacgggcacactatcccgcctgtccctggatgaggatgaggagcccaagtcctgcctcgtgggccctgagggcagcctcagcttctcaccactgcctgggaatatcctggtgcccatggcagcctcaccagggctgggggagcctccgcccccacaggaggccaaccctgtttacatgtgtggggagggtggcctgcggcagctggacctcacatggctgcggcccactgagccaggctctgagggagactacatggtgctgccccggcggactttgagcctgcagcctggcggtgggggtggaggtggtgaggatgcccccagggcccggccggaggggaccccccggcgagctgccaagacagtggcccacactgaaggctaccccagcttcctgtccgtggaccactcgggcctggggctgggccctgcctatggatctctccagaatccctatggaatgaccttccaaccgccaccgccgacacccagcgcccgccaagtgcccgagccaggggagcgcagccggaccatgcctcgcaccgtgcccggctctaccatgaagatgggctccctggaggtgaggggctgtagggaatggggtgtgtgtctgagactgtgtcaatcacaggctgcagccaggaggggacagcctcatcctccccagagcggcctctcgtaaaagtcactgggagtggatacactgagcatttctctgtttctgctcatggcagctccgtggtgtctgtgaatccttcagacaggctgggacttcacacagtagaattgtacttctcgactcgttcacacttgctttagggcctactttggggtgactggttaggatgagtcctcatttcaggagactgtggctcaggcaatgtgtgagcctgggcctctgcgtcatgcaggtctgagttccagtctggactctgattggcagtgagatcagtgagccttcattttctcgtgtgtaaagtggggataccgtagcagtctctttgtggagtcgttttgaggattgagtgatgtaaaacatttatgtggagcaagtagaaagtgctagataattggggattgctgctgttagcacccctgaaatcagctgcagatgctgcccacaggcctgtggtaactgaccctctcttccggagaaaagcaaacccctccgggtccctgcctgtgtgtgttctgtgaatccttcaccttcacgctggcctcctcaggtctgctccctgcagaggatcactgagaacagacagtagtggcctgctgggaatcaatagggagatctnaccgcaaagcnnnnnnnnnnnnnnnnnnnnnnnnnnnnnnnnnnnnnnnnnnnnnnnnnnnnnnnnnnnnnnnnnnnnnnnnnnnnnnnnnnnnnnnnnnnnnnnnnnnnctaatcagttcatccatttttcccccagtgctagatggcagggcttgcccaaccatcccctcaatgacatggtcttggcttctgcactctggataacgaggaggaccaagggtgccgttgtggcccaggcctaattgacagcaagcagccctacaggtaggaagaaggcagtagcactgtcagcaggttttgggagctgctcattgtgagaactctgggaaataaccctccttggaccatcaagcttgctcctgcccatccctgaccctctaaaaacagtaccaagtgaccaaggtccaagaggtctctcagaggaggtatctaaggctcagagaggttacttaacttgtccaaggtcactcagcaagttggagatggagttgcagttgggacccaagcctggcccctgaagcagactggaggcattccctccctgggtgagccgggctggggaagaatgctgaggggcccctatctggatccacagaactgatgagaacaaactggaagttggacccagccaagcctttaaatggggtctgcccttaccccagcccctctttcgctacccagctgagccctaaacctctaagctcaatgctccctcagcctcctctctgggtcctagagatggaccacatctcaggtcccccatgtgacttccacagcatcacacagacacagaactgggcacccaggaaggatccagaagccgagtctcaaatttgctctcacttctctcccagtggcctatgtcacaggtgctagccctccttcactcagtcaacccccaaccacacctgctctatgtatggccccagaagggaattagactcaatgtgggggcctgggagaaaagttgacctcccctccccacttcactgacctccccagggatggcacttaggaaactcagacaaagcagctcagtgattctcaggggattggaagctgggtggttgaggggagcacctccacatgcaggccagttttcccaggccaagtccaggctgagctctgcctctactaggctgcaccccaccccacccccagtgagtgggaagtgacaaatgagcctgaggaaggaggagggagctggcgatcgatggcattaacatggtgcccaaattaaatattgactttcttggttgactctagggacacttggattgatggctgaggctttgccatgccaccacaggggataggcacataacagcctggagcaggtccatagggaagctgaggcctggagaggaggggctcacctttgcttccacctgctcaggaggagtagaagtgagggcttcagggagcccggagcaccgtgcctgcttctccaccttccccatggagtccagagtcccatccgtcccgaaggtcttggagtccaggccttgttgagtgtccccccaaccccattcccacctccaggaactgtggctaacctgaagtgcaacaaatgagcagaatcaatctctgtgatgataaccattactgggtctcaggacccggcctcccaaggcggtagggctggttatttctgatcattatgtaggatcttggagaggaggtagggacagcctctctgttcatggaaatctcccatcatcctctccagctaactcaccttcagagactacagtaagccctgagctttctctccctcttttctcttttttttcacctgtcctgaacaaagggagtctccctcttttcaaagctccactttaagaactgtctctagtcccttgatttattcacctcccaccctactctacaacccacctcagtgctggttcctcccatagtaatgactccagcccagcccctcattctgagttccagccctgtgtgttcaactacctactttccacttgacatctccccttgaccatctcaaagttgacatgcctgctatggtttgaatgtgtcccccaaaaagcatgtgttggaaacttaatccccagtgcaacagtgttgggagatggggtcaatggggggtgtgtgtttagatcatgagggcaccgccctcatgaatggattaacactgattataaaagagcttgagtctttgaattcaatctcttgctctctctctcacccttctgccttctgccataagatgatgcagcaaaaaagaccttgccagatgacagccccacaaccttggacttcccagcctccagaactgcaatgaatgaatctctgttctttataaatgacccagtctcaggtattgttatagcagcacaaaatggactaagacaatgcccaaggccaaattaatgactgtctcccccaaagctggtcctcttcctgtacctctatgccaatgacacggtcatccatccaggtgtgtaagacagaagcccaggtgtcatccttggctcctctctgatacccaatccacaccaggagctgagtgctgacaattctacccactacatatatagaaactccattcctcctccatagcaccctctaaagtctccttcatgcagatcatctccttgctggtctctctctccaccctcactcttcagtgtccctgcccccaccaatccattttccatccactcaagagaaatcgtgttgatatagaaatctgatcatgccagtactctgctcaacactcttccttagcttcccactctccttaaaggccaaaaccctcagtggagtctcctctgccttagacacttagcatgtgttttgagggcctgagagggtggaagtcttcccagagtcagtggccttggaggagtggagggaggaatatgatgggtactggggactggattagaaaagccccaactgggggaccccatgaggtgccagggtgggcatgaagaagcctgaagggaaatgagtcctgagaagcagaagtcagcagcatcccgcacccaggtcctccctcaggccacctaatttccttttaattggtgcctaatggaagtgatttaagcccaattaagttttaacgtgtctgttccagtctagcctcaacttgcttcccttctcccagagtctagggctgcaggggtaagggtaagggtgagggtaagggtgaccccttcccctagtgctgctgagggaggcctgataccagtccacaggtctcctcaggaccttcccctacttccccaacacctcctccctacccaccagtatccccaggatatgtggagcccaggaaccctggctttggacctcccttgtgcgggcactgtgctggcaactttccctccatcacctcctcaagccctctccatggccccatgaggcaggctgtgcggaagtacctccttttcacagagggcactgagttcacttgctcaaggtcactgcctttgttctgcctagagctgtgctgtccgacatggtagcctcacgggagtactgagcagtcagaaggtggtgagactgacttgagatgcactgtagcactgtatgtataaaacacacacgagatttccaagactccgtataaaaaaagaatgttaaatatctcagtcattttttatattgattatatgttgaaatgatcgttttttaatatattgaatgagatatattattaaaatgaatttcaccttttcaaacttttaaagaatggttactagaaaattctaaattacatatgtcgtttacattgtatttttattagacatctcccagggtctgttctcatgaaggtagggatggtctgctcatccttgaccctgccagtctggaaagcaagaaaaggctgcagctgagcttgtgcgggcgggcctctcagtcttgtctcctcatcctttgggtgaagacaagtccctttcagcaccctggacagcagccagggctggcttcccacttggggttgaggaaggaataactgtgggaggagtagattaacacctataaaatgcttcccatgaatcatcttaagtcatgctccggatatccagtgaggaagactgggtaggagttgtcattatcccaattttgcagatgaggaaatcaatgttcagggagatttgtgtattccacccttcacccgctaaagattcactgatgcctgcttcatgtgggcctctgagtgcacaaaccacagcaaggccaacacagatgacagcagttctgtgtgatcagtgcagtagtgacagtgcatgccaaggcctgtgggggtccagcgagtgctgactgctgggccagggagttcagggacagcatcacacagggggctacttgggctgggtctggaaggctgaaggagagtttcccctctgtgaggaggagggagtttcaggcagaaggagtggtgcatgcacaggcatggaggtcagagagatgggccagaggagggaggcaagggccacatcaccaagggccttgaactctaggctaattccaggatccacagaaggcatctgagcagtggcctggccagatctgcattttggaaagatcacttgggccatgtggatgaagggctggagactggaggcagagaaaatgagggcaatgatgtgagaaatttgagtccaggaaagaaatgacaggttgttagatattagctcaaatggaagggagatcgagccaactcattttacagatagggaaacccatgtcagacagggtccagtggcctgtccaaggtcacgcagcaagtcagtgcctgggggagcagggactgagggcaagggagggacaaagcccccaccccaggaaagctaagtggctggtctcaaagccagcagaggcctctgcaggtagctgtggtttgtgtttgagcagaatcaacaaggtaaatactaaacttcctcttcaaccagatgcaaagcaagaatggacaggagggcagggacgtgcacatcacacctcagccccagagggccccagaggtggtgaccagcggagcctaagaccaggaaggagggaggtgcgagcacaggacaaggcattaagagggcctttaggtgatggtcagaggaaggaatgtggagtaggatctgctggtacatggtcgggctttgtttgtgcaaacccccttttaggaacaggcccccctttctcagagacctgctccctctcctccctctccctctcccccatggttcctgat

SEQ ID NO: 1098 - protein, 727 aa, Homo sapiens
MHARHRACPAVTWQVLMSVPLPASPVCAWAACPPASLDAECCVCVTRPVSCCVWVQEGGGAWQGSVGGGAQVGGCGSAQQRAWEARRLLPWRLLRATPSHSLSLQGVCTMTAAFLHFFFLSSFCWVLTEAWQSYLAVIGRMRTRLVRKRFLCLGWGEQGQCWTLLLGLGLPALVVAVSVGFTRTKGYGTSSYCWLSLEGGLLYAFVGPAAVIVLVNMLIGIIVFNKLMARDGISDKSKKQRAGSERCPWASLLLPCSACGAVPSPLLSSASARNAMLVVPPGGRASLWSSCVVLPLLALTWMSAVLAMTDRRSVLFQALFAVFNSAQGFVITAVHCFLRREVGLGLSRLCVPTTPARPLASPHCADREDRGPDQGAPGPIWAALTVEADSPGYPQLSLMLILGLLGLLLPLHPAQVQDVVKCQMGVCRADESEDSPDSCKNGQLQILSDFEKDVDLACQTAQKLGTSPAWAMASGGSFSSGLTPSLPLLPPVLFKEVNTCNPSTITGTLSRLSLDEDEEPKSCLVGPEGSLSFSPLPGNILVPMAASPGLGEPPPPQEANPVYMCGEGGLRQLDLTWLRPTEPGSEGDYMVLPRRTLSLQPGGGGGGGEDAPRARPEGTPRRAAKTVAHTEGYPSFLSVDHSGLGLGPAYGSLQNPYGMTFQPPPPTPSARQVPEPGERSRTMPRTVPGSTMKMGSLEMQSKNGQEGRDVHITPQPQRAPEVVTSGA

SEQ ID NO: 1099 - DNA, 18512 bp, Homo sapiens
  source (1)..(18512)
  CDS (201)..(303)
  CDS (1275)..(1390)
  CDS (2698)..(2801)
  CDS (3065)..(3167)
  CDS (3496)..(3649)
  CDS (4199)..(4332)
  CDS (4409)..(4524)
  CDS (5384)..(5591)
  CDS (6730)..(6967)
  CDS (10261)..(10410)
  CDS (12717)..(13346)
  CDS (17340)..(17959)
  CDS (18034)..(18312)
gctgcttagcttgttcccagtttttccaccttccacaccatgctggaatgacagcctgcactctcctccctctgcctcccctctgccccttcacctgtgacgcatggtgggcaatcccctggtccctaaaatgcagagtccttggcgtccctccatcctcctggtctctctcctttcccatccacactcacaactgccccatgcccctcaatccacgctcatgcacctgccctgtctctgtctcctgcctccagaccttccgtcataagctggtggagcctgtctgtgctttctggaactacagtatcagatgagtttccatttccaggttcttttttttttttttgagatggagtcttgctctgttgcctaggctggagttcaatagcacaatcttggctcaatacaacctccatctcccgggttcaagcaattctcctgtctcagcctcccgagtagctgagattacaggcgcccgccatcacgcccaactaatttttgtatttttagtagagacagggttttgccatgatggccaggctggtctcgaactcctgacctcaggtgatccacccacctcagcctcccaaagtgctaggattacaggtgtgaaccaccaaacccagccgttaagatgatttttttaaaaatatgtccactctgcttggggatgaggcaagacttacacatggttttgacctctgttcaccatctgcctttcagggtgactccaggctcctcccagctctaagacaagctgcagcgggaggatgtgttacccagggggtagtgagctccttgtcataggagtatgtgaaggaggaagcactcactctgtgaggtgcctaggaagagaatcatctgtcaaattggcgttgaacttgatctatctgaggccggggcccttggactcttgaaggagcagagcaggctccagggattatcctggctccctgccctggatctttagctgaggtagggaaccttggtcccagtggctcagtaattaattaagttgataaatgacagtcactgggatcagccctgccctcctaccatcctaagaatgtcaagcacattttacaggtgaaaaactgagacccaggaaggggcggtgactcgccaaggtcacctagctggttagaggcagggcagtgacaggccccaggctctggggaaagcctttcccctgcttgcttctggcccctcacccccttgtccaccttatctcaagagccccctgttccctccccatcccccaagcccatatacagggggtgcctgggccaccacaggctgctccgtggctgccctgtacctggactccaccgcctgcttctgcaaccacagcaccagctttgccatcctgctgcaaatctatgaagtacaggtgagtgcacggtgggaggggggtgtcaggagggggcttcttagctggaggtgaagagaagagccaataggtagccagaagaagcatctgagggatgccagctttcatagattgtcggggacagggctgcatgcagtagttcatgcctgttgtcccagcactttgggcggctgatcacttgagcccaggagttcaagaccagcctgggcaacatggcaaaaccccgtctctaccaaaaatgcaaaaattagccaggtgtggtggctcgtgcctatagtcccaactattcaggaggctgaggcaggaggattgcttgagcccaggaagtcgaggctgcagtgagccaaggtcacaccactgcactccagcctgggtgacagagcaaaaacctgtctaaaaataaatgagtaaataataaattgtaaaaaaaattgttgggggaaaactctaagaggatgtcaggaggggtcggattcactggagctggaaagggccccggagtggttacttgctgagaagtcaggtgagatgggacgtgagcctcaggaacgctggggtcactacaaggaacaccttgtagtgttgaggggcacactacaaaaacatgttaccaaatgcatttttcctgtagagtcagggccaggcacggtggctcccacctgtaatccgaccactttgggaggccaaggcaggcggatcatttgaggtcaggacttggagaccatcctggccaacatggtgaaaccccatctctactaaaaatacaaacattagccgggcatggtggcccgtgcctgtggtcccagctactcgggaggctgaggcacaagaatcacttgaacccaggaggcggaggttgcagtgagctgtgagctgagattgcgccacttgctctccagcctgggtgacagactgtcttgaagcaacaaaaaaaaaaaaaaaaaaaaaaaagtcagagcgtggacacttttccacatcatgagtatcatccgcagccccattctgatgatactccatggtccccgggatccctccccgtgggcacgtttgtcagcactcttagtaattgtccagttggtagaatccgggccagttggggtcagtctagggagagccagcaggagagaaggacatgctcacacctgcttattaaatgcctactgtgtgcaggcctgggtcctgctggctgctgctgcactgtggaggcgaatgcggcgtggggggccttagagtcaccaggtggggcgagttctggcctgggttgggtctgggtggtgccaggggggtttctctgtccctccacacagagaggccctgaggaggagtcgctgctgaggactctgtcatttgtgggctgtggcgtgtccttctgcgccctcaccaccaccttcttgctcttcctggtggccgggtgaggagagttcaccactgtagcctggtggcctgggccctcccgcctcgctcaggcctccatgtccccattggtcgggtgtccatccttggtcccagcagaaccttggtctgagcctctccttaggatgtgctgggtcccctgtggagctgctctctttccctccatctgcccaggcacaggggatcgggcaggacagggccctacggggtgtggggaccagcagtggtgttcttgttaactgactcctctgtcctctccagggtccccaagtcagagcgaaccacagtccacaagaacctcaccttctccctggcctctgccgagggcttcctcatgaccagcgagtgggccaaggccaatgaggtgggcagccagtgggtgggctggaagcccggggaagcctgggaaagtgcctgtgggcttttctagggtgaccccctgcccccaactattttcacatggctccacttccctggggaggagcagggcccggggaggagcagggccccgggaggaaagggccctgggaggaaaggccccgaatggtggagcggggcccaggctgctacccagaggcctcacccactgagacttctttgggttggcaaggccgggctgggcatgggccgcggggctggcctgcacctgcgtctgacctcggacctgggtggggatcctgaccctcccacaggtggcatgtgtggctgtcacagtcgcaatgcacttcctctttctggtggcattctcctggatgctggtggaggggctgctgctgtggaggaaggtggtagctgtgagcatgcacccgggcccaggcatgcggctctaccacgccacaggctggggtgaggcctgctctgcacccacactctcttctcctcagctgtaccttgcacggccgaccctgccatctaacatggccccacacccagcactcagcacccagcaccactcagcatccggcatttagcgtcacccagaacccagcaccacccagccagtcccatctctgacatgacctcaatttcctcagttctattaacctccaatttacccatccccattcctcataatccttctccactttacagcctcccctctccatccgcagtgctatctccccaaatctgtagccagccagttgcccagcctccgtctccagagacgcccagctgtagcctccaaagcagcctcagctctcccgactcccaaactactgtggctccaatgccaccccaacagcatcagagcccccagccctgctccttggacctccccagtgcccccagtacaacctccagtaggggacagctgcggcttggggggcggatcctgggtcctggagaggaaaaagcaggtgacccagccttgaggcccccttctccctctcccaggcgtgcctgtgggcatcgtggcggtcaccctggccatgctcccccatgactacgtggcccccggacattgctggctcaatgtgcacacaaatgccatctgggccttcgtggggcctgtgctcttcgtgctgactgtgagctggggacctgcaggggaggggcgtgttggggatggggaagtcctcttgcccactgaccccaggtctccaggccaacacctgcatcctggcccgtgtggtaatgatcaccgtgtccagtgcccgccgccgtgcccgcatgttgagcccacagccctgcctgcagcagcagatctggacccagatatggtgaggccccagaatggggggccagcaggaagcaggaagtgcacagtcagccggcgccaggcgtgaggctcactgggcgagagcacgtgcgagtctgtgtccagagcgtgaccgtgtggctatgcccaagtctgtattgagtatgtgggtacacacgtgtccctgcatctgtgtcacacatgcttgggcatgtcaacatgtgtcaacatgcacccatgcgtgtcacatgtggggatggtcactgatccgtttgagggagctgtggacactggccactgttcaaggagtgcactgtctgcggcaggtactgatagcctgcaggagacaaagtaggggagaccctcaaatcagggttagccccagaagttcagggttagctccagaagttcaggttcagggtaaggacctgggtccctgttcctgccaaagacccgcatcgccctctggggtcacactctgggagagagagggaccccaccggcctttcccagccctgcctccttgctggctttccccttccccacccatcctccaccaagcacaggccagcctaagctgggagggggtccctgaaaagccagggaaccccagggcccttggagagggagaagggagtccttctaaccccatccctgctggtcccactgctcaggcctcagcccccactctggacaactaccaccccattccttccagccaggttgggggctgggaccccatctcccaagtgccgctaccctacttcatgccacctctgtctctgagaacagggggggcaacaaagtccagtcaaaggttctggctccctctaagtcctgctgagccatggtcccggccctcagctcccaccccgctccaggcacgtacaggtgctgctctccctggagccctgcggggagctccccaggcctcccaacccccgtcagccctgcctgccctcctacagggccacggtgaagcccgtgctggtcctgctgcccgtcctaggcctgacctggctggcaggcatcctggtgcacctgagccccgcctgggcctacgctgccgtgggcctcaactccatccaggtacctccagccccaaccttctgggactaggccctgacatgcacgaaagctcagaggggacgactagggtgtcagggcctgggagggtgagctctccatcatgggagacattcaacagcaactgggacatcctatctaagaaggggttttgagggtggcagtgggaacaggcaacctccaatcaaccagcggttcgtgcaggaggctcacggggcccctctgccagctgggaaggctgagacccagaaagagggtgttaaggctcactgtgcttggacactcagggtccggcagaaattccagccccttggccagtgccagagccacttagttcttgccagaaagctggggaggggacacagggcatcagtcacctcccccttggggtctgcggcctgctgggatagcagtttagaagagggtttggtgaggaggccagttcatgaggccacaggaaagggcccgggcttcccgggtctcttggggcctgtgtgctagaaccacagggagagggccaactaggtccctctcgggggattggcaggtctgtggggggccagaacattaactgaagtgacagccagggggctgggtgctgggagtcagggaggcccttcctggcccctcgttttccctcgacctccctggaccaccccccaggcacctctccctgtcacctgcacctcctgctccctgcttgcccagcccgggtccctctcagggccaaaaggtgggtgggcaagggcccaggctggactgtgccaggctcaggaagtcaggtgcgaactccacccagggtccatgtgtcctccaagctggggaccctccatcttttccttgaagaaggagagccaaggtggtaacagccactcacagtgcctgggtgctccctctgagccccaggccaggctcctatttgtatctcccaataagccttgtaagtggggaaactgagacctcatgaggtcacttgcccaaggccccccaggaggcagcagcagcgggggcaccactccagagtctgcgttctcagccacagggcatccagctatgaccacagatgggtcctggctggtccctgggagcatgcttggacccagttactcattcatccatgtgctcttcatggctcgcccagtgtgtgccaggcactgtgctgggtgccaggccgcagcagcagaagaggcagcaaaaagcccctgtatttgtggagctgcccttggtagagcaggcagaccatggccacgatgaagaaatgaagtgttcagtgaggggacgaggcaggaagccctcttccaagccccacgccccccagggcttcatggctgggttcagtctggctgggcccctggcgaggcttctccacctgtcacacggtggggcaggtggtggcatcttgttgccatggcgattcctccagctctttgccaggtgcccctctccacatcatagggggttggattcctgatgctctccatcctcacctgtgcccctcgggtgggcagagacacagccatggggcaatgccaccgtcagccatggggcaatgccaccgtcagccatggggcaatgccaccgtcgcaccgtctcagatccctcccttcagttctcattctttcctctctgtcccaatcttcatctctgaatcttctctggttctgtctctcaggctccccctctgtcactgtccccctctccctgtgcccttctcaccctctggccatggatgttttttctggcactgaccccacctggctcttcctgggcatgtcttcatgtttctccacttctctcctcagtctctctgacactggtttgtttttttgtttgtttgtttgtttgttttttgtttgttttttgtttttgttttgtttttgtttttgttttgttttgttttgttttgttttttggagatggagtctcgctctgtcgcccaggctggagtgcagtggcatgatcttggctcactgtaacctctgactcccaggttcaagcgattctcctgcctcagcctcctgagtagctgggattacaggcacctgccaccacgcctggataattttcttatttttagtggagacgggggtctcaccatgttgcccaggttggtcttgaactcctaacctcaagtgatcctcccgcctcggcctcccaaagtgctgggattacaggcatgagccaccgcacccagccctctgacaccagtctttttatctctgcctctccatctccctgtgcatgacactctcttgtctctgcctaaagcagcctcagattacccttgggacggtcacccggtgaaggcaaggagaggctgccttaggcaggagctcaaaaggcaggagtggggtctgggccccgccgctgacagtcacatgaccctcttaggctcagagccctgttctctcagtcagtccctctccccaggcccggcctttcccttcacctctcctttggtctctccctgtctctctgtgtccaccaaggtctctctgtgttttcccctcacactccacctccatccctgtccctctctcactctccgtcagtcttgggcataagctaggtacatcccacttttaggagggtgaccaagtgaccagggaggaggcctgggactcagggatgagactctgcccaacctcattcactctctaggagtaatttgtgtccttctggccactgtgccgggttgtgtcaagggagagcaaagcctcacttctataaccagccgtagctcacacttgccctggtggacagagccttgttgtgaggcctggagaagtggcaccaggcctccgtttctacgtctaaccaaaggggatcagattcccaccctcctcatgggatcatcgtggagttcagctgacgtaacatttgccaaggctacgcacaatccctggcacgtgctaggagccccacgagtgtgagctcatttgttttgttcagttgttcaacacgcactcccctagcacctccccatgccagggctggcctgcacgctgggggacatggagatgcccagggccaaagaattctgtgacattctcagcctgagggagagacagacatcaaagccacacaaccacagtgtgtcatgactgaggccgagagacaaggggccttggtcaaggcagtgtggggacagaggaacaactcatcggaggcagaatgggccacctggagagggtcactctcagccaagacctgacggctgtatggagaggcggaaaagaatgttttaaaccaggggagggggcatggtggggtcaaatggtggggagacatgaggggtaaggctggcgagaaatggggcaggagggagtgtggggggcagacagagtggggtcctcaaagctgttgtaaagagctcagacttggccaggtgtggtggctcacgcctgtaatcccagcactttgggaggccgaggcgggtggattacctaaggtcaggagttcgagaccagcctgaccaatatggtgaaaccctgtctctactaaatacaaaaaattagctgggtgtggtggcacatgcctgtagtcccagctacttgggaggctgaggaaggagaatcgcttgaacccaggagttggaggttgcagtgagccgaaattgtgccattgcactccagcctgggcaataagagtgaaaactctgtctcaaaaaaaaaaaaaaaaaaaaaagagctcagattttgtcccaggggtagttgggagccatgcagggcgtcaggcaggtgctggtgttcttgggttcgcatttggaaagatgcctttgggtggtaaggagtgggtagaaggaaatgggatggagaaggcagtgcagaggctacagagaaagatcaggctgggcctggagacctgggaggctttggggtctgtcttggagaatgggggtggtggtatcatctcagttggtgcctggacaccagggggaccagtcaggctcttggactccagctttcagccctgggaggctggaaggccccaaggaattccaggcccccacctgtgtcctcccgcctgggccgcagcacagaagcagctgcctgtgacactgcctaggagggatcccaggacagcctcagggctgggccacactggagcttaggatccattcctctgccccccacccacagctcctggtccctctccatcaaatggggagaatgaatccacccccaccacagacctgctgttagggtcaagtgagagaccaaatgtgatggtgcagggagggtggtgaggccctcttggtcccacggtgtggggagagagagccagctcctccccagccacggtgtgagtccctcacaggcagcacctcccatcccctcagaacccaagtcccggcctcatctcccctttccagatgaaaagacagaggctcagggaggtgaaggccactcagctagaggcacagtgagaaggcactcacagggctgttgtcccaggacctgacttggccttggagcctcaggaaggtgtgcccctcccaaccccaccacatagcatggcgaggcggtgaggatgggacaggcccagcgtggggcacagaggactggagtcagaggctgcctggtgagcagaagctgaaggctggggttgcactgggcaaagccccttctggtcccctggcctgctaaatgccacagctactcctccgcaggcgggcacgagggcagggccgacttcgtgcccatcagcctgtctctgggtatctctgcaagtgtctctgccactgggaggcgccgggaccccaggcaaggccaggctgtgggggatggggtaggaggctccgggctgaggcactcgctgggtctgtcctcaggggctgtacatcttcctggtttatgctgcctgcaatgaggaggtgagtctgggggtgccggctgcagggagaggggtccaaggggtagggagggtccccagcctgacctccaagtattcccccaggtgcggagcgccctgcagaggatggctgagaagaaggtggccgaggtgctcagggcactgggggtgtgggtgggggcgggaggcccccagagccaggtcccagcccccatatcctctcctttaagtcccgtgccagccctgccagctgggggaccagcctgaggcccccaggcccctgggaggcagcccgagggagccccatagccttggctccaccccggagacacgtggctctcagaggtactcgcagcacccaggtgggagtgccgcccagtgcctcagtttccccagcactcaggcagagctgggaggacaaaagcagatccttttagcccatctgaaaaaaggaaaccagggcccaggaaactctgcagccctgcggcttgagcaatgtcctgtcactcattccccactgccaggaaacccgggcttctggggcctggcccacgcatggggcttctccagggtgaccttccctggggttccatgcagaagggtttgggggactcctgcagatggtgagtaaatggggtcggggctctgaggcagggcatgggttgaatgacttcgaggtcaggccaggggttccaatcctagctcccagccacctcctgtgtgcccctgggcaagttcccttccctctctgggcctcattactaatctgtgaggtaaaccttggagtggattcttagcgtatttgatcctgagggccccactcccaggatgggggagcagagagagggcttcctgccttcgtctctcaaaaatttgccttttcctccctagggacctatggccctagaactccctcagcattctcctccattgcaaacccggagagacaggtgaggctgggacagggtgggccgcacagggctctgccagggggctggcaaagccagcaggcaaagtcgggaagccacagggcctgggtagggccggggtgggggcttcccggggatctgtttctctgttcttgggctgaagggcccagggagggggagctgctggcggcaagctggcagaggcccctatagccaagggtccccagggcaaggggcagcagaaggagtgggggccacccccgtgacagcccctctgtcctcaggctgtggaactgacagcgttcaaagcttcaggtacagtccccacctcacggggtcccctcttttctttttgggcctggacaccccctaagccccccgtaccaggatggaagtgatttcaaattaatacgcccaacctcccgcaattgcagaggccctcccctcactccacaggtcccctgggagcactgggggcctggcggggaccaggcagtaccccttgggaggacttcattagagagtaggtcatggaaccctattctgagcgggcgctgccaagagcacaacctgcctccctctgtcctcccctctctctgcccaggggggcgctgccaaggagcacagcctgcctttctctgtcctccccctctttctgccccctaagcccagcaccccccgtcaccctctgaaggccccggcctgatgccctaggatccagagccttccaaacccgctgagggagaagtgctttcctccaaggctgcgggtcaccagctggacagctgatgggggcatgacgggggctgagcagtggcagggtgggtactgtgggagggtgaggacaccccagctccggctcagggagaggactgaagcctggggagctcagccgggcccaggggagccatgcggaccctgaccgctggccgcctccctgagggagcactccatctgaaacccacacgcctcagcctccgccaggtgactgtttccagcgaaggcaagagcgctgttcaccaggcccctcccaggggcaggttcagtgctcagcccaggcacccagtgattctgattcagagagggggagggggaggtgcctttctccacccattgcgcggatgaggaagttgaggcacagaaaggcgcagccgctagccagagcccgcacagagccagagccaggtccccactggcgcagatgggggactgcaggcacagcagtagccacgcgggtgtaaacgtagagccgcgtgaacccgggttgtgggatcccaggccccgaccagcccccatccccggctggcatctcggtcccggggagtctcagcttccctttctgcagaatgggctggaggcgccccccacaggcccgcccaggcgccccccggggccagcgcccctcccccacctgccccgcccccacccgcgggcgccgcggctgcaggaacaagagagcggcggcgcctctgcgctcaagtgacggcgcctttgtctccgctgaatgggtgcgttgctagggccgctcgtagcaacagagcagcttccacctgggccccaccctccggaccccccacccggcccggctctccggacgcccccgcttccagccccgaccccaccccgcgggccactcagcggcccgagctggaagcgcggggcagcggaggctgccgggctgtgtccttcgcggggccgccaccgcccctcctgaaaggccgcggagccctcagggcatgcggatgttccgaggatggagaagctgagactcacagcgaggacgggccagggtctccccaagcctcagttcccagagcccttccatccccgggttctccaccaggatcctctgccagcccagccccaagggcgcactttcccaccaggtttctagagagtggctgggaaactcgtcgccaaaccctgcccagctcagctctgctgggaccccagaccccagaacggcgcagcgggagtccctgagccccaacagcggccccagctcccgtggcctcagcctctggctttccctaaaggactgtgggcctcagccccctgttcccctagcccaccaggtccccaggctctttcccccagtctttgcctatctgtgatctgctccttcccccatgctccgaagttccaacgggctctgccgtgtctggtaataaataggactgttgggctctcctgtcctctgggagtcgtcctggcctgggcagagggaggggacgccaggccctctgggaggagggaggaaaccagagaagctgccacttggctttgggactccagggcctcagcctcatcatcagggtaggcgcagccagcatttatgagcgcttgctgtatccctggacggtgctgagccctttaccaccttagagtcatggatcctcaccgcagtcctgagccgccatcactcctgctgtgcagaggaggacacaggctcataccactcaggcctggggtctcccaggccctgtagcacagggggcaggggtgacggttggtgtgagtgggggccacccaggcagacagctcacaggtaagttgtgagtctggatacctccaagtcacaccatggaaccaggacctgctgccacagttgtgtggctgtgggcaaggtcgttctgaatcttggtctcttctcagtagaatgggtttcggagcagggaggggagcaaggatgtgagggctctgcaccaggcctggtgccagggtggaccccaaggctggcggcagggaaatgagggcccagactctgggagtgggggcacccaggcagccaacactgtcctgccgatgccagcctggctcacatcttgctggggccaggtgacaggtgacacagcatagccaggacctccaagcagctcccgggaggtggggcagggctgagtgagaagcagccgagacccagtgaggcacgcacagctcccagaggcctccagcttccacgctggaccctgcctgggttgagtccgggacaaaatctgtccagggtgctggccccacccacacaggtacagggcccaggtgcttcttgctgaggatggctgcgtagcctcacgatgccccatccgtcttctgtcgaatgggggacatcatactcacccagcgggtcatgtgaggggtccgcgcagtcctgcacttggttcctggcacggccctcagcaagcactcagagtgtcagctgtggcccgagacagatgttcggggctgtgggggccagagcctgtgccccagaggacgttcaaggccttgaaggcgccaggctggggaggcagtccagagagaagacagcatggctccgtggggccagcagagcccctgccctgtgctgggaacgctgggccaagtgcggcactctatcctcagcggggacaggaggggcgggacgctgaaggggcagcaaggaggcaggcagggcacttggtggccccccgaccacctacatctcagcatcttcaccttcaacaggctcctgtctcctcaaaaacccatcatatgggctgtggggaaggggacaaaggtgggaccaaggggtcctttcccatcccccacctccctccattccatatccctcttgtcccctatacacaccctctctttactctccagccagagtaacttctcctagatccccagacacggtggctgatacccctccatccttctgctcacactgttccctctgcctgaactgtccccagctcctatctagctggtgaactcctgggcatccttcaaaacccaatttggatgacacctctgctaaaaagtattcctgttccccagacccatctctcccaggagcagggtcaatcacttcctcaccttgtctgtctcaggcatatatgcagtatcacatcagactacagtctggtttaagatagtctccgcctacaagactggacattgcccagggcaggaactaaggcatctgcaggtgccaagaagaagagggacacctttttctttgcataaaagccactgccaaactgtgtgcctagggctgcatcacctgagagggaacacgtttttctaatttgcatgaagcatctggaggccgggggtgaccctggagaagaactagtcaagttagtcaaaatggatcaggacgatggagctttgtaccatggctgtgccgcttttagctgtgtgacctttggcaagctgcttgggccctctgtgcctcagtttcctcatctgtaacctacagaagtggcttcaaagagcagtcagtgtgcccagatgaggcgggaagcactaagcagggggcctggagtggaggaagcctcagatggcggcggtgctcactgccgccaccacgtggggctggggaggaacctgtgagggacgtggtggggcagacaggaaagggcagggctctgaggggtctggtctcccaggtctgtggctcatgggcccttggcaagtgccttcccctcctagagtataacccctgcctcacagggctgctgcggggacagtgagatgagggtggcacacagtaggtgccccttaaatggctgctccttctgccccaagatgggggctgagctggcatggccagcatgcaacaggcagagaggctacagcatccccctggcctcccagtgcctcagggtcccagggatgaggtgggtcccaaaccccaacagtgcctggtgtccccccacccggccccgccacccacctgcctcctcagagttttgaagcaaagagggtctgcgtgccacctccatccaagtcagagcgctgccccaacctagaccacccggaatccacccgggccgttctgctttggccccagaacgtacacaggcaaaggtagctggaaactaattgcgaaatttattccagggctgtgggggctggggtgatccttaagggcacttctcgtttcagggctgtgggtctccggccttggcaggggcacatgtttcagggggcggggaggggaggtactgagacagggtggcgggaggcgggaggcaggaggcaggggtgcccagtctcctccaactgggcaggctcagcacaagctgcaacagtaacatgaaagcgggacggacagcaggcaccccgccggggacaggagacagccgaggcctctccctggtgcttcaccctgcagagtgtccttcatgacctaggacagggggtcagggagctgagggccagcttcatgggtttgcagcaagggacccaacgggttggagccacagagaggggatcaacagcgctatccctgatctacaggcccgtgccccctcccaagttcacttgcattcccacccacagagacctgaagcccccaacagggcatcctgctgttcacctagtgggtggagggcgggcaacagcgcttctctggattggggctggggctcagaagtaatgacccagcaccaccccaagggtacttagtaggcgagtgtccggggagaaaccgtcagctgtacttagtggcaatccccaagccccagcttcagtcctcaaatctgtccccttccctccatcacacacacatttcaaggagtgtctagaagcttaaaaacaaaaagcggggagaaaaacctcttgactacaaccttgcagataaataccagcctgggagggccacctctgggtggggctaggatgtcgattgtaccaaacgttctccttgggtgggagagggaatcagtgatgcctggagcaaagttttttcccgatgatgtatcaatgccccctcttgcagaggtcaggtggggtagaagggctagggagaaggtctttttgtcctaaccagtctcctagtgtcctctagggcccaatagcccctctcaatttagcaaactcggttatccttagtttacaaaacagaggctctccctcctggtctctatggggggaacactggagaccctctctcctcccctagttgatacctgctcaacttctccctgtctgtttccaggagaggaggaagggatgacctctgatccaagggacgtcgaggcccaccagggaatcccgaacctcctccccggacctgcaggcttcagactccaggagagagagctgggagcagggagggggcggggcgggtggttaacagccacctccttggggcactccaagcagcaggcaagtgccagtggccactccacctccgccaggccctgcccagcctcacccaccttcccaaacacacagtgtcagaactcaggggcagcggcctctgggacggggctggggctcctcggtgggcatcagaaaatgaaccatgcggagccagcggtgtggctgcggccccgcccaggccccgcccccagtcccgcccccagtcccggccccgcccccggcccaggctcaagtctgcttggcttgcagcatttcgatgagcaggttgttgcggggcatctcgttgcccaggtgcttgtggtacaggtactccttggcctgcatgctcagggcccgcacctccaccaggcacagcagcagctgctggaatttgtccccgcagtgcgggtagtggcacagggtgtagtcaagcagggcggcgttggccttctcctgagcgtctttcaccaggatgtggttattcaggaacttcaaatctgcaaagggaggttctcggtcaccatcgcgtcaccatccatgcccatcagggctgggccaacaccgtcaccagcatcaccaataccaccttccctatgaccatcaaagacatgggcattgctgccaccaaccatgcaacatggtctccccgttggcaccgtgtcgccatcaccattgctgtcaccctggttgacaaacaccaccatcgtcaccaatacccacatgcctgtgtttttcatgaacatggccaccgccaccatcaaccacccaaccacagtcacctgtcaccatcatcactgccatcatcatcaccacagtggtcacaatgaacaagaattatgaagcccatcaccagcctccctcggggaggatccctgggcagttattgaacctctcggtcccccatctgtaaaatgggcgtgacgacagtaccaacttcacaaccttgtcctgagaatttagggagccgctgtgtggaaagtgctctgaagaacagtgtctggcacgtgagaagctcggtgggttgggt

SEQ ID NO: 1100 - protein, 984 aa, Homo sapiens [sequence omitted]

SEQ ID NO: 1101 - DNA, 15140 bp, Homo sapiens
  source (1)..(15140)
  CDS (201)..(333)
  CDS (6761)..(6873)
  CDS (7322)..(7388)
  CDS (9144)..(9362)
  CDS (10261)..(10470)
  CDS (10981)..(11124)
  CDS (11311)..(11507)
  CDS (11762)..(11941)
  CDS (12810)..(14192)
  CDS (14647)..(14688)
  CDS (14779)..(14940)
aagacctaaagacagaaatactattctacccagcaatcccattactgggtctatacccaaaggtatataaatcattcttttataaagacatatgcatgtggatgttcattgcagcactgttcatagtagcaaaaacatgtaatcaacctaaatgcccatcaatgatagactggataaagaaaatgtggtacatatacaccatggaatactatgcagccataaaaaagaatgagatcatgtcttttgcagggacatggatggagctggaggccattatccttagcaaactaacacaagaacagaaaaccaaataccacatattttcacttataagtgggagctaaatgatgaaaacacatggacacatacaggggaacacacactggggcctttcagagggtgggtcaggaaaataactaatgggtactaggcttaatacctgggtgatgaaataatctgtacaacaaacctccatgactcaagtttacctatgtaacaaacctgcacttgtacccctgaacctaaaataaaagttaaaaaaaaatacaccaagattcaatgtctggttcatagaggtaactaatatgtagcaaccccagcagttactttctctctttcttttcttttttcttttgagacagggtcttgctctgttgcccaggctggagtgcagtggcacgatcacagctcactgtggctttgacctcctgggctccggtgatcgtcccacctcagcctcccatgtagctgggattacaagcatgtgccgccacacccagctaactttttgtagagatgaagttttgccatattgaggttttgtcatgttgcccaggctggccttggactcctgggccttaagcaatccacccgcctcggcctcccaaagtgctgggattacaggcatgagccaccacacctgggtccagcagttactttctataagaggtaatggaggccgggcgcagtggctcatgcttgtaatcctagcagtttgggaggccgaggcaggtggatcttttgaggccaggagtttgagacctgcctggccaacacggtgaaatcccgtctctactaaaaatacaaaattatctgggtgtggtggtgggcacctgtaatcccagctacttgggaggctgaggcaggagaatcacttaaacctaggaggtggaggttgtagtgagccaagatcgcaccattgtacttcaccctgggcaacagagtgagactctgtctcaaaaaaaaaaaaaacaaacacagaagaagaagaagtaatggaggccaggtccagttgtcgtcacgcctgtaatcccaactacctgggcaggctgaggtgggagaatcactttggcccaggactttgaggccagcctgaacaacataacaggatcctgtctctaaaaaataaaaatgaaataagggagcactgcttactagcagccttcacaatccatgtttagaggtgtccaggagcaacctaggagctcagagaagctgccagcagctaaaaacttatcagtttccaaaaatcattatgtatattggagggacaaaggccaatcaccttgtggttcactttggacttgggagtaggtaggtggcagcaataagtccccattggtctgaactccactttgcctaagacctgattcagcctgtgggtgcttcctgacaccccatgaaactgatcggtccataagactgtaagatttgatatagatatacagatatatagatttttttttgagatggagtctcactctgttgcccaggctggagtgcagtggtgcaatctcggctcactgcaacctccgcctcctgggttcaagtgattctcatgcctccgtctcctgagtaactgggattacaggtgcccaccaccacccctggctaattttttttgtatttttagtagagacgggttttcaccatgttgaccaggctggtcttgaactcctgacctcaggtgatccacctgcctcggcctcccaaagtgctgggattagattacaggagtgagccactgcacccagccagatatgatatttttattaagatcttttctattacagaatacaaaattgaaacatacagaaaagtagaaaaatataccaaatctaccatttaattaaaatcaccgtttatgtcttggtgtattccatttattgattgattgatttgatacaaatattacctaaggcctccaatgcacggtgctaggcactggggggtactgaggtaaactcagtgctttggagagcctgtagcatttccctccagtctttttctagatatctctgtacatgcaaaaatgtttcaagcttttctaaaatcataggaacagtctaaaaagtgtaaaataaatctcaattttatcaatagttttgaacaccttggacaccttagctttatttgaactaggaatatgttgctctcatttctactgtcactattagtcatgaactcaaagtggttaagatgagagatgagctgggaatcaattagggaaaattatgttttgggggtggaatacggaggacctctccagctccagctccatcagctttcttttttttcttttctctttttttttttttttttgagacagattcttgctctgtcgcccaggctggagtgcagtggcagtgatctcggctcactgcaacctccacctcccaggttcaggcgattctcctccctcagcctcccaagtagctgggattacaggcacgcaccaccacacccagctaattttcatattttagtagagatggggtttcaccactttggccaggctggtctcgaactcctgacctcatgatctgcccaccttggcctccaaggtgtagtgctgggattacaggcatgagccactgcacccagcctctatcagcttgcttttttttttttttttgaggagtctcattctgtcacccaggctggagtgcaatggcacgatctcagctcactgcaacctccacctccctggttcaagcaattccctgcctcagtcttttgaggagctgggattacaggggcacaccaccaaacctggctaatttttttgtatttttagtagaaacggggtttcaccatgttggccagactggtctcgaactcctgacctcaggagatcagcccgcctcggcctcccaaagtgctgggattacaggtgtgagccaccgcgcccagcctctattagctttctaatgtcctcggagttccttcttccttcagtgttcatgctgatggatgaacagccttccctccactggaggctgtccttgcctctcctaactgggggctgccatggctcagtctcccctcggcactgaagcatccacttttctgggtctcagtccacctcttgcttgtgtatttcctggtcctcaacagaccctgttgagcatagtctaggaccacttcatgccttgacagactccatttggagactgcagcagatgctattgatgtcccacatccccttggcccatctgagactgcctatagctgcaacagacagcacacagcatgctaatagcatcctacctccagcacctgtgttttctctctcacttctctctctggttctcaaaccagattctccaccattttcatgttttctgaaatcagctatttacaagagcgattgctcccatgagtgtatttgcccagtgtgtctgctcttccattagcagcaaaactggcaaggggggattggaggtggaggtggaggtggaaatgcaatggggctatgtttctaccataggtacttcgtactttgtgtgtgtgtttaaatcaactttttttgattaaaaaaaaagtctatgattagaaaaactatatatgaaacagcacacagacccatccagatccttaatccctttctccagaagcaacaactattgtcaaatttctgatgtattcttccagaaatattctagggatataaaagtacaagcatcttaaatagattccttttgtttacatacatgggagcataatatatataacatatatttaaacttcactacatatattggggatcactccaaaataaagctacttcacttttcccccacaactttaagtaatgtgttgcttggaaatcccaagatttatataagctctccctttttaatagacattttgattgtttaatcaactcatttgctatcacaaacaattctgccttgaatattcttatgtacatgtttttacacacatgtacaactatacttttaatacttaatataattaaaattttctcttttgataattagcaggtgagaaatagtatcttcttgtttgatttgtatttctgatgcgtaaagttggaggtttgtatatgtttatcaaactacttcttttttatttttatttttttaagatggagtttcactcttgttgcccaggctggagtgcaatggtgcaatttcagctcactgcaacctccgcctcacaggttcaagcagttctcctgcctcagcctgctaagtagctgagattacagggatgcgccaccacgcctggctaattttgtatttttagttgagacagggtttcaccatgttgggcaggctggtctcgaactcctgacctcaggtgatccactcacctcggcctcccaaagggttgggattacaggtgtgagccaccgtgcacgcccattatcaaactatttctattccttcttcagtgaattgcctattcccatcttttgcctattttctatcttattgatatgaaaactagaagaaacttcctttgttgagaaaattattcttcttaggccaaacttaaaagtttttagacagtcaaatttatttcctttttggcttctcagttttatgtatttaaaaaacttaaatacataaaaaaccagtattatcaatttaaaaaaccttccgcagtttaaaattattttatgaaataacttgataattttttctagtattctctcagattcttttttacatttaagactctaggccagtgcagtggtgcacatgtgtaatctcagctacttgggaggctaagttgggaggatagcttgagcccaagagtttgaggctattgtgagctatgatcatgagctttgatcatgctactgcactctagcccgggcaacagagggagaccttgtttctaaaagaaagaaaaagaacgagagtgagagcaagcgagagagagagaaagaaggaaagagagagagaaaggaaggaaggaaagagtgaggaaagagaaagaaagaaacaaagaaagaaaggaaggaaggaaggaaggaaggaaggaaggaaggaaggaaggaaggaagggagggagggagggagggagagaaagaagggaaggaagggagggagggaggattctagtctatctggaaattattttagagtaaaaatcagctctcatatttttatcttttctttatttttcatttgtaaccttgactgtttgatcagtgattcagcctttgaggagttcagaacaatccagatttcccaggtccttgggaacatgactgaacctggcttatagacatgttgctggttgtgacttcgaacccctaagcctctcctgctctcggagctttgggtccagagcctaagaagagcctgggcaccattctcactggggcatgtgggctccaggtggcccccacagtgacctggattcccatttcactcagagtcacaggctgtagcgcttcctctgtaaattcagccctggctccctcccctcttccctcccatcccatctgcacactgccctgccagctcttccttgcggaaatttgcatcgtgggcttgtagggactgcttcactgagccatggtctgttcggctgccccactgctgctcctggccacaactcttcccctgctggggtcaccagttgcccaagcatcccaacctgtaagtgagactggggtgagacccagggaaggtctgcagaggcgacaatggggacccctgattgggagagacaaagcatggaatgaaaggataggtagtggggaaagggctgaggggagaggaagtaatgtgtaaggaaagtggatgctttgttatgagatctctgagaactcagttttactttcctgggtgtgggggatagctcttgtttccttatttgagtccctgtaaactcatatgatacctgctgtactttggataaagtctcattcagtcaagctggccatttaaaaagaaaaagaaaaattttgcagatttggaaactattggcttagaggatgggagagaatctgaggaaagacatcagagtctagagggtgcctttccatctgtgttctcctcaatagatagctatatctatggctatgtctatatgtcactaagcctaaatctatctctattgctaaatttaaatctatctttatgtaaatatatatctgtatctgtatctaaatctatctatatctatatcttttttaagacatgctctcaccatgttgcccaggctggacttgaactcctgggctcaagtgatcctcccacctcagcctcccaagtaactgggactaaaggcacgtgccattgtgaccagcttatactcacgtcttatccatactcgtatctatatcaatatctggttttggatagatatccacacgcacacgcaggtgcatatagacagggctcaggtctgtgacacagtgagcccctccatatttcctggaggaaggactgccatgttctctctccttgggccagctccatcctcacctccctaccagacagacccttccctgcctgccccatccccctatcttctagctttggccgatggcccaagggccagacaatgtgggcccagacctccaccctcaccctgacagaggaggagttggtgaggaaataatgtacaggaaccaaagacggaggaaagaggctgccttctgctcaccctgctgtcaaatcctacagaaggaataaactccccaagcgcctgggccccagccagcaatgtccagctccgctgctggagctccagaccaagccatttcaattagcctagaggcccagggacaggtaaacgcaggaaggaattaaacaaagcatgttgacttcccagggcgtgcctggttcctggtcttgggtgggatagcagggttcctggggttgcatccctggcaccccctaacagaagcctgctttcccttcctgatgtgtacacttgactcctggcaaaaagaagagctggttgagactgagtcatgctggctgagactagtcaggctggcccctggggtgcctttggaagggacttgaggtctcccctctgtgttctgttccagggacagagtcaggctggaggggaatctggatctgggcagctcctggaccaagagaatggagcagggggtgagtgtatggacaggaggaggagggagggggaggagatgggagctgggaatgaggtggaaacccaggacccagaaaagagagggcaggtgcagcgagggagtggtggcggagagagaggactggctctgatcacagtcggacaggtctgtgaccagttctctagcggagaggcctggaaatgaactcatttgtctttgaagcctcatccataaaataggtgttgctggacggatgacatgaagccgtgtatctgaaggcacagtgcctaggggaggacttgctcccttcctgagccctgtctatatgcacctggacaggctgtgggagggggtctgctctgcattcctgggactggccagctaggtgagagaatccagaggggaccggcttgtggcctcgctgcctgtcctctccagctgtcccctctgctcctgtagaatcagcgctggtctccgtctatgtacatctggactttccagataagacctggccccctgaactctccaggacactgactctccctgctgcctcagcttcctcttccccaaggcctcttctcactggcctcagactcacaacaggtaccacttgcgtgggaagggggctgagagtgaatgaacataggctcccgggcctcctgcagccagcttgcctgagactctgtgagcccctctgtatttcctggaggaagggctgcctggttctgtctccgtggcccagctccttcctcacctccctaccagacagacccttccttgcctgccacatccccctatcttctaactttggctgatggcccaagggacagacaacgtgggcccagacctccaccttcacctgttccctggcccccgagacatctgctgcttcgagtcctgactgaggaggcagtcctgatgcatgggcctgactgaggcacctgtagcttggggattggtccagatacccagccctaaagcctctcaggcatcaggcaggtgtctgccctgcccacctagcttcttcagacagcctgcccaccccctcttctcttctctctgtcagagtgtaatgtcaaccacaaggggaatttctattgtgcttgcctctctggctaccagtggaacaccagcatctgcctccattaccctccttgtcaaagcctccacaaccaccagccttgtggctgccttgtcttcagccatcccgaacccgggtactgccagttgctgccacctggtgaggaaggttgggaacttggaaaccaatggccttaagtgaaataaatgttctcagtggttttctcctctctgaacctgtagtttggccagctggtccaagcacagctgctcctctgggtgggagaaaaagccagccatcatagcagatcacaggccctgagcttggaacctgagtagggagactaatgagagaggccccagagacataaggaccaggagagaaagtgctggagtgactgctttttaccttaggaggcaggaagcagctccagtagcccaggatacctgggggagggagaggcatagaccaaaaaggttccctctttggtttccaataacagatagagtcttccaggctggattgcagcagccacattcaggtgcccacccagggacaaaaagaaaaagttaaaaagctagggagggagtgtggaggaatgggctccagagtcaggggagaagccattgctcggctgcatctgagggccataagtccctcctccagggtcccctgtcacctgcctccctgcagtccccgggatcctcaacctgaactcccagctgcagatgcctggtgacacgctgagcctgactctccatctgagccaggaggccaccaacctgagctggttcctgaggcacccagggagccccagtcccatcctcctgcagccagggacacaggtgtctgtgacttccagccacggccaggctgccctcagcgtctccaacatgtcccatcactgggcaggtagccagcctgtcctctccttgcctcctttctccttcctcttacttcccttcatcctcgtcttccttctctgctttccttcacctcttcttcccacgcctccctcccttctccttccttcttttctttccacctctttctcacccttttcatctttccatttacccattctggggaaacaaaggctaagaggtcccttggtgtgaaaaattgcaatgtggaaaattctaaaaatggccagctgttttcactgtggtctgggacttctgagacccttttcagggtttacaaagtcacaactattgtcctaatatgctaagatgtcatttgaccctttcactcccactccctcaggtgtagacagtggccctttccagaggctacagggccatcacgagattgaatgcaaatgcagatgggagaacccagacacgggcaagatttgcaaacatgtaaaacaaagtcacttgtctaattatgttttggaaaatgtagttatttttcataaaaatgtttctgttaacaaaaatactacaattctccacacaaaatatggagaatgtggagaataccgtctcaatgtctgctgagaacagatccatgtttttcaagatgctaaaatggcaggggtggtgcaggaagggcatctgctctagggagagcatgaaattcacgggcatgggccgataaaagagagatctcttctacctcctagaaatccttcttggggacagggaatgtccaccaaaggggccatcctgggaccttgcttgctggggttaagcactgggtggcaggcagaggacaggagcaaggctgtggcttggaaagcagcagagattctgtggtgcagcggggcccagaggagccacatagcgccgcacacacgtttctgcaggtgagtacatgagctgcttcgaggcccagggcttcaagtggaacctgtatgaggtggtgagggtgcccttgaaggcgacagatgtggctcgacttccataccagctgtccatctcctgtgccacctcccctggcttccagctgagctgctgcatccccagcacaaacctggcctacaccgcggcctggagccctggagagggcagcaaaggtatgagaaggggccagcagtcaggggtcagagggaccagggggcagctgtctcttccaggcagctgggtcttcagctcatgagaaacagaggccacagttcaaccagagagtggggtccaaggccaacactgttttctaccccatcagagccatgccacgtctattgccataacataaccacatgtgtataggaaacttttgcaaaatgctgtcatctacacaatctcatttaactctctatggaattagtttgatggtagtctccattttacaaatgaggaaatggtggaaactgagtcctagagcttgttagagaccccacagtcccctccagcaaaatccaagctctcttcctctgtccaagtggagcccacacatcatttggctcttccccactgcttcctctgtttctgaattgctagaaagactgaaacagcatgtcagagcctgctgggttccaggcctgtccctggcccaatgacagttcccttcttcgttttgccttcagcttcctccttcaacgagtcaggctctcagtgctttgtgctggctgttcagcgctgcccgatggctgacaccacgtacgcttgtgacctgcagagcctgggcctggctccactcagggtccccatctccatcaccatcatccagggtacgcagggcctggggcccagtgggctggtcccagctgcttgccttgggagcacgggctctcttgcatggcacgtctctgccctgggcaacaggaccaggcttcggggcccgcatagggttctgcccaaggagaggctcaggtgaggctgtgattgctgagtagcgcctgctcgtcattcttcagatggagacatcacctgccctgaggacgcctcggtgctcacctggaatgtcaccaaggctggccacgtggcacaggccccatgtcctgagagcaagaggggcatagtgaggaggctctgtggggctgacggagtctgggggccggtccacagcagctgcacagatgcgaggctcctggccttgttcactagaaccaaggtgaagcttccaccctgctgcccacgtgccccctccacggcccaccctagcctctctaggacccagcttgcagacccttttccccaaggcccagcccacaggctgttcagcttctctgaagtggagccctagcagagccaggaagtaggagtgagagggcttctgggggtcaacaatctccatgggtctgggatgctcttctcaaaccatcattccaccatgtgtcccacttcatgctgtctcgtctgtctcagctgctgcaggcaggccagggcagtcctgctgaggaggtgccacagatcctggcacagctgccagggcaggcggcagaggcaagttcaccctccgacttactgaccctgctgagcaccatgaaatacgtggccaaggtggtggcagaggccagaatacagcttgaccgcagagccctgaaggtgagatctctgagccacagtgggggccagctgggcagtcgggggctgaagactccccacctgtgggcatttctgtccctctgatgtcaccatgggctgttgggcagcagacctttccagagtccaggggcctgctcctgatccatttctcctctcagacaccactctctgaggctgcagaatggaggcctggcgctgggagcacatgggggttggaggcaggcaagggtgtggagacatgaggcccgaggcgtgtgtgcgcatgcaggcgtgtggctatgatacagacaggaagtttctatggagacgctgaagtatgcttggctttgctgggctcacctaaatcggctctctgtatgggcatccattggtgacccatgagctgcagccaaaagtgtaacaaagggcaatgatattacacaccgtttatgcctgggaatacatggcatgtgtgaatgcacagacatgcgtgtggccgtcgcctccaggacacggtgccctctaccactgctggtcaccattcctagctttgcagacctggaggggccaaagaatgggagaagtcccctcttagaacctgggtggcccctagggatggagggggaagaagggttttcagcagaggggctgggtgcaggtcaggggacatatccttgaagatgccccaggtggttggccaaacagctccctgttcttcccatctagaaagtctcccttcacaggcctgtcttcctctcccttttctctccaaccttgggtcgcacactggactgggaagggaaggtgtggggtctgttgttctcattgcccccggctcagtcctgtgggcgccagcagacggggttcatctttcttttgggtgctgcagaatctcctgattgccacagacaaggtcctagatatggacaccaggtctctgtggaccctggcccaagcccggaagccctgggcaggctcgactctcctgctggctgtggagaccctggcatgcagcctgtgcccacaggaccaccccttcgccttcagcttacccaatgtgctgctgcagagccagctgtttggacccacgtttcctgctgactacagcatctccttccctactcggcccccactgcaggctcagattcccaggcactcactggccccattggtccgtaatggaactgaaataagtattactagcctggtgctgcgaaaactggaccaccttctgccctcaaactatggacaagggctgggggattccctctatgccactcctggcctggtccttgtcatttccatcatggcaggtgaccgggccttcagccagggagaggtcatcatggactttgggaacacagatggttcccctcactgtgtcttctgggatcacagtctcttccagggcagggggggttggtccaaagaagggtgccaggcacaggtggccagtgccagccccactgctcagtgcctctgccagcacctcactgccttctccgtcctcatgtccccacacactgttccggaagaacccgctctggcgctgctgactcaagtgggcttgggagcttccatactggcgctgcttgtgtgcctgggtgtgtactggctggtgtggagagtcgtggtgcggaacaagatctcctatttccgccacgccgccctgctcaacatggtgttctgcttgctggccgcagacacttgcttcctgggcgccccattcctctctccagggccccgaagcccgctctgccttgctgccgccttcctctgtcatttcctctacctggccacctttttctggatgctggcgcaggccctggtgttggcccaccagctgctctttgtctttcaccagctggcaaagcaccgagttctccccctcatggtgctcctgggctacctgtgcccactggggttggcaggtgtcaccctggggctctacctacctcaagggcaatacctgagggagggggaatgctggttggatgggaagggaggggcgttatacaccttcgtggggccagtgctggccatcataggcgtgaatgggctggtactagccatggccatgctgaagttgctgagaccttcgctgtcagagggacccccagcagagaagcgccaagctctgctgggggtgatcaaagccctgctcattcttacacccatctttggcctcacctgggggctgggcctggccactctgttagaggaagtctccacggtccctcattacatcttcaccattctcaacaccctccaggtaggtgataggggggtggctgtgttttttgcttttttagatggtctaagtcactgccgatctcttctctaggaggtaccaaggtggagcagaagaaacataggttcaggaattttggaaggcttaggtgtggatcccagttcctccactgagtagctggataactttggacaaattacataacctctctgagctttggttttcttatctgtaaaataatagctgattttgttggagaaatcaggaaattgtcagtacccaatcctttgctatcccttttataaccataacaataagaaaagcacctgaaatggatcctatgcaccaaatagtggtaacagaaaaattgagatgagaagccttaggatgtgaattacacaggacagaaggagcatgttgattcgggtggatcccttcctccttgaccagcttatccccatgtccctcttctcagggcgtcttcatcctattgtttggttgcctcatggacaggaaggtaagtctgcccacctaaccccctgcctcacttgcagcccgcaggccggggccgtggctggcataagcagagcatttacctctcccgcagatacaagaagctttgcgcaaacgcttctgccgcgcccaagcccccagctccaccatctccctggtgagttgctgccttcagatcctcagctgtgcatccaagagcatgtcagaaggcattccatggccctcctcagaggacatgggcacagccagaagctgagagaagattggggttgttttttagaatgaacagttttccggttccagctccccaccagtggaatgagcagcctggtcagagcagtcaggatcagggtcctgggttcctgattatcacctggactcctgctgactctcttttctctggtttctccatctaaaaatctgcctccagttagcatttgaaggaaaagtgtggga

SEQ ID NO: 1102 - protein, 949 aa, Homo sapiens
MEYYAAIKKNEIMSFAGTWMELEAIILSKLTQEQKTKYHIFSLINRPFPACPIPLSSSFGRWPKGQTMWAQTSTLTLTEEELGQSQAGGESGSGQLLDQENGAGVPGILNLNSQLQMPGDTLSLTLHLSQEATNLSWFLRHPGSPSPILLQPGTQVSVTSSHGQAALSVSNMSHHWAGEYMSCFEAQGFKWNLYEVVRVPLKATDVARLPYQLSISCATSPGFQLSCCIPSTNLAYTAAWSPGEGSKASSFNESGSQCFVLAVQRCPMADTTYACDLQSLGLAPLRVPISITIIQDGDITCPEDASVLTWNVTKAGHVAQAPCPESKRGIVRRLCGADGVWGPVHSSCTDARLLALFTRTKLLQAGQGSPAEEVPQILAQLPGQAAEASSPSDLLTLLSTMKYVAKVVAEARIQLDRRALKNLLIATDKVLDMDTRSLWTLAQARKPWAGSTLLLAVETLACSLCPQDHPFAFSLPNVLLQSQLFGPTFPADYSISFPTRPPLQAQIPRHSLAPLVRNGTEISITSLVLRKLDHLLPSNYGQGLGDSLYATPGLVLVISIMAGDRAFSQGEVIMDFGNTDGSPHCVFWDHSLFQGRGGWSKEGCQAQVASASPTAQCLCQHLTAFSVLMSPHTVPEEPALALLTQVGLGASILALLVCLGVYWLVWRVVVRNKISYFRHAALLNMVFCLLAADTCFLGAPFLSPGPRSPLCLAAAFLCHFLYLATFFWMLAQALVLAHQLLFVFHQLAKHRVLPLMVLLGYLCPLGLAGVTLGLYLPQGQYLREGECWLDGKGGALYTFVGPVLAIIGVNGLVLAMAMLKLLRPSLSEGPPAEKRQALLGVIKALLILTPIFGLTWGLGLATLLEEVSTVPHYIFTILNTLQGVFILLFGCLMDRKIQEALRKRFCRAQAPSSTISLVSCCLQILSCASKSMSEGIPWPSSEDMGTARS

SEQ ID NO: 1103 - DNA, 970 bp, Homo sapiens
  source (1)..(970)
  CDS (201)..(770)
  modified_base (44)..(143): a, t, c, g, unknown or other
  modified_base (156)..(157): a, t, c, g, unknown or other
  modified_base (165)..(166): a, t, c, g, unknown or other
  modified_base (169)..(170): a, t, c, g, unknown or other
  modified_base (186): a, t, c, g, unknown or other
  modified_base (188): a, t, c, g, unknown or other
  modified_base (204): a, t, c, g, unknown or other
cttaaagaggactggacaatacttttagcactttcccttctcannnnnnnnnnnnnnnnnnnnnnnnnnnnnnnnnnnnnnnnnnnnnnnnnnnnnnnnnnnnnnnnnnnnnnnnnnnnnnnnnnnnnnnnnnnnnnnnnnnnggggcttagaganngggtgaannccnnctcctcggaggtgcgngnctaaaataccctatgnaccgctacgtggccatctgcaacccactgcgctatcctgtcctcatcagctggcgggtctgctggatgatcctggccagctcttggttcggtggggctttggacagttttctcctcacccccattaccatgagtctcccgttctgtgcctctcaccaaatcaatcactttttctgtgaggcacccaccatgctgaggctggcctgtggggacaaaaccacctatgaaacagtgatgtatgtgtgctgcgttgcaatgctgctgatccccttctcggtggtgactgcatcctacaccaggattctcatcacagtgcatcagatgacatcggctgaagggaggaagaaggcctttgccacctgctcttcacacatgatggtggtgacattgttctatggggctgccttgtatacgtatacgcttccccaatcttaccacaccccaatcaaagataaggtcttctctgccttttataccatcctcacacccttattaaaccctctcatctacagtctgaggaacagggatgtgatgggtgccttgaagagagttgtggcaagatgttaggggacatgtggtgtgatgaggaaagaattctgatggtctaaaacctccacatcctgttcaggcatatatggggtcgtatcatggataccacggatgatgctgacaggaactttcaataccagctgtgctaaatggtgtatcaacagtacccccatcaaaaatgggaagttgctgtaacagtcacacacaaataatgccag

SEQ ID NO: 1104 - protein, 189 aa, Homo sapiens
  MOD_RES (2): Variable amino acid
MXRYVAICNPLRYPVLISWRVCWMILASSWFGGALDSFLLTPITMSLPFCASHQINHFFCEAPTMLRLACGDKTTYETVMYVCCVAMLLIPFSVVTASYTRILITVHQMTSAEGRKKAFATCSSHMMVVTLFYGAALYTYTLPQSYHTPIKDKVFSAFYTILTPLLNPLIYSLRNRDVMGALKRVVARC

SEQ ID NO: 1105 - DNA, 1099 bp, Homo sapiens
  source (1)..(1099)
  CDS (201)..(899)
ctttctctgggaactaaatttcaattataatttaaaatatcctataacttctttctgtgtccatttaagtcttgctctgaaggtattatcactatgaaaattattgcattgttcactgaaagtacatacaatgtgctaggtatagtaatgtaggtgacgtagttttttcattaggatgaacccaactatgtattttattaatgagtttggttgaggcagcacaaaggtcacaaagaaagatttttaactttgtcctcatttataaatttaatcttgttactttttatttccttgtagattccttttgcaataaaaacaacaccaggtgcctctcaaattcttgccaaaacaattctacatgcaaagatttttcaaaagacaatgattgttcttgttcagacacagccaataatttggacaaagactgtgacaacatgaaagacccttgcttctccaatccctgtcaaggaagtgccacttgtgtgaacaccccaggagaaaggagctttctgtgcaaatgtcctcctgggtacagtgggacaatctgtgaaactaccattggttcctgtggcaagaactcctgccaacatggaggtatttgccatcaggaccctatttatcctgtctgcatctgccctgctggatatgctggaagattctgtgagatagatcacgatgagtgtgcttccagcccttgccaaaatggggccgtgtgccaggatggaattgatggttactcctgcttctgtgtcccaggatatcaaggcagacactgcgacttggaagtggatgaatgtgcttcagatccctgcaagaacgaggctacatgcctcaatgaaataggaagatatacttgtatctgtccccacaattattctggtaagtgtgatcatatctgaatcacagatggtgtagttagctctttctaagtggcagaagcagaggtgacattttatttttcacacaatcatttatgaaaatggccaagttcttgacaggaatcaatcactagatagaaactccctaaactgctgaaaatccactgaatgcactgaattctaagtggttgcctgctgtcactgttgctgttttaaatgga

SEQ ID NO: 1106 - protein, 232 aa, Homo sapiens [sequence omitted]

SEQ ID NO: 1107 - DNA, 913 bp, Homo sapiens
  source (1)..(913)
  CDS (201)..(713)
taccaaggatgactatatatatttattttgtttgtttgttttttaagatactgccaaagtattttctggagtgtcggtaccattttacattcctgtcagcggtgtaagagaaatccattttctccacattcttgccagtatctggtattgtcactatttttattttagcaattttaatagacgtgtggtgatacatcatcatgatcttaatttgcatttcccaaatggctagtgataatacacatcttttcatatcatcatttgctgtctatatatcctggtcagtaaaatgtctctttataccttttgcctattttctaattgaattttgtgtgtgtgtgtgtgtgtgtgtgtgtatacatatacatatatatatatatataatttttttttttgagacagaatttcactcttgttgcccaggctggagagcaatggtgcaatctcggctcactgcaacctctgcctcccgggttcaagcgattctcctgcctcagcctcccgaatcgctgggattacaggtgcctgccaccacacccagctacttttttatatttttagtagagacggggtttcactgtgttggccaggctgttctcgaactcctgacctcaggtgatccacccgcctcagcctcccaaagtgctgggatttcaggcgtgagccactgcgcccggcccttgaattgtatattttttattactgggttttgataattttttgtagatcacaggtgcagcttctttgtatggtttgcacatattttctcccaatctgttgcttgtctttccatcctttttgtttgtttgcttgtttttattttggttgtttttttttttttttgagatggattctcactttgtcacccaggctggagtgtagtagcacgatcctggctcactgcaacctccac

SEQ ID NO: 1108 - protein, 170 aa, Homo sapiens
MILICISQMASDNTHLFISSFAVYISWSVKCLFIPFAYFLIEFCVCVCVCVCIHIHIYIYIIFFFETEFHSCCPGWRAMVQSRLTATSASRVQAILLPQPPESLGLQVPATTPSYFFIFLVETGFHCVGQAVLELLTSGDPPASASQSAGISGVSHCARPLNCIFFITGF

SEQ ID NO: 1109 - DNA, 862 bp, Homo sapiens
  source (1)..(862)
  CDS (201)..(662)
ccccagtaggacagagatcctgaggtaggaggggaccccttgccttgctgcttcttttggcaccgctgacccgggcccaggactcctcgctcctcctggaaggcctgggtcgtgtagcccacagaggtggccacgtgggcatctcccccactgctcctcatagaaccggaggcattatcctgccgggcccactcttacccatgaaagaaacttgggaaatgctcccggggaagccggggatctgggcgctcgaccacttcggtgtgaatcttccgtccgctcatccttccttcggagggtcttggggagaggagaaatgctcaaggacgatgcgctttgcagcgtctcaagggaaactagatctcaacggataccagaagtctggagcgtcttcctggaggaaggcggcccgaggcctgcggttgcagggaggcttgcggagcacagcgccctctctcagcctgagctatccagtggcttccagcatcccagctggccgactccacttcctctctcttcctcctactgcgggtcttcttcttctctttggggaccgaatctcgctctgtcgcccaggctggagtgcagtggcgcgatctcggcttactgcaacctccgcctcccgggttgaagcgattctcctgcctcagcctcccgaatagctgggactacaggcgcgtgccaccacgcccggctaattttttgtatttttagttgagacggggtttcaccctgttagccaggatggtctcgatctcctggcctcttgatccgcccgcctcggcctcccaaagtgctgggattacaggcgtgagcctccgcgcccggcctactgcggctcttctatcctggtgttctttga

SEQ ID NO: 1110 - protein, 153 aa, Homo sapiens
MKETWEMLPGKPGIWALDHFGVNLPSAHPSFGGSWGEEKCSRTMRFAASQGKLDLNGYQKSGASSWRKAARGLRLQGGLRSTAPSLSLSYPVASSIPAGRLHFLSLPPTAGLLLLFGDRISLCRPGWSAVARSRLTATSASRVEAILLPQPPE

SEQ ID NO: 1111 - DNA, 1117 bp, Homo sapiens
  source (1)..(1117)
  CDS (201)..(917)
tctcctggtctccccggctccctgtatccccacacccagcacagggccaggcactgggggggccttcagtggagactgaaatggctgaacgggacctcccatagattagctatgcggccagcagcgagacgctcagcgtgaagcggcagtatccctctttcctgcgcaccatccccaatgacaagtaccaggtggagaccatggtgctgctgctgcagaagttcgggtggacctggatctctctggttggcagcagtgacgactatgggcagctaggggtgcaggcactggagaaccaggccactggtcaggggatctgcattgctttcaaggacatcatgcccttctctgcccaggtgggcgatgagaggatgcagtgcctcatgcgccacctggcccaggccggggccaccgtcgtggttgttttttccagccggcagttggccagggtgtttttcgagtccgtggtgctgaccaacctgactggcaaggtgtgggtcgcctcagaagcctgggccctctccaggcacatcactggggtgcccgggatccagcgcattgggatggtgctgggcgtggccatccagaagagggctgtccctggcctgaaggcgtttgaagaagcctatgcccgggcagacaagaaggcccctaggccttgccacaagggctcctggtgcagcagcaatcagctctgcagagaatgccaagctttcatggcacacacgatgcccaagctcaaagccttctccatgagttctgcctacaacgcataccgggctgtgtatgcggtggcccatggcctccaccagctcctgggctgtgcctctggagcttgttccaggggccgagtctacccctggcaggtaagagagcccaccccagcacctcctgtcagggagaacagccaatcctgagatgagcagagtgggcactctccggtcactctaaatgccaagggggataaatgccactaacttgaggttttttgttttgttttgttttgttttttgagacagtctggctctgtcacccaggctgcagtgtagtgatgcgatctcggctctctgcaacttccacctcctgggttcaagtgattctcttgcctcggcctcct

SEQ ID NO: 1112 - protein, 238 aa, Homo sapiens
MVLLLQKFGWTWISLVGSSDDYGQLGVQALENQATGQGICIAFKDIMPFSAQVGDERMQCLMRHLAQAGATVVVVFSSRQLARVFFESVVLTNLTGKVWVASEAWALSRHITGVPGIQRIGMVLGVAIQKRAVPGLKAFEEAYARADKKAPRPCHKGSWCSSNQLCRECQAFMAHTMPKLKAFSMSSAYNAYRAVYAVAHGLHQLLGCASGACSRGRVYPWQVREPTPAPPVRENSQS

SEQ ID NO: 1113 - DNA, 1264 bp, Homo sapiens
  source (1)..(1264)
  CDS (201)..(1064)
cgccttaggactgaagagcatagtaacatcaattctttatagaatgtccagcctgctggcctgtcctgtaaaatttgaacttgccagccctcacaatgtgaaccaattccttaaactaaatttctcactttctctctctctctggaaaacactgactaatgtagcaggtttctctgctccaggacttcaggaccttttcgatgctaataagtttctccatcagggccagcttgttcctcctactgagcttgaaagcccttgttgaagttgtggtttgggggactggaccgatgacctcaaaggttccctttgctcccaagcctcagagtctaggaggccagagggtctcagcaggcctttgtccttctcagctgtctcttactggctttctccacaggtcttgtagcttcaatgagcatggctaccacctcttccaggctatgcggcttggggttgaggagataaacaactccacggccctgctgcccaacatcaccctggggtaccagctgtatgatgtgtgttctgactctgccaatgtgtatgccacgctgagagtgctctccctgccagggcaacaccacatagagctccaaggagaccttctccactattcccctacggtgctggcagtgattgggcctgacagcaccaaccgtgctgccaccacagccgccctgctgagccctttcctggtgcccatggtaagctggagcctcagacctttgcccatctcccttcaggcaagtctgggctggggcatgtgggcaagagctgctgtcccccccaaggctgcctgccccctggatctcttgggtggtcactgctctttagtcacaagtcaggggtccctgcccagcgtggttcctgccccagccttcctctctttccagagctgcttccagatccctgcctccactctcatgggaaaacccattctccttgggaactactgccactcagctgtacccctgctgccctccacttccctcctccctccagaggttccgttgcctttgttaggaatggacatcctggacgggcgctgtggctcatgcctgtaatcccttggggaggctgggcagatctcttgaggccaggagttcgagaccagcctggccagtatggcgaaaccccatctctactaaaaatacaaaagttagctgagagtggtggtgtgtgcctgtaatcccagctacttgggaggctgagacaggagaattgctggaatctgggaggtggaggttgcagtgagctgagattg

SEQ ID NO: 1114 - protein, 287 aa, Homo sapiens
MLISFSIRASLFLLLSLKALVEVVVWGTGPMTSKVPFAPKPQSLGGQRVSAGLCPSQLSLTGFLHRSCSFNEHGYHLFQAMRLGVEEINNSTALLPNITLGYQLYDVCSDSANVYATLRVLSLPGQHHIELQGDLLHYSPTVLAVIGPDSTNRAATTAALLSPFLVPMVSWSLRPLPISLQASLGWGMWARAAVPPKAACPLDLLGGHCSLVTSQGSLPSVVPAPAFLSFQSCFQIPASTLMGKPILLGNYCHSAVPLLPSTSLLPPEVPLPLLGMDILDGRCGSCL

SEQ ID NO: 1115 - DNA, 922 bp, Homo sapiens
  source (1)..(922)
  CDS (201)..(722)
aaccagtgccaaaacttgcataccacggatgcctggctaatgcctcaggcaacttgctgggtttctgaactaggtttgcgccattggtccaggaagctggggagagatgtggctggctcattaatcctcacagatcagagagatcctgctggagccatacaaagtgcagatgtcttttgtgatctgtaaaacaagtcctcatggggaaggtaacttggatgcctgtgaaggctgggtccacgtcttcagaatctcacaggtgcaggtgggttcctgaagatcaccacctgtgtcagaaaaaaactctatccaaactgcatttttcctctactctcacaccacaacagtcaacacagaagaagacttctgtgaccaaatgtgtgggggtggacaccagctgggtgtcctgcaattcaatttcaacactatctacctggagatggcatcacatcccagggcttgagaactcagtctgcaagactatctcccccaatgctagtcacaagtctgagcctctggaacttctgagtcactggcttcaatttggggttcccatgaccccctctttgggtttgtttttttgtttgtttgctttttgtttttttgtttttgacggagtctcactctgtctcccaggctggagtgcagttgcgggatctcggctcactgcaacctccgcctcccgggttcaagcgattctcctgcctcagcctcctgagtagctgggattacaggtgtgagtcaccatgtccggctaatttttgtatttttagtagagacggggtttcaccatgttggccaggctggtctcgaacacctgacctcaagtaatccacccgccttggcctgccaaagtgctagaattacaggtatgaggcacgatgcccagcctgggtttgattaatatgttggaatggctcac

SEQ ID NO: 1116 - protein, 173 aa, Homo sapiens [sequence omitted]

SEQ ID NO: 1117 - DNA, 1171 bp, Homo sapiens
  source (1)..(1171)
  CDS (201)..(971)
caagctgggcggcagggcattgagcctcgcgtttcaatttctgttcagttctcctgtaatggaaaattgctttgcacaaagctaaagtgttacagttctttccagcgcccctcccccgcccctccccccgaccggcagccttcggatcagaggacagagcccgcaggaaggtgaaaggagggtggttgtggcttcttactatgtcccttgcttcaggccctggccctgggtggttactcttttcctttggaatggggctggtatcagggtcaaagtgtccaaataattgtctgtgtcaagcccaagaagtaatctgcacagggaagcagttaaccgaatacccccttgacatacccctgaacacccggaggctgttcctgaacgagaacagaatcactagtttgccagcaatgcatctaggactcctcagtgaccttgtttatttggactgtcagaacaaccggattcgagaggtgatggattataccttcatcggggtcttcaaactcatctaccttgacctcagctccaacaacctaacctcgatctccccattcactttctcggtgctcagcaacctggtgcagctgaacattgccaacaaccctcacctgttatcgcttcacaagttcacctttgccaacaccacctctttgaggtacctggacctcagaaataccggcttgcagaccctggacagtgctgccttataccacctcactactctggagaccctgtttctgagtggaaacccctggaagtgcaactgctctttcctggacttcgccatcttcttaatagtgttccatatggacccctcaggtgagggcttgattgggtgtggggaagaggatgtgattgaagtggctccagaaaaggtgaactcaaaagatggtcagaatgggagaaaaagttgggtgaagctgattgaatgcattcttattactctgcagggcccacccttgggttgactggagtagcagtaagaaaaagttctgaaataggaattcaaagagctgagttctggtcccaaactcagcacttaccagttggctacccttgaaaatgtcaccatttctctgagcctcagttttctaatccataaagtggggacaataatattacctaaggcacagagttgcatcaaatatatgatgtgtgtagaaatgat

SEQ ID NO: 1118 - protein, 256 aa, Homo sapiens [sequence omitted]

SEQ ID NO: 1119 - DNA, 862 bp, Homo sapiens
  source (1)..(862)
  CDS (201)..(662)
tatatgtctaactagcaatactgttagcttatccaacagaataattgacaacataagttattataattactaaatttgacaggataactttatatgttgcaaaatgactcacatagtatattttatttaaccagcctaatttcaaggctgtttagttgcttgaaaagaaggtttttatttgttctttgcatgtacttagaatgttgactgtgttttatgagccaacaagtgaaaccgctgaaaatatggatccagagaatcagacaatggtgactgagttttatttctctgattttcctcaatctaagaatggcagcctcttattcttcattcctatgctctttatttatatattcattcttgttggaaatttcatgattttctttgctgtccaaccggacccccatctccataatcctatgtacagttttatcagtgtcttctccttcctggagatttggtacaccaccgtgactatccccaagatgctctccaaccttctcagtgaacagaaaaccatctctttcataggttgcctcctgcagatgtacttcttccactcactcggggtcacagaagccctagtcctcacagtgatggccattgacaggtgtgtagccatctgcaacccccttcgctatgcaatcactatgtccccttgactgtgcatccagctctccactggctcttgcatttttggcttcctcatgttactgccagagattgtgtgcatttccactcttccattctgtggcgccaaccaaattcatcaactcttttgtgactttgaacctgtgctgcagttggcctgcacagatacgtaaataattctggttgaagatgtgatccgtgctatttccat

SEQ ID NO: 1120 - protein, 153 aa, Homo sapiens [sequence omitted]

SEQ ID NO: 1121 - DNA, 922 bp, Homo sapiens
  source (1)..(922)
  CDS (201)..(722)
tggtcattgtacccaaaatgcttaccaacctgctatccgcaattccaactatttctttctctggatgtgtggtccagctctatttatttgtgggcttggcttgtaccaactgttttctcattgctgtgatgggctacgatcgctatgttgccatctgcaacccccttaactacacactcattgtcagctgagccacctgcatgcagctggttctagcctccagcttttgtggcttcctgacttctgtgattgtcaatatcctggtgttcagtgtgctcctctgtgcctccaatcggatcaaccactttttctgtgacatttcccctgtcataaaactgggctgcacagacaccaacctgaaggagatggtcatctttttcctcagcattctggtattgctggttccccttgtgttgatattcatctcctacatcttcatagtttccaccatcctcaagatctcctcagtggaaggacagtgcaaagccttcgccacctgtgcttcccacctcacagtggtcgtcgtccactatggctgtgcttcctttatctacttgaggcccacatccctgtactcttcagataaggaccggctcgtggcagtgacttatactgtgattactccactactcaacccccttgtctatacactgagaaataaagaagtaaagatggctctgagaaaggttctgggtagatgcttaaattccaaaactgtatgagtgggctgataaggcagtaaattacattcatgaaagtttcctaggtagcacttcagatctataaacagattcgtccttttcttaagactccttgacaaaaaaaaaaaaaaaaaagagagagagagagaaaagaaaagaaataaggactttaggtgaccttgattgtttatatcaaaaaatttttttcatgttagcctgta

SEQ ID NO: 1122 - protein, 173 aa, Homo sapiens [sequence omitted]

SEQ ID NO: 1123 - DNA, 910 bp, Homo sapiens
  source (1)..(910)
  CDS (201)..(710)
gactctcagaggatccagaactgcagccactcctcactttgctgtccctgtccctgtccatgtatctggtcacggtgctgaggaacctgctcagcatcctggctgtcagctctgactcccccctccacacccccatgtacttcttcctctccaacctgtgctgggctgacatcggtttcacctaggccacagtccccaagatgattgtggacatgcagtcgcatagcagagtcatctctcatgcggtctgcctgatacagatgtctttattagtcctttttgcatgtatagaaggcatgctcctgactgtgatggcctatgactgctttgtagccatctgttgccctctgcactacccagtcatcgtgaatcctcacctctgtgtcttcttcgttttggtgtcctttctccttagcttgttggattcccagctgcacagttggattgtgttacaattcaccatcatcaagaatgtggaaatctctaattctgtctgtgacccctctcatcttctcaaacttgcttgttctgacagcgtcatcaatagcatattcatatatttcgatagtactatgtttggttttcttcccatttcagggatcctatggtcttactataaaatcgtcccctccattctcaggatttcatcgtcagatgggaagtataaagccttctccacctgtgcctctcacctagcagttgtttgctgattttatggaacaggcattggcatgtacctgacttcagctgtgtcaccaccccccaggaatggtgtggtggcgtcagtgatgtacgctgtggtcacccccatgctgaaccttttcatctacagcctgagaaacagggacatacaaagtgccctgcggaggctacgcagcagaacagtcgaatctcatgatctgttccatcg

SEQ ID NO: 1124 - protein, 169 aa, Homo sapiens
MIVDMQSHSRVISHAVCLIQMSLLVLFACIEGMLLTVMAYDCFVAICCPLHYPVIVNPHLCVFFVLVSFLLSLLDSQLHSWIVLQFTIIKNVEISNSVCDPSHLLKLACSDSVINSIFIYFDSTMFGFLPISGILWSYYKIVPSILRISSSDGKYKAFSTCASHLAVVC

SEQ ID NO: 1125 - DNA, 1015 bp, Homo sapiens
  source (1)..(1015)
  CDS (201)..(815)
ctcctcgaactctcagaggatccagaactgcagccggtcatcgctgggctgttcctgtccatgtgcctggtcacggtgctggagaaactgctcatcatcatggcagtcagccctgacttccacctccacacccccatgtacttcttcctctccaacctgtccttgcctgacatcggtttcacctccacacggtccccaagatgattgtggacatccagtctcacagcagagtcatctcctatgcaggctgcctgactcagatgtctctctttgccatttttggaggcatggaagagagacatgctcctgagcgtgatggcctacgaccagtttgtagccatctgtcaccctccatatcgttcagccatcttgaacccgtgtttctgtggcttccaagatttgttgtccttgtttttttttctttttttttttttttcctcaggcttttagactcccagctgcataacttgattgccttacaaatgacctgcttcaaggatgtggaaatttctaatgtcttctgggaaccttctcaactcccccatcttgcatgttgtgacaccttcaccaggaacatcaacctgtatttccctgctgccgtattgggttttcttcccatctcggggacgcttttctcttactgtaaaattgtttcctccattctgagggtttcatcatcaggtgggaagtataaaccttctccacctgtgggtctcacctgtctgctgtttgctgattttatggaacaggcgttggagggtatctcggttcagatgtgtcatcttccccgagaaagagtgcagtggcctcagtgatgtatacggtggtcacccccatgctgaaccccttcatctacagcctgagaaacagggatatgaaaagtgtcctgcggcggccgcacagcagcacggtctaatctcaatatcttcttatctgttccattccttttgtagggtgggttaaaaaaggcagcaaggtcaaataagaatgacatcacagggtgaacacccactgc

SEQ ID NO: 1126 - protein, 204 aa, Homo sapiens
MIVDIQSHSRVISYAGCLTQMSLFAIFGGMEERHAPERDGLRPVCSHLSPSISFSHLEPVFLWLPRFVVLVFFSFFFFFLRLLDSQLHNLIALQMTCFKDVEISNVFWEPSQLPHLACCDTFTRNINLYFPAAVLGFLPISGTLFSYCKIVSSILRVSSSGGKYKPSPPVGLTCLLFADFMEQALEGISVQMCHLPRERVQWPQ

SEQ ID NO: 1127 - DNA, 1837 bp, Homo sapiens
  source (1)..(1837)
  CDS (201)..(1637)
  modified_base (1709)..(1808): a, t, c, g, unknown or other
aaatgcccctgttgttggtaaaccgacggtgatttattttaatagcttcacaatgtgcatctgtcttttttttaatatcgtaggtttccatttaattacgcagctgaaaggcatgagtgtggtgctggtgctacttcctacactgctgcttgttatgctcacgggtgctcagagagcttgcccaaagaactgcagatgtgatggcaaaattgtgtactgtgagtctcactgctttcgcagatatccctgagaacatttctggagggtcacaaggcttatcattaaggttcaacagcattcagaagctcaaatccaatcagtttgccggccttaaccagcttatatggctttatcttgaccataattacattagctcagtggatgaagatgcatttcaagggatccgtagactgaaagaattaattctaagctccaacaaaattacttatctgcacaataaaacatttcacccagttcccaatctccgcaatctggacctctcctacaataagcttcagacattgcaatctgaacaatttaaaggccttcggaaactcatcattttgcacttgagatctaactcactaaagactgtgcccataagagtttttcaagactgtcggaatcttgattttttggatttgggttacaatcgtcttcgaagcttgtcccgaaatgcatttgctggcctcttgaagttaaaggagctccacctggagcacaaccagttttccaagatcaactttgctcattttccacgtctcttcaacctccgctcaatttacttacaatggaacaggattcgctccattagccaaggtttgacatggacttggagttccttacacaacttggatttatcagggaatgacatccaaggaattgagccgggcacatttaaatgcctccccaatttacaaaaattgaatttggattccaacaagctcaccaatatctcacaggaaactgtcaatgcgtggatatcattaatatccatcacattgtctggaaatatgtgggaatgcagtcggagcatttgtcctttattttattggcttaagaatttcaaaggaaataaggaaagcaccatgatatgtgcgggacctaagcacatccagggtgaaaaggttagtgatgcagtggaaacatataatatctgttctgaagtccaggtggtcaacacagaaagatcacacctggtgccccaaactccccagaaacctctgattatccctagacctaccatcttcaaacctgacgtcacccaatccacctttgaaacaccaagcccttccccagggtttcagattcctggcgcagagcaagagtatgagcatgtttcatttcacaaaattattgccgggagtgtggctctctttctctcagtggccatgatcctcttggtgatctatgtgtcttggaaacgctacccagccagcatgaaacaactccagcaacactctcttatgaagaggcggcggaaaaaggccagagagtctgaaagacaaatgaattcccctttacaggagtattatgtggactacaagcctacaaactctgagaccatggatatatcggttaatggatctgggctctgcacatataccatctctggctccagggaatgtgaggtatgaaccatgatcctcctaaaagcatttctactgcggggccggagcagtaatgattgcaccctagaggtgtctctnnnnnnnnnnnnnnnnnnnnnnnnnnnnnnnnnnnnnnnnnnnnnnnnnnnnnnnnnnnnnnnnnnnnnnnnnnnnnnnnnnnnnnnnnnnnnnnnnnnngaggtcgactctctagaggatcccctttc

SEQ ID NO: 1128 - protein, 478 aa, Homo sapiens
MAKLCTVSLTAFADIPENISGGSQGLSLRFNSIQKLKSNQFAGLNQLIWLYLDHNYISSVDEDAFQGIRRLKELILSSNKITYLHNKTFHPVPNLRNLDLSYNKLQTLQSEQFKGLRKLIILHLRSNSLKTVPIRVFQDCRNLDFLDLGYNRLRSLSRNAFAGLLKLKELHLEHNQFSKINFAHFPRLFNLRSIYLQWNRIRSISQGLTWTWSSLHNLDLSGNDIQGIEPGTFKCLPNLQKLNLDSNKLTNISQETVNAWISLISITLSGNMWECSRSICPLFYWLKNFKGNKESTMICAGPKHIQGEKVSDAVETYNICSEVQVVNTERSHLVPQTPQKPLIIPRPTIFKPDVTQSTFETPSPSPGFQIPGAEQEYEHVSFHKIIAGSVALFLSVAMILLVIYVSWKRYPASMKQLQQHSLMKRRRKKARESERQMNSPLQEYYVDYKPTNSETMDISVNGSGLCTYTISGSRECEV

SEQ ID NO: 1129 - DNA, 979 bp, Homo sapiens
  source (1)..(979)
  CDS (201)..(779)
cttgtgaattgcttgcatccaaaatatacacacagcattaagggctggtttttatcttttatttttccaaccttcttttcttcccaaggtgtccaagtcacacagagccacggaatctcacaggagcctgagaactcctcctcctgggactctcagaggatccagaactgcagcccatcctcgctgggctgtccctgtccatgtatctggtcacggtgctgaggaacctcctcatcagcctggctgtcagctctgactcccacctccacaccccaatgtgcttcttcctctccaacctgtgctgggctgacatcggtttcacctcggccacggttcccaagatgattgtggacatgcggtcgcatagcggagtcatctcttatgcggactgcctgacacggatgtctttcttggtcctttttgcatgtgtagaagacatgctcctgactgtgatggcctatgactgctttgtagccatctgtcgccctctgcactacccagtcatcgtgaatcctcacctctgtgtcttcttagtttcggtgtccttttccttagcctgttggattcccagctgcgcagttggattgtgttgcaattcaccttcttcaagaatgtggaaatctctaattttgtctgtgacccatctcaacctctcaagcttgcctgttctgacagcatcatcgatagcatgttcatatatttcgatagtactatgtttggttttcttcccatttcagggatccttttgtcttactataaaattgtcccctccattctaaggatttcatcgtcagatgggtagtataaagccttctccgcctgtggctctcacctgccagttgtttgcttattttatggaacaggcattggcgtgtacctgacttcagctgtggcaccacccctcaggaatggtgtggtggcgtcagtgacgtatgctgtggtcacccccatgctgaaccctttcatctacagcctgaga

SEQ ID NO: 1130 - protein, 192 aa, Homo sapiens
MYLVTVLRNLLISLAVSSDSHLHTPMCFFLSNLCWADIGFTSATVPKMIVDMRSHSGVISYADCLTRMSFLVLFACVEDMLLTVMAYDCFVAICRPLHYPVIVNPHLCVFLVSVSFSLACWIPSCAVGLCCNSPSSRMWKSLILSVTHLNLSSLPVLTASSIACSYISIVLCLVFFPFQGSFCLTIKLSPPF

SEQ ID NO: 1131 - DNA, 919 bp, Homo sapiens
  source (1)..(919)
  CDS (201)..(719)
  modified_base (704): a, t, c, g, unknown or other
  modified_base (734)..(833): a, t, c, g, unknown or other
ataacttcatcacatactctctccctcttggtttatcagatataaaatgggcaaccaaatgtatcctcgtgtaatctgttagtgacagggaacgtatgacaattttgaaagcagtgatataactctaggtaaatgctatgtctactaattatagtttcttaattttcatagctatattatgaaaagagtaaattgaagaaatggaaactgcaaattacaccaaggtgacagaatttgttctcactggcctatcccagactccagaggtccaactagtcctatttgttatatttctatccttctatttgttcatcctaccaggaaatatccttatcatttgcaccatcagtctagaccctcatctgacctctcctatgtatttcctgttggctaatctggccttccttgatatttggtactcttccattacagcccctgaaatgctcatagacttctttgtggagaggaagataatttcttttgatggatgcattgcacagctcttcttcttacactttgctggggcttcggagatgttcttgctcacagtgatggcctttgacctctacactgctatctgccgacccctccactatgctaccatcatgaatcaacgtctctgctgtatcctggtggctctctcctggagggggggcttcattcattctatcatacaggtggctctcattgttcgacttcctttnctgtgggcccaatgagttagacagttactnnnnnnnnnnnnnnnnnnnnnnnnnnnnnnnnnnnnnnnnnnnnnnnnnnnnnnnnnnnnnnnnnnnnnnnnnnnnnnnnnnnnnnnnnnnnnnnnnnnntgggcccaatgagttagacagttacttctgtgacatcacacaggttgtccggattgcctgtgccaacaccttcccagaggagttag

SEQ ID NO: 1132 - protein, 172 aa, Homo sapiens
  MOD_RES (168): Variable amino acid
METANYTKVTEFVLTGLSQTPEVQLVLFVIFLSFYLFILPGNILIICTISLDPHLTSPMYFLLANLAFLDIWYSSITAPEMLIDFFVERKIISFDGCIAQLFFLHFAGASEMFLLTVMAFDLYTAICRPLHYATIMNQRLCCILVALSWRGGFIHSIIQVALIVRLPXLWAQ

SEQ ID NO: 1133 - DNA, 1024 bp, Homo sapiens
  source (1)..(1024)
  CDS (201)..(824)
cttcacagaaagagagcaaaaatccaaaagtttatacaccaaagtgcatatcttgctttccaccattttgcttcatatcctgcttaccccaaaggatttggaaacatttttacatttatccacataggtgtcttaattttcctaaagaaacatccccactctccagaggtgccaaataaatatttattgaaatccatgtcatgatgaattttctgcctgccaaaaataatcattactttattgcagtaggagtgggatgctttaaatttagagacacgggtttttctggaagaggacttcccatgtggattcagcttgtggattgtacgtcaattgtcttttttcttggaaataaattaatttgctcatttaaaaaaatgatgcaggaagcatacgagtactttttctctgagcaacttggctttttaagtttctgttatgcttcagtcattacatccaaaatgtttggaagtttcttgtacaaacaaaaaaaattaaccttcaatgcacataggctgctctctcaccttcatgaccaccgagtgcttgctctagctttcatggcctgtgatcaatacctggtcatttgtaatcctcctttgtatatggtcaccatgtcccccccgcaaggagtctgcattcagcttatgcctgcctcctatagctatagcttcctgatgacactttcacattatcctcagcctttgtctcccttattgcccctctgtatcattgatgttcaatggaagcctgttccttatgtacttaatgctcagaaaattctcttgacacagacaggatggcctctgtcttctacacagtagtcattcccatgttgagccctttgatctggagcctcaggaacaaggatgtgaaagatgccctgaggaaagtcattgtcaacagaaaccaggcattattttgttcataaaattaagaaacaaacttgaaaaaacaaaggcatacattccttctgatctgttttctccctgttaataaaattcatattgatctttgttgtcaa

SEQ ID NO: 1134 - protein, 207 aa, Homo sapiens
MMNFLPAKNNHYFIAVGVGCFKFRDTGFSGRGLPMWIQLVDCTSIVFFLGNKLICSFKKMMQEAYEYFFSEQLGFLSFCYASVITSKMFGSFLYKQKKLTFNAHRLLSHLHDHRVLALAFMACDQYLVICNPPLYMVTMSPPQGVCIQLMPASYSYSFLMTLSHYPQPLSPLLPLCIIDVQWKPVPYVLNAQKILLTQTGWPLSSTQ

SEQ ID NO: 1135 - DNA, 877 bp, Homo sapiens
  source (1)..(877)
  CDS (201)..(677)
ctgtattttctagcaattatgaatgtgctatatatgatgatctggctcttggaacgttcttgaagctagtgtctctaaggcaggtgtgtacagcaagacgtgaataacacagcaatggatgttgaaagcattataaggcaattgaccttgtcagaactacaaaatattgtggagtgtggattgctcggaaatctgaaaacatgacttgtgtattgcttatatccaaaatgcagacacaatgctgggtattggtttacttgtttccgattttgcaaccatcttttccaggcaaaagagggttgtatccaaacgatacagacccacagagtctaacagatgtctctatattcctcctcctcgaactctcagaggatccagaactgcaaccggtcgtcgctgggctgttcctgtccatgtgcctcgtcatggtgctggagaacctgctcatcatcctggacgtcagccctgactcccacctccccacccccatgtacttcttcctctccaacctgtccttgcctgacatcggtttcacctccaccacggtccccaagatgattgtggacatccagtctcacagcagagtcatctatgcaggctgcctgactgtgatgtctctctttgccatttttggaggcatggaagagagacatgctcctgagtgtgatggcctatgaccggtttgtagccatctgtcaccctctatatcgctcagccaccttgaacccgtgtttctgtggcttcctagatttgttgtcttttttttttttttccctcaggcttttagactcccagctgcacaacttgattgccttacaaatgacctgcttcaaggatgtggaaattcctaatttcttctgggaaccttctcaactcc

SEQ ID NO: 1136 - protein, 158 aa, Homo sapiens
MTCVLLISKMQTQCWVLVYLFPILQPSFPGKRGLYPNDTDPQSLTDVSIFLLLELSEDPELQPVVAGLFLSMCLVMVLENLLIILDVSPDSHLPTPMYFFLSNLSLPDIGFTSTTVPKMIVDIQSHSRVIYAGCLTVMSLFAIFGGMEERHAPECDGL

SEQ ID NO: 1137 - DNA, 970 bp, Homo sapiens
  source (1)..(970)
  CDS (201)..(770)
  modified_base (474)..(573): a, t, c, g, unknown or other
gtactttggtgtgaattagaaaaagctgtctcttcctcaagtcacgttcctcccactttgttggaacaagatagtctaccgttgttgtgcagggcacagcctacctaattagttctatgtggcagccctggggcttgtactcattctttgctcctctttaggtcctgaagcacctacggcatctaaactttacaaacaatatgggggagcaggtgacctttgatgagtgtggtgacctggtggggaactattccatcatcaactggcacctctccccagaggatggctccatcgtgtttaaggaagtcgggtattacaacgtctatgccaagaagggagaaagactcttcatcaacgaggagaaaatcctgtggagtgggttctccagggaggtaggtgctgtccatcagaaaaccagatgtctccaccaggggcaggaaactgtgctgggctttgggagggcctttggtttcnnnnnnnnnnnnnnnnnnnnnnnnnnnnnnnnnnnnnnnnnnnnnnnnnnnnnnnnnnnnnnnnnnnnnnnnnnnnnnnnnnnnnnnnnnnnnnnnnnnnataaccatacaagattaaacgagatcgttctaccacctagtctcctccgaatacccacgctgttgcgtgcgcgagggggctatcggcccgcgagggcgccctacgtgggggagagggtctcgaagcctcccctgtgggaaaagtcggggtttaaaaacgaaggcgggccggcccagggggcacttcaaggcatttaaactgtgtagctcaaccagtggtttagggccagggccagtgtaccccgtcagggggaaaaaaagggttggttcccttccccgaccccaaggcagtgagctccggccccgaaagctttttccttcccttgagaggagggaaaagtgaataaaccttgttcttgtttctttgttccaaggctaagccacagtaggctagggcc

SEQ ID NO: 1138 - protein, 189 aa, Homo sapiens
  MOD_RES (92)..(125): Variable amino acid
MGEQVTFDECGDLVGNYSIINWHLSPEDGSIVFKEVGYYNVYAKKGERLFINEEKILWSGFSREVGAVHQKTRCLHQGQETVLGFGRAFGFXXXXXXXXXXXXXXXXXXXXXXXXXXXXXXXXXXNHTRLNEIVLPPSLLRIPTLLRARGGYRPARAPYVGERVSKPPLWEKSGFKNEGGPAQGALQGI

SEQ ID NO: 1139 - DNA, 904 bp, Homo sapiens
  source (1)..(904)
  CDS (201)..(704)
  modified_base (468)..(469): a, t, c, g, unknown or other
  modified_base (594): a, t, c, g, unknown or other
  modified_base (650): a, t, c, g, unknown or other
  modified_base (691): a, t, c, g, unknown or other
  modified_base (699): a, t, c, g, unknown or other
  modified_base (797)..(896): a, t, c, g, unknown or other
tattgttgggttgattttatggccagacccagttttgaagttagcattgtgaagaatcatccattgggaattgggatgctccctcaaagactgaaaggtgcttaagtgctcactctggagtggaacagatgctgcttttccttaccctttctttcatcctgtatacagtgaacagcatagttgataaatgagaccaaggcatgctcagaaagccacctccacaacagcctggaggctcactcagcacctcttcactcactcactcactcattcaccatgttcttggttctctccaggtcagttatgcctcctccagcagactcctcagcaacaagaatcaattcaagtctttcctccgaaccatccccaatgatgagcaccaggccactgccatggcagacatcatcgagtatttccgctggaactgggtgggcacaattgcagctgatgacgactatgggcggccgnngattgagaaattccgagaggaagctgaggaaagggatatctgcatcgacttcagtgaactcatctcccagtactctgatgaggaagagatccagcatgtggtagaggtgattcaaaattcacggncaagtcatcgtggtttctccagtggcccagatctgagccctcatcaggagattgtnccgcgcatatcacggcaagatctgctggcagcgaggctggncagctctncctgacgcatgcctagacttcacgggttggcgaccattgaattgtttgagctggcagaccagctccggattctgaaagtcttcaggagcgtccatggnnnnnnnnnnnnnnnnnnnnnnnnnnnnnnnnnnnnnnnnnnnnnnnnnnnnnnnnnnnnnnnnnnnnnnnnnnnnnnnnnnnnnnnnnnnnnnnnnnnnccactttc

SEQ ID NO: 1140 - protein, 167 aa, Homo sapiens
  MOD_RES (90): Variable amino acid
  MOD_RES (132): Variable amino acid
  MOD_RES (150): Variable amino acid
  MOD_RES (164): Variable amino acid
  MOD_RES (167): Variable amino acid
MLRKPPPQQPGGSLSTSSLTHSLIHHVLGSLQVSYASSSRLLSNKNQFKSFLRTIPNDEHQATAMADIIEYFRWNWVGTIAADDDYGRPXIEKFREEAEERDICIDFSELISQYSDEEEIQHVVEVIQNSRXSHRGFSSGPDLSPHQEIXPRISRQDLLAARLXSSX

SEQ ID NO: 1141 - DNA, 862 bp, Homo sapiens
  source (1)..(862)
  CDS (201)..(662)
gtgtggaaggtatgggtgtggaaggtacgagtgtggtaggtatggctgcagaaagtcgtcccggtgctgcatggggagtggatccccgaagcatttggggtggctgaaaatgagaagaagggtagcaaaaagtgcggccggcatgcggggaatcctgtaggcaacgggagccagggaggactcagttttgcattgtacaaatggcatttaacaagtggtgcctggagcggtccgatttgcaggcagtgaggaggccaggagagcctgcgggtttccaagcaggaccaggggagggcgccaaggagtcggcagctgcgagaaatatttgggacaaggtttctcacactggagcccgagggcctctagggagtcctaggttaaattggaggagtcttcaagtttatctggagaaaggccgtcttaggaaacaagtctcattccctgaaaagggctttgcagttactcatcttcattgcgctggacttttgtctatttttttttttttttttttgagatggagttttcgctcttgttgcccaggctggagtgcagtggcgcgatctcagctcactggaacctcagcctcccgggttcaagcaattctcctgcctcagcctcccgagtggctgggattacaggcatgcgccaccacacccggctaatttttgtattttaagtagagacagggcttctccatgttggtcaggctggtctcgaactcctgacctcgtgatcctcccgcctcagcctcccaaagtgctgggattacaggcgtgagccaccgcacccagcatagacttttgtcttttaaccctgaaaaggattgagactaagagattgagaatcgtttgctggtattctg

SEQ ID NO: 1142 - protein, 153 aa, Homo sapiens
MAFNKWCLERSDLQAVRRPGEPAGFQAGPGEGAKESAAARNIWDKVSHTGARGPLGSPRLNWRSLQVYLEKGRLRKQVSFPEKGFAVTHLHCAGLLSIFFFFFLRWSFRSCCPGWSAVARSQLTGTSASRVQAILLPQPPEWLGLQACATTPG

SEQ ID NO: 1143 - DNA, 1003 bp, Homo sapiens
  source (1)..(1003)
  CDS (201)..(803)
  modified_base (675)..(774): a, t, c, g, unknown or other
taggagctcagtttcaagtattaaatatgtatattcttttttcaaatttgctgttttctaaattttgttgtggaagaatcaacttatgtacatcaacctgctcccccccttacatcaataaacacactatcctgtgatttcttgtagtaaaattgcatttataatagtgaaaataagtttgagagtattttcctaactaaatgaatatcacactttattcatttctttatgtcctcagattaaatgaagggaatagtactggaagaaatatagatgaaagaaagaaaatgcaaggagaaaacttcaccatttggagcatttttttcttggagggattttcccagtacccagggttagaagtggttctcttcgtcttcagccttgtaatgtatctgacaacgctcttgggcaacagcactcttattttgatcactatcctagattcacgccttaaaacccccatgtacttattccttggaaatctctctttcatggatatttgttacacatctgcctctgttcctactttgctggtgaacttgctgtcatcccagaaaaccattatcttttctgggtgtgctgtacagatgtatctgtcccttgccatgggctccacagagtgtgtgctcctggccgtgatggcatatgaccgttatgtggccatttgtaacccgnnnnnnnnnnnnnnnnnnnnnnnnnnnnnnnnnnnnnnnnnnnnnnnnnnnnnnnnnnnnnnnnnnnnnnnnnnnnnnnnnnnnnnnnnnnnnnnnnnnngagttattcagtccaaatgtgaacagtaacactttgtcttagacctttatttcaggttcaggggtacatgtgcaggtttgctatataggtaaattccatgtcacaggggtttggtgtacaaattattttgtcacccaggtaataagaataatacccgataggtagtattttgatcctcaccctcctcccaccctccttcctcaggtaagccccagtgtctgttgctccc

SEQ ID NO: 1144 - protein, 200 aa, Homo sapiens
  MOD_RES (159)..(192): Variable amino acid
MNITLYSFLYVLRLNEGNSTGRNIDERKKMQGENFTIWSIFFLEGFSQYPGLEVVLFVFSLVMYLTTLLGNSTLILITILDSRLKTPMYLFLGNLSFMDICYTSASVPTLLVNLLSSQKTIIFSGCAVQMYLSLAMGSTECVLLAVMAYDRYVAICNPXXXXXXXXXXXXXXXXXXXXXXXXXXXXXXXXXXVIQSKCEQ

SEQ ID NO: 1145 - DNA, 865 bp, Homo sapiens
  source (1)..(865)
  CDS (201)..(665)
ccaaaatatatgatttttttccattttttcattgtaacaaataccgtttcatcagttataggactgattaaaaaattgagagggttatgatcattttagggtttgcttcaacacctcttccccaatttcaactcataatgccattgcaaatgtttcctttcatttgttgcattttattttagaggacatgcagtgaggacatggaagaggaaaatgcaacattgctgacagagtttgttctcacaggacttttatatcaaccacagtggaaaatacccctgttcctgacattcttggtaatatatctcatcaccatcatggggaatcttggtctgattgctgtcatctggaaagaccctcaccttcagatcccaatgtacttactcctcgggaatttagcttttgtagatgcttggatatcatctacagtgactccaaagatgctgaataacttcttagctaagagtaagatggtatctctgcctgaaagcaaaatacagtttttttcgtttgcaatcagtgtaaccactgaatgttttctcttggcaacaatggcatatgatcgctatgtagccatatgcaaacctttactttatccagccattatgaccaatggactgtgcatccggctatgtaggtggtcttcttcatgctttaatccatgaaggatttttattcagactaaccttctgtaactccaacgtagtacaccacatttactgtgacattatcccattgtctaagatttcttgtactgattcttctattaattttctaatggtttttattttctcaggttcaattcaagttttcaccattgggactggtcttatatcttatacatttgtcctctttacaatcttga

SEQ ID NO: 1146 - protein, 154 aa, Homo sapiens [sequence omitted]

SEQ ID NO: 1147 - DNA, 925 bp, Homo sapiens
  source (1)..(925)
  CDS (201)..(725)
agaccctcaccttcatatttcaatgtacttattccttgggagtttagcttttgtggatacttggttatcatccacagtgactccgaagatgctgatcaacttcttagctaagagtaagatgatatctctctctgaatgcatggtacaattttttttcccttgcaatcagtgtaaccacagaatgttttatctcggcatcaatggcatatgatcgctatgcagacatatgcaaacctttactttatccagtcattatgaccaatgaactatgcatctggctatttgtcttgtcatttctaggtggcctttttcatgctttaatccatgaaggttttttattcagactaaccttctgtaactccaacatgatacaacatttttactgtgacattatcccattgttaaagatttcatgtactgattcttgtattaattttctaatgttttttattttctcaggttcaattcaagttttaaccattgggattgtttttgtatcttatatgtttgttctctttacaatcttaaaaaagaagtctaacaaaggcataagggaagccttttccacctgtggagcccattacatacctctctctttatgttatggcctccttctcttcatgtatgtgggccctgcagctccacaagcagataatcaagatatgatggagtatctattttaccctatcattgtgcgtttgttaaaccatattactacagcctgagaaataagcaataataggttcactcacaaaaatgttaaaataaaatatttgcattgcatacttatctctcttctctattcaataaaatagttacaaaattatgctagtttgaggtacctaagtttttgccaactttcaaatttttttgtaattataactgtcctagcactataatgacttaacatgttagaacctaatta

SEQ ID NO: 1148 - protein, 174 aa, Homo sapiens [sequence omitted]

SEQ ID NO: 1149 - DNA, 922 bp, Homo sapiens
  source (1)..(922)
  CDS (201)..(722)
tcctcctcctgggactctcagaggatccagaactgcagccggtcctcgctttgctgtccctgtccctgtccatgtatatggtcacggtgctgaggaacctgctcagcatcctggctgtcagctctgactccccgctccacacccccatgtgcttcttcctctccaaactgtgctgagctgacatcggtttcaccttggccatggttcccaagatgattgtgaacatgcagtcgcatagcagagtcatctcttatgagggctgcctgacacggatgtctttctttgtcctttttgcatgtatggaagacatgctcctgactgtgatggcctatgactgctttgtagccatctgtcgccctctgcactacccagtcatcgtgaatcctcacctctgtgtcttcttcgtcttggtgtcctttttccttagcccgttggattcccagctgcacagttggattgtgttactattcaccatcatcaagaatgtggaaatcactaattttgtctgtgaaccctctcaacttctcaaccttgcttgttctgacagcgtcatcaataacatattcatatatttcgatagtactatgtttggttttcttcccatttcagggatccttttgtcttactataaaattgtcccctccattctaaggatgtcatcgtcagatgggaaatataaaggcttctccacctgtggctcttacctggcagttgtttgctgatttgatggaacaggcattggcatgtacctgacttcagctgtgtcaccaccccccaggaatggtgtggtggcgtcagtgatgtatgctgtggtcacccccatgctgaaccttttcatctacagcctaggaaagagggatatacaaagtgtcctgcggaggctgtgcagcagaacagtcgaatctcatgatatgttccatcc

SEQ ID NO: 1150 - protein, 173 aa, Homo sapiens
MVPKMIVNMQSHSRVISYEGCLTRMSFFVLFACMEDMLLTVMAYDCFVAICRPLHYPVIVNPHLCVFFVLVSFFLSPLDSQLHSWIVLLFTIIKNVEITNFVCEPSQLLNLACSDSVINNIFIYFDSTMFGFLPISGILLSYYKIVPSILRMSSSDGKYKGFSTCGSYLAVVC

SEQ ID NO: 1151 - DNA, 853 bp, Homo sapiens
  source (1)..(853)
  CDS (201)..(653)
tgttatatatgatgatctggttttggaacgttcttgaatctagtgtctctaaggcaggtgtgtacagcaagacgtgaataacacagcaatcaatgttgaaagcattataaggcaattgagtttgtcagaactacaaatattactgagtgtgggttgctctgaaatctgaaaacattacttgtgaattgcttctatccaaaatgcagacacaatgctgggtattggtttacttgtttccgatttttcaaccctcttttccaggcaaaagagggttgtatccaaacgatacagacccacagagtctaacagatgtctctatattcctcctcctcgaactctcagaggatccagaactgcagccggtcctcgctgggctgttcctgtccatgtgcctggtcacggtgctcaggaacctgctcatcatcctggccatcagccctgactcccacctccacacccccatgtacttcttcctctccaacctgtcctttcctgacagtcgtttcacctccaccacagtccccaagatgattgtggacatccagtctcacagcagagtcatctcctatgcaggctgcctgactcagatgtctctctttgccatttttggagacatggaagagagacatgttcctgagtgtggtggcctatgaccggtttgtagccatctgtcaccctttatatcgttcagccatcttaaacccctgtttctgtggcttcctagattcgttgtccttgtttttttttttttttttttctcagtcttttagactcccagctgcacaacttgattgccttacaaatgacctgcttcaaggatgtggaaattcctaatttcttctgggaaccttct

SEQ ID NO: 1152 - protein, 150 aa, Homo sapiens
MQTQCWVLVYLFPIFQPSFPGKRGLYPNDTDPQSLTDVSIFLLLELSEDPELQPVLAGLFLSMCLVTVLRNLLIILAISPDSHLHTPMYFFLSNLSFPDSRFTSTTVPKMIVDIQSHSRVISYAGCLTQMSLFAIFGDMEERHVPECGGL

SEQ ID NO: 1153 - DNA, 904 bp, Homo sapiens
  source (1)..(904)
  CDS (201)..(704)
gttgcacacgcgtaaattgtgggccgccgctgccgggccgattgagaggacagctcccgcaatctgcggtcgtatccgttccgtcaatgttttatttctgcttgtttttcaatgttgttgcacaaataacgacacctgaaaacaaaaccaggtatacttattattaaaaagtgttcgtcctgtgaatccgcaacattgggatgctcaatttatttgcctttataaagaccaaaacacgaagctattttttatttttatttatttattattttttgaaatggagtctcgctctgtcgcccaggctggagtgcagtggagcgatctcggctcactgcaacctccgtctcccgggttcaagcgattctcctgcctcggcctcccaaatagctgggattacaggcaagggtcaccacgcccgggtaatttttgtatttttagtagagacggggtttcaccacgttggccaggctggtctcgaactgctgacctcaggtgatccacccgcctcggcctcccaaagtgctgggattacaggcgtgagccacgcgcccggccggaagctcctttctgtttttgttttgttttgtttttttgagacaggctcgctctgtcgcccaggctggagtgcagtggcgcgatctcggctcactgcaacctccgcctcccgcgttcaagccattctcctgcctcagcctcccgagtagctgggactacaggcgcccgccaccacgcctggctaattttttgtatttttagcagagatgggggtttcaccgtgtaagccaggatggtctcgatctcctgacctcatgatccgcccgcctcggcctcccaaattgctgggattacaggcgtgagccaccgcgcccgaccccggaagctcctttttaagtgtgatttatta

SEQ ID NO: 1154 - protein, 167 aa, Homo sapiens
MLNLFAFIKTKTRSYFLFLFIYYFLKWSLALSPRLECSGAISAHCNLRLPGSSDSPASASQIAGITGKGHHARVIFVFLVETGFHHVGQAGLELLTSGDPPASASQSAGITGVSHAPGRKLLSVFVLFCFFETGSLCRPGWSAVARSRLTATSASRVQAILLPQPPE

SEQ ID NO: 1155 - DNA, 883 bp, Homo sapiens
  source (1)..(883)
  CDS (201)..(683)
agacattgtatgagttacatcttgctgctgtaactaattaccaaaaccttagtggcttaaaacaacacaaatttacgttgttatcatggaggagatcaaaagtcaataattggttccactgggataaaatcaaggagttggtcaggctccatcatttctggaagctccagggaagaacaattgccttttccagcttctagatgccacttacattccttggctggtggccattgcctttgccatcaaagcagcatcataacatcttacagttctcttgttttttttttttcccgagatggagtctcactctgtcaccaggctggagtgcagtggtgcgatctcggctcaccgccacctcttcctcccgagttcaagcaattctcctgcctcagcctcccgagtatctgagactacaggcgcaggcaccaggcccagctaatttttgtatttttggtagagatagggtgtcaccatattgtcgggatggtctggatctcttgacctcgcaaaacgcccacctgggcctcccaaagtgcggggattataggcatgagccaccgcgcccggcccttacagttctcttgactttgaccactgcgcctcccttttctccatgtaatgtaattgtctcttcaaataaaatacgcccacctggaaagtccaagataatctctttattttaaagtcaactgattagcaatctgaatttcatctctaatcttaattgcccttttccaggtaacataatgtattcacaggttctggacactagcgcatgcacattttgggaagaatgttaacctgtgcaccgtacacattttctaaaaacgtaaactgaaagttacctacagagtttgactatggaaaaagtggtgaatatcca

SEQ ID NO: 1156 - protein, 160 aa, Homo sapiens
MPLTFLGWWPLPLPSKQHHNILQFSCFFFFPRWSLTLSPGWSAVVRSRLTATSSSRVQAILLPQPPEYLRLQAQAPGPANFCIFGRDRVSPYCRDGLDLLTSQNAHLGLPKCGDYRHEPPRPALTVLLTLTTAPPFSPCNVIVSSNKIRPPGKSKIISLF

SEQ ID NO: 1157 - DNA, 877 bp, Homo sapiens
  source (1)..(877)
  CDS (201)..(677)
attagaaacaaatttaattttataattggatttaagaaccacaaacccaaaacagtttggagctccttaatacaagttaaaaataccctagtggtattgaaagtagcacagaatacaatttatgttataatgatgttcctggtttattctaaaatttgaccatatttaatatttctgtttaaccacgagagaaacggtcaatgctaatgattcataccctgagaatcagtcacctattgatggaaatagccaacttgggagagagacagactagattttactttaaagtcagctatattttatatcagtgccctccaataaataatttatttttcttttccctgccttccccgccttctctgccttccctgccttccctttcttccttttctttctttccttctttttcttttctttttctttctttctttctctttctttctctctccccttccttccttccttccttccttccttccttccttccttccttccttccttcctttctttctttcttccttccttccttctctttctttctttttctttctttcaactgggtctctttctgtcacccagcctggactgcagtggcacaatctcagctcactgcaacctccagctccagggttcaagcaattctcacgtgtcagcctcccaagcagctgggattataggcacctgccaccatgctgggctaatttttgtatttttagtagagacagggtttcaccatattgcctaggctagtcttggactcccggcctaagtgatcttcccacatcggcctcccaaagtgccaggattacaggtgtgagccaccatgcctggccatatacgtaatttataatagacacattaagtaaaatgaagtaag

SEQ ID NO: 1158 - protein, 158 aa, Homo sapiens
MLMIHTLRISHLLMEIANLGERQTRFYFKVSYILYQCPPINNLFFFSLPSPPSLPSLPSLSSFSFFPSFSFLFLSFFLFLSLSPSFLPSFLPSFLPSFLPSFLSFFLPSFSFFLFLSFNWVSFCHPAWTAVAQSQLTATSSSRVQAILTCQPPKQLGL

SEQ ID NO: 1159 - DNA, 1039 bp, Homo sapiens
  source (1)..(1039)
  CDS (201)..(839)
  modified_base (270): a, t, c, g, unknown or other
  modified_base (294)..(393): a, t, c, g, unknown or other
tgaaaatgttccttgtgaattgcatccagcattaagggctggtttttatcttttatttttccaatcatctttccttcttaagttgtccaagagacacagagccacggaatctcacagatgtctgagaattcgtcctcctgggactctcagaggatccagaactgcagccggtcctcgctttgctgtccctgtccctgtccatgtatctggtcacggtgctgaggaacctgctcagcatcctggctgtccgctctgactccctcttcacancctcatgtacttctccttctcaannnnnnnnnnnnnnnnnnnnnnnnnnnnnnnnnnnnnnnnnnnnnnnnnnnnnnnnnnnnnnnnnnnnnnnnnnnnnnnnnnnnnnnnnnnnnnnnnnnnctttcttggtcctttttgcatgtatagaagacatgttcctgactgtgatggcctatgactgctttatagccatctgtcatcctctgcactacccagtcatcgtgaatcctcacctctgtgtcttcttcattttggtgtcctttttccttagcctgttggattcccagctgcatagctggattgtgttacaattcaccatcatcaagaatgtggaagtctctaattttgtctgtgacccctctcaacttctcaaacttgcctgttctgacagcgtcatcaatagcatattcatatatttcgataatactatgtttggttttcttcccatttcagggatcctttggtcttactataaaatcgtcccctacattctcaggatttcatcgtcagatgggaagtataaagccttcgccacctgtggctctcacctggcagttgcttgctgattttatggaacaggcattggcatgtacctgacttcagctgtgtcaccaccccccaggaatggtgtggtggcatcagtgatgtacgctgtggtcacccccatgctgaacctttttatctacagcctgagaaacagggacatacaaagtgccctgcggaggctgcgccccagaacagtcgaatctcatgatctgttccatcc

SEQ ID NO: 1160 - protein, 212 aa, Homo sapiens
  MOD_RES (24): Variable amino acid
  MOD_RES (32)..(65): Variable amino acid
MYLVTVLRNLLSILAVRSDSLFTXSCTSPSQXXXXXXXXXXXXXXXXXXXXXXXXXXXXXXXXXXFLVLFACIEDMFLTVMAYDCFIAICHPLHYPVIVNPHLCVFFILVSFFLSLLDSQLHSWIVLQFTIIKNVEVSNFVCDPSQLLKLACSDSVINSIFIYFDNTMFGFLPISGILWSYYKIVPYILRISSSDGKYKAFATCGSHLAVAC

SEQ ID NO: 1161 - DNA, 898 bp, Homo sapiens
  source (1)..(898)
  CDS (201)..(698)
gatccagaactgcagccggtcctcgctttgctgtccctgtccctgtccatgtatctggtcacggtgctgaggaacctgctcagcatcctggctgtccgctctgactcccccctccacaaccccatgtacttcttcctctccaacctgtgctgggctgacatcggtttcacctcggccacggttgccaagatgattgtggaatgcagtcgcatagcagagtcatctctcatgcgggctgcctgacgcagatgtctttcttggtcctttttgcatgtatagaaggcatgctcctgactgtgatggcctatgactgctttgtagccatctgtcgtcctctgcactacccagtcatcgtgaatcctcacctctgtgtcttcttcgttttggtgtcctttttccttagcctgttggattcccagctgcacagttcgattgtgttacaattcaccatcatcaagaatgtggaaatctctcattttgtctgtgacccctctcatcttctcaaacttgcctgttctgacagcgtcatcaatagcatattcatatatttcgatagtactatgtttggttttcttcccatttcagggatcctttggtcttactataaaatcgtcccctccattctaaggatttcatcatcagatgggaagtataaagccttcgccacctgtggctctcacctagcagttgtttgctgatttgatggaacaggcattggtatgtacctgacttcagctgtggcaccaccccctaggaatggagtggtggcatcagtgatgtaggctgtggtcacccccatgctgaaccttttcatctacagcctgagaaacagggacatacaaagtgccctgcggaggctgctcagcagaacagtcgaatttcatgatctgtttcattc

SEQ ID NO: 1162 - protein, 165 aa, Homo sapiens
MQSHSRVISHAGCLTQMSFLVLFACIEGMLLTVMAYDCFVAICRPLHYPVIVNPHLCVFFVLVSFFLSLLDSQLHSSIVLQFTIIKNVEISHFVCDPSHLLKLACSDSVINSIFIYFDSTMFGFLPISGILWSYYKIVPSILRISSSDGKYKAFATCGSHLAVVC

SEQ ID NO: 1163 - DNA, 940 bp, Homo sapiens
  source (1)..(940)
  CDS (201)..(740)
tttatcgtgggtttgatccctgagctgctctcctttcccgaacctcccggggtgcagcctagagccctcccgcgcggctgactccagagtagaggaagggaggcggcctccggctggtcccccgaagccctcgctgccccgcagatgcggatggccagccagtagcgggcggtggccccgcgtcccgggagcgcacagcaatgcaggcgcttaacattaccccggagcagttctctcggctgctgcgggaccacaacctgacgcgggagcagttcatcgctctgtaccggctgcgaccgctcgtctacaccccagagctgccgggacgcgccaagctggccctcgtgctcaccggcgtgctcatcttcgccctggcgctctttggcaatgctctggtgttctacgtggtgacccgcagcaaggccatgcgcaccgtcaccaacatctttatctgctccttggcgctcagtgacctgctcatcaccttcttctgcattcccgtcaccatgctccagaacatttccgacaactggctggggggtaagagtcgcgccccgctccttcgctccttctctcttaaccctctgcctttcaggggatctctctctctctctctctctctctctctctctctctctctctctctctctctctctctctcctctctcgtctgtctgtctctctctcgtctgtctcttccttacacttctctgtcaaatgaatccggtgctctttcttagaacttcgccacctgtgttcacctggacataagttcttttggccgcctctgattcccctccagtgcttcctccttgtggcttagagacataggttggggaaaagcttcggaaaggtcccgagcagtgaggcaggaagtcgcacccctcgccacttatttcagctccctttcccgtcattaccaggtttttctcccctagtt

SEQ ID NO: 1164 - protein, 179 aa, Homo sapiens
MQALNITPEQFSRLLRDHNLTREQFIALYRLRPLVYTPELPGRAKLALVLTGVLIFALALFGNALVFYVVTRSKAMRTVTNIFICSLALSDLLITFFCIPVTMLQNISDNWLGGKSRAPLLRSFSLNPLPFRGSLSLSLSLSLSLSLSLSLSLSSLVCLSLSRLSLPYTSLSNESGALS

SEQ ID NO: 1165 - DNA, 856 bp, Homo sapiens
  source (1)..(856)
  CDS (201)..(656)
ttctagccaattcacgaatttgtgtaaaaaaagaatgatcgggtttcttggaaccattcttgatatctaaggtcttttaaggccagggggtgtcagccaagtgaatagcccagaatccaatgaagaaagcatgagaaggccaattgagtttgtcaaaattgcaaaatattggtgagtggattgctctgaaatctgaaaacatgacttgtgaattgcttctatccaaaatgcagacacaatgctgggtgttggtttacttgtttccgatttttcaaccctcttttctaggcaaaaggtgtccaaactctacagacccacagaatgtaacggatgtctctcgattcctcctcctcaaactctcagaggatccagaactgcagccggtccttgctgggctgttcctgtccatgtgcctggtcacggtgctggggaacctgctcatcatcctggccgtcagccctgactcccacctccacacttccatgtacttcttcctctccaacctgtccttgcctgacatcggtttcccctcccccacggtccccaagatggttgtggacatccaatctcacagcagtcatctcctatgcaggctgcctgactcagatgtctctctttgccatttttggaggcatggaagagacacatgctcctgaatgtgatggcctatgtccggtttgtagccatctgtcaccctctatatcattcagccatcatgaacccgtgtttctgtggcttcttacttttgttgtcttttttttttctcggtcttttagacgcccagctgcacaacatgattgccttacaaatgacctgcttcaaggatgtggaaattcctaatttcttctgtgatcct

SEQ ID NO: 1166 - protein, 151 aa, Homo sapiens
MTCELLLSKMQTQCWVLVYLFPIFQPSFLGKRCPNSTDPQNVTDVSRFLLLKLSEDPELQPVLAGLFLSMCLVTVLGNLLIILAVSPDSHLHTSMYFFLSNLSLPDIGFPSPTVPKMVVDIQSHSSHLLCRLPDSDVSLCHFWRHGRDTCS

SEQ ID NO: 1167 - DNA, 880 bp, Homo sapiens
  source (1)..(880)
  CDS (201)..(680)
ttcctgttaccactattccagctagtactagcatagttgttggacctccaacttctatgacctcttactttacataatatgggaccattcgtttaactcacatactgtgtccttttctggattagtcatactctaggtatgaaaaagtacatggaaaggactaattgaacaactgagtttgagttgattctcataagtctatgagtactcataagttgacaaaaactcctttttgtcacatgcttagtggtgtatctagtgaccctcttggggaacagaatacagatcatcccaacactccttgtttcccacctatatttatgccatggcaatccctccttcctggatatcgggcttacgtcctttttactccctctatcctaataaacttcctatcagagggaaaaaaactctctttcacagattgtattatacaaatgtctatcttctattccatggggtccacggagtgtgtgctcctagcagtgatggcatatgataactgtgtggtcatcagcaaattcctgagataccctctcatcataaataaggtgccttggctgggcgcagtggctcatgcctgtaatcccagcactctgggagtccaaggctggtggatcaccggaggtcaggagttcaaaaccagcttggccaacatgatgaaaccccatctctactaaaaatacaaaaaattagccctgtgcagtggtgggcaccggtaatcccagctacttgggaggctgaggcaggagaattgcttgaacctgggaggccgaggttgcaatgagccaatatcatgccactgcactccagtctgggcaacaagagcgaaactccacctcaaaaataatataaaataaaataaaataaaaaaggtgct

SEQ ID NO: 1168 - protein, 159 aa, Homo sapiens [sequence omitted]

SEQ ID NO: 1169 - DNA, 895 bp, Homo sapiens
  source (1)..(895)
  CDS (201)..(695)
tgcttgaacctgggaggccgaggttgcaatgagccaatatcatgccactgcactccagtctgggcaacaagagcgaaactccacctcaaaaataatataaaataaaataaaataaaaaaggtgctttgtgttttcatggctactgtctcttatgaattaggatttctcaacagacaaaatgtattaatagttacatatgaatgcacttttgtggaaaacacatcattaatcatttttataaaatattacagttaatgcctctggcttgcatagatatttccttgaatgagaatataataatattgggcaaagtaaacttttcatttactttattactaccatttcagttctttatattcagttttttatattttcaccatctatgctgtattgaaatcaattcagctgaaggaaggaaaaaggtctcttccacctgttcagcccacataacagtggtgattgtgtttcaccggacaatcctcttcatgtacataaagtcaacatctaatggcactacttcagagaaactggttgacctgttctgcggggtagtaatgctcatgctcaatcttatcatctatagcctggggaatatggaggtgcttggggttatgaagaaattgatcagtatgagtagaccctggtgctggaaaaatgatgagaacctgacatctttgagttcatgtacaaaataagctcacatattttgaggcaagaattttaaatataaatagaacagaagaaatgacgattatgtctagaaacaaaatttcagcattagaaagaaatttcaacattaataatctaatatttatctttaagaaaatgaccatgacctcataaaaatacagagacaagtaatctaagaagtacatgtaaagttatgggagtcaga

SEQ ID NO: 1170 - protein, 164 aa, Homo sapiens [sequence omitted]

SEQ ID NO: 1171 - DNA, 931 bp, Homo sapiens
  source (1)..(931)
  CDS (201)..(731)
tggacatctgctacactagttcatctattccactatttctcagcagcttcttaacgtcaaagaaaactatttccttctctgggtgtggagtgcaaatgtttctctcttttgctatgggagcaacagagtgtgtccttctaagtatgatggcgtttgactgctatgtggccatctgtaaccctctatgataccctatcatcatgagcaaggcttcatacatgtccatggctgcggggtcctggattggaggaggcatcaattctgtgttgcaaacctcccttgcaatgcggcttcctttctgtggagataacgtcattaatcattttacttgtgaaatcttggctgtcttaaaattggcctgtgctaatatctccataaatattattagcatggttgttgctagtatgatttttcttgtagggccagtactttttatttttgttacatatgtttttattctctccaccatcctgagaattccttctgcagaaggaaggcacaaagcctcctccacctgctctgcccacctaacagtggtgattatattctacagaaccatccttttcatgtatgcaaagcccaaggctaaagactcttctggtgcagacaaagaacaagtcacagacaaaatcatctccctgttctatggagtggtgacacctatgcttaatcctcttatctatagtttgaggaacaaagacgtgaaggcagctgtgaagagtatactgtgacaaaaatgcttcttggaaggaatttaaatgcttctttatttatttttaaaagtattttactctgaatgtagggctagctcttacccagaggttccaaaataaatatgagggttgatgattccactaattcccgaaattctcatttttctcttcctaatatttaaaagaaagagggaaatccaggactgagttaccttttc

SEQ ID NO: 1172 - protein, 176 aa, Homo sapiens [sequence omitted]

SEQ ID NO: 1173 - DNA, 853 bp, Homo sapiens
  source (1)..(853)
  CDS (201)..(653)
ttaaattaagggctcagaacaacgagatgaaatttaagagtaataaatacagaatcctatctctaaacttaggaaaataaagagcttacatacacaactggggaaatctggctttgcaatagttcatatggaaaaaataaaatgatcctggagttttgtcaacgagcttgacgtgggttaatgctgtgacgacatgcctcatgatagctatttctttttctctttctcttcccttcctttcctttcccctcccctctcctccccttccctcccctttccttccttccttccttccttccttctttccttccttccttcctttctttcttttctttctttctttctctttctttcttctccttccttccttctctttcttttttctttctttcttcttcttttctttcttttccttccttccttcctttcttttcttttctctttctttctttcttttcttcttttctttctttctttcatctctctctcctttcatttttttttttaatagagtctcactctgtcgcccaggctggagtgcagtggcacaatctcagctctctgcaacctccacctcccgggttcaagcgattctcatgcctcagcctctccaagagctgagattacaggcacatgccacggcacctggctaatttttatattttcagtagaggcagcatttcaccatgttggccaggctggtctctaaatcctgacttcaggtgatctgcctgccttggcctcccaaagtgctgggattataagcatgagacaccgcaccaggccttttaaaaaaattttcgaaatggaatctcactatgttgcccaggctggacttgaacttttgggcctc

SEQ ID NO: 1174 - protein, 150 aa, Homo sapiens
MIAISFSLSLPFLSFPLPSPPLPSPFLPSFLPSFFPSFLPFFLFFLSFSFFLLLPSFSFFFLSFFFFSFFSFLPSFLFFSLSFFLFFFSFFLSSLSPFIFFFNRVSLCRPGWSAVAQSQLSATSTSRVQAILMPQPLQELRLQAHATAPG

SEQ ID NO: 1175 - DNA, 2269 bp, Homo sapiens
  source (1)..(2269)
  CDS (201)..(2069)
acgtattccatactcattattttttgctattaccatggtatgatttatgatagtattattggctgatcctaattaaaatagaatacagaagttatagtattataaaaaaaattcatttgatgaagttttcgtgatttaaagctttaccttctctttttatagccaattctgatctgaacagaaaatccaagaacagggatatgtgtggattacagttttctctgccttgcctacgactgtttctggttgttacctgttatcttttattattactccacaaagaaatacttggatgttcgtctgtttgtcagctctgcactgggagacaaattaactgccgtaacttaggcctttcgagtattcctaagaattttcctgaaagtacagtttttctgtatctgactgggaataatatatcttatataaatgaaagtgaattaacaggacttcattctcttgtagcattgtatttggataattctaacattctgtatgtatatccaaaagcctttgttcaattgaggcatctatattttctatttctaaataataatttcatcaaacgcttagatcctggaatatttaagggacttttaaatcttcgtaatttatatttacagtataatcaggtatcttttgttccgagaggagtatttaatgatctagtttcagttcagtacttaaatctacaaaggaatcgcctcactgtccttgggagtggtacctttgttggtatggttgctcttcggatacttgatttatcaaacaataacattttgaggatatcagaatcaggctttcaacatcttgaaaaccttgcttgtttgtatttaggaagtaataatttaacaaaagtaccatcaaatgcctttgaagtacttaaaagtcttagaagactttctttgtctcataatcctattgaagcaatacagccctttgcatttaaaggacttgccaatctggaatacctcctcctgaaaaattcaagaattaggaatgttactagggatgggtttagtggaattaataatcttaaacatttgatcttaagtcataatgatttagagaatttaaattctgacacattcagtttgttaaagaatttaatttaccttaagttagatagaaacagaataattagcattgataatgatacatttgaaaatatgggagcatctttgaagatccttaatctgtcatttaataatcttacagccttgcatccaagggtccttaagccgttgtcttcattgattcatcttcaggcaaattctaatccttgggaatgtaactgcaaacttttgggccttcgagactggctagcatcttcagccattactctaaacatctattgtcagaatcccccatccatgcgtggcagagcattacgttatattaacattacaaattgtgttacatcttcaataaatgtatccagagcttgggctgttgtaaaatctcctcatattcatcacaagactactgcgctaatgatggcctggcataaagtaaccacaaatggcagtcctctggaaaatactgagactgagaacattactttctgggaacgaattcctacttcacctgctggtagattttttcaagagaatgcctttggtaatccattagagactacagcagtgttacctgtgcaaatacaacttactacttctgttaccttgaacttggaaaaaaacagtgctctaccgaatgatgctgcttcaatgtcagggaaaacatctctaatttgtacacaagaagttgagaagttgaatgaggcttttgacattttgctagcttttttcatcttagcttgtgttttaatcatttttttgatctacaaagttgttcagtttaaacaaaaactaaaggcatcagaaaactcaagggaaaatagacttgaatactacagcttttatcagtcagcaaggtataatgtaactgcctcaatttgtaacacttccccaaattctctagaaagtcctggcttggagcagattcgacttcataaacaaattgttcctgaaaatgaggcacaggtcattctttttgaacattctgctttataactcaactaaatattgtctataagaaacttcagtgccatggacatgatttaaactgaaacctccttatataattatatactttagttggaaatataatgaattatatgaggttagcattattaaaatatgtttttaataatttgtgaacagtgtattcatttagcaaatattttctttgatatatactgtattaagtaata

SEQ ID NO: 1176 - protein, 622 aa, Homo sapiens
MCGLQFSLPCLRLFLVVTCYLLLLLHKEILGCSSVCQLCTGRQINCRNLGLSSIPKNFPESTVFLYLTGNNISYINESELTGLHSLVALYLDNSNILYVYPKAFVQLRHLYFLFLNNNFIKRLDPGIFKGLLNLRNLYLQYNQVSFVPRGVFNDLVSVQYLNLQRNRLTVLGSGTFVGMVALRILDLSNNNILRISESGFQHLENLACLYLGSNNLTKVPSNAFEVLKSLRRLSLSHNPIEAIQPFAFKGLANLEYLLLKNSRIRNVTRDGFSGINNLKHLILSHNDLENLNSDTFSLLKNLIYLKLDRNRIISIDNDTFENMGASLKILNLSFNNLTALHPRVLKPLSSLIHLQANSNPWECNCKLLGLRDWLASSAITLNIYCQNPPSMRGRALRYINITNCVTSSINVSRAWAVVKSPHIHHKTTALMMAWHKVTTNGSPLENTETENITFWERIPTSPAGRFFQENAFGNPLETTAVLPVQIQLTTSVTLNLEKNSALPNDAASMSGKTSLICTQEVEKLNEAFDILLAFFILACVLIIFLIYKVVQFKQKLKASENSRENRLEYYSFYQSARYNVTASICNTSPNSLESPGLEQIRLHKQIVPENEAQVILFEHSAL

SEQ ID NO: 1177 - DNA, 856 bp, Homo sapiens
  source (1)..(856)
  CDS (201)..(656)
acaaatagctctaaaatcttaacagaaataaagatttctttaaaaggcaatttgagagagttgagagagtaatcagagcagagagaaaactctgggcactggttggcacaaagagttcccatacatataggttctcacacatataattgtgaacatacaatctaatactgatatttttttctttgaaagacagggtatgaatgaatctgtcacccaggctggagtgcagtggcatggtcatcgctcactccagcctcaacctcccaggctcaagcaatccttgttgttgttgctgtttttttgttttgttttgttttttgttgtttttgggagaaagagtcttgctctgtcacccagactggagtggagtggcacaatctcggctcactgcaacctctgcctcctgggttcaagcgattctcctgcctcagcctcccgagcagctgggagacatgcaccaccacacctggctaatttttgtatttttagtagagagggggtttcaccaggttggcaaggctggtcttgaactcctgacctcaagtgacccacccacctcagcctcccaaagtgctgggattacaggcattagccactgtgccaggcccaatccttgtttgatgtttgcctttctcactttactgaaggatccatgagggcagacacaatgtctattctgctcatcacagtattcccagcacttaaaaacactgcacagctatactccagcctggacaacagagaccctgtctcaaaaacaaaacaaaacagtgcatagcacataattaataaattaatgagtaagaaagtaatttgtgacacctgtaatcagttctttcacacataatgtaacaga

SEQ ID NO: 1178 - protein, 151 aa, Homo sapiens [sequence omitted]

SEQ ID NO: 1179 - DNA, 916 bp, Homo sapiens
  source (1)..(916)
  CDS (201)..(716)
gcaattctgaccagtgttataaatgtgagtacacagtagccagtctgctagtgtaaaatggtggactgtgactacagtcacagggcataccttgggagagtttcctgagaatgcccgaccaaggactgacgggtgggtgggattaaccaggcaaccgttggaagaaagaacatctgcattggccctcaaaagggacctatatgtgcagggaaactcagattagggcagggtggccagaagggggaggaaaaaagaggttttggtataaggtaggtctggagaagtcaggagaggctggaccacgctgggtcttctcagccatgttacagaaggggaaattgaatctcacggaatacactaagcatgtgactttttctttcctctttccccctcccttcttttcttctttctttgtttcccttttccctgttttttctcttgatctcttctccctcccctttttcccttcatccctccccctgcctcctctcttacactttttcactcacaggaaaataaaaacaaattatttcattgtatctcttgcttttgcggatctgctggtttcggtgctggtgatgccctttggtgccattgagctggttcaagacatctggatttatggggaggtgttttgtcttgttcggacatctctggacgtcctgctcacaacggcatcgatttttcacctgtgctgcatttctctggataggtaaggacagaacaatgtgcatagcggagctccatgctggagacatgacttgatggatattgggcagtgtctgccttttcttattcattagaagaaatgaatctcagagaggtaaatttgataattcagttatacagtcattctccagcctttgcagaggccccctttttagtcaggccctctctgaggcactgtagatgcaca

SEQ ID NO: 1180 - protein, 171 aa, Homo sapiens [sequence omitted]

SEQ ID NO: 1181 - DNA, 1126 bp, Homo sapiens
  source (1)..(1126)
  CDS (201)..(926)
  modified_base (251)..(350): a, t, c, g, unknown or other
tgttagtattatggggacaagcctgtatgtcaagaaaggctgttattttcagaactgcctggacctcagcttctacaccctcttgtctggaaatttcgcagttacctccacatggggtattctttgcctcatcattgagatgctattacaaagagataatttaatatctgaaatgaaacacgcagttattccatgggcatatgactggggcagcagtgcagagacctactattaaggtttcatgctcatannnnnnnnnnnnnnnnnnnnnnnnnnnnnnnnnnnnnnnnnnnnnnnnnnnnnnnnnnnnnnnnnnnnnnnnnnnnnnnnnnnnnnnnnnnnnnnnnnnnatcagcgtgtcctggattctgcctctcacgtacagcggtgctgtgttctacacaggtgtcaatgatgatgggctggaggaattagtaagtgctctcaactgcgtaggtggctgtcaaattattgtaagtcaaggctgggtgttgatagattttctgttattcttcatacctacccttgttatgataattctttacagtaagatttttcttatagctaaacaacaagctataaaaattgaaactactagtagcaaagtagaatcatcctcagagagttataaaatcagagtggccaagagagagaggaaagcagctaaaaccctgggggtcacggtactagcatttgttatttcatggttaccgtatacagttgatatattaattgatgcctttatgggcttcctgacccctgcctatatctatgaaatttgctgttggagtgcttattataactcagccatgaatcctttgatttatgctctattttatccttggtttaggaaagccataaaacttattttaagtggagatgttttaaaggctagttcatcaaccattagtttatttttagaataagtttaagcactaagttgagaaaattaagaatatttttaaaattatgaatttataaggggagttaaatataagaaacaaataaaacttttcaaaattggagaaatatatcacttttcaaattaaccaggaaaaaggtcacaggaagattaaactattaaactattgtaaagatattgactacattaaataataaatgataa

SEQ ID NO: 1182 - protein, 241 aa, Homo sapiens
  MOD_RES (17)..(50): Variable amino acid
MTGAAVQRPTIKVSCSXXXXXXXXXXXXXXXXXXXXXXXXXXXXXXXXXXISVSWILPLTYSGAVFYTGVNDDGLEELVSALNCVGGCQIIVSQGWVLIDFLLFFIPTLVMIILYSKIFLIAKQQAIKIETTSSKVESSSESYKIRVAKRERKAAKTLGVTVLAFVISWLPYTVDILIDAFMGFLTPAYIYEICCWSAYYNSAMNPLIYALFYPWFRKAIKLILSGDVLKASSSTISLFLE

SEQ ID NO: 1183 - DNA, 883 bp, Homo sapiens
  source (1)..(883)
  CDS (201)..(683)
tgaagagtgctggatagtggtgaccacacatactctctgttgggtaatgtgttttaccttaaacatttgtgtttttgcctcaccgtggtgttgcccctcgggtccctggtttgttggtttctctaggctgtggggtattggcatgtcttacatacggctgttttctggatatgttagaccatctgatgcatcatctgtgaatgaagttgaatgtgttttttttttttggagacagagtctcactctgttgcccaggctggagtacaatggtgcaatctcgtctcactgcaacttccacctcccgggttcaagcgattctcctgtctcagcctcctgaggagctgggactctgtacaggcgcgtgccgccacgcccagctaattttttgtattttaatggagacagggtttcactgtgttgcccaggctggtctcgaactcctgagttcaggcagtccgcccgtctcagcctcccgaagtgctaggattacaggcgtgagccaccacgcctggccgaaagttgaacgtattttacataaagctcctgaggacctgaggagattactgaataagttaataaataaatacatgttttggaattttagtgaggttttctcagagaagttcagagtggcatcagttaggccaggccatgtgatgtgtcttttttttttttttttttgagatggagtcttgctctgtcgcccaggctggggtgcagtggcgtgacctcagctcactgcaagctccgcctcctgggttcacaccattctcctgcctcagcctcccgagtagctgggactacaggcgcccgccaccacgcctggctaatttttttgtatttttaatagcgatggggtttcactgtgttagccaggatggtc

SEQ ID NO: 1184 - protein, 160 aa, Homo sapiens
MKLNVFFFFGDRVSLCCPGWSTMVQSRLTATSTSRVQAILLSQPPEELGLCTGACRHAQLIFCILMETGFHCVAQAGLELLSSGSPPVSASRSARITGVSHHAWPKVERILHKAPEDLRRLLNKLINKYMFWNFSEVFSEKFRVASVRPGHVMCLFFFFF

SEQ ID NO: 1185 - DNA, 1021 bp, Homo sapiens
  source (1)..(1021)
  CDS (201)..(821)
tcgcttcccttcaggcaggtactgattatccactgtcatgaccaaccagagctgcccagaaacagttcatcttactgggtttctcaggcagacccaggctggagcatgtcctctttgtgtttgtcctcatcttctaccttgtgaccttagtgggcaacatcatcattatcttgatctcccacctggacccctgcctccacatgcccatgtacttcttcctcactaacttgtctttcctagatctctgcttcaccaccagttctatcccccagctgcttttcaatctaggcagcccaggcaagactatcagccacacgggctgtgccatccagctcttcatgttcctgggcctgggtggcaagagtgtattctcttggcagccgtggcctatgaccgcttcattgcaatctgcaagccccttcactattctgtcattatgcaccctcagctgtgctggaagttggtgtctgtggcccgggggtgttggactcctcagttctctagttatgtctcctgtgactatgaagctgccacgatgtggaagatgtaagttgaaacatttcctgtgtgagatgccagctctaataaaaatcacctgtgtggacacagtggctatggagagcactgttttcaccttatcggtagtaattgtcctgatgcctttgtgtcttatcctcatctcttatagctacattgccctagcagtgctgagaatcaagtcagccgcaggaagaaggaaggccttcaatatgtgcgggtcccacctcaccgtggtctccttgttttatgggaatattatctatatgtatatgcaaccatgaaataattcttctcaggaccaagggaagttccttacccttttctacaacttaatgacccccatgttaaaccctgtcatctatacactgagaaacaaggatgtaaaaggtgcactgaagaggcttgtgtctagaaaacacagtgacagtgactgctcttgagactgcttctttacttatttaatagaaataaataattcttg

SEQ ID NO: 1186 - protein, 206 aa, Homo sapiens
MPMYFFLTNLSFLDLCFTTSSIPQLLFNLGSPGKTISHTGCAIQLFMFLGLGGKSVFSWQPWPMTASLQSASPFTILSLCTLSCAGSWCLWPGGVGLLSSLVMSPVTMKLPRCGRCKLKHFLCEMPALIKITCVDTVAMESTVFTLSVVIVLMPLCLILISYSYIALAVLRIKSAAGRRKAFNMCGSHLTVVSLFYGNIIYMYMQP

SEQ ID NO: 1187 - DNA, 925 bp, Homo sapiens
  source (1)..(925)
  CDS (201)..(725)
gccttatgtgtttgaacaaatgataaacagcttatatagctagctgggcagaagatatgctacaattattgaatgggttgttaggcttgatagttatatgtcccccccaaatcctgacattcaatggtattcacatattgcagattaaatattcttcattttgtccctactagctatacagatgatgtgaaaggaaggcaatggaaaaatccaatgtcagctcagtgtatggttttatcttggtgggtttctctgatcgtcccaagctggagatggtgctctttacagtaaattttattctgtattcagtggctgtgctgggaaattcaaccataatccttgtgtgtatattagactctcaacttcataccccaatgtacttctttctggcaaatctttcctttctagatctctgcttcagtactagttgcatcccacaaatgctggtaaacctctggggccctgacaagactattagctgtgctggctgtgttgtccagcttttctctttcctttctgtcaggggaattgagtgcatccttctggctgtcatggcctatgacagctatgctgcagtctgcaaaccgttgcgctatctggtcattatgcacctccgagctgtgtctaggactgatggctgcagcctgggggagtggactggtcaatgccgttgtcatgtcaccactaacaatgaccctctccagaagtggccgccgccgagttaaccatttcctctgtgaaagccagcactgatcaagatggcttgtttggatgttcgtgcagtggaaatgctggcttttgcttttgccgttctcattgtcctactgcccctcactcttattcttgtctcctacggctacattgctgcagctgtgctaagcatcaagtcagctgcccaggcaatggaaggccttcccatacctgt

SEQ ID NO: 1188 - protein, 174 aa, Homo sapiens
MEKSNVSSVYGFILVGFSDRPKLEMVLFTVNFILYSVAVLGNSTIILVCILDSQLHTPMYFFLANLSFLDLCFSTSCIPQMLVNLWGPDKTISCAGCVVQLFSFLSVRGIECILLAVMAYDSYAAVCKPLRYLVIMHLRAVSRTDGCSLGEWTGQCRCHVTTNNDPLQKWPPPS

SEQ ID NO: 1189 - DNA, 952 bp, Homo sapiens
  source (1)..(952)
  CDS (201)..(752)
gagtacttggagctccagaatataagaaaaagaaataaacagaaaaaaatcttaagagataatggttgagaattttccaaaattaatgacaccaccataaatccgagaagttcaccaaacccaatgcaaaataaataagaaaatcacaccgttgccctttaccaaaatgatgacatggatttcccttaagaaaaaacagaatgatcaatgatagccacttcagtggttttatactccttggattcacagggcagcctcagcttcagatgatgatctctggggttgtctttttcttctacactattgccttcatgggaaatatggccatcatcctattgtctttcctagatgaccatctccaagtccccatgtacttcttccttagaaatttggccatcttggatctctgttataccacaaatatagtcccacaaatgttggtcagtatctggggcaaagacaaaagaattacctttggtgggtgtgcctttcaacttttcattgatgtggcactgtactcagttgaatgcatccttctgtccatgatgtcatatgatcgactcaatgctatctgcaagcctctgcatcatatgaccataatgaacctccaactctgccagggccttgtggtcatctcctgggtagttggtgtgattaattgcatcataccttccccttatgccacgagtcttcctcgatgtaggaaccaccacctagaccacttttttgtgtgtgtgaaatgtctgcaatgatcaagattcaagattgcatgtgtggacaccacagccatggaggtaaccacatttgccatgtgcctgattatagttcttgttcctcttcttcttattcttgtgtcatatggtttcattgctgtggctgtactcaagatcaagtctgcagcaggaagacaaaaagcatttgggacctgttcctcccatctcgttgtggtatc

SEQ ID NO: 1190 - protein, 183 aa, Homo sapiens [sequence omitted]

SEQ ID NO: 1191 - DNA, 964 bp, Homo sapiens
  source (1)..(964)
  CDS (201)..(764)
aggccgtattttactgagatcacggatttgttatatatgatgttttggtcttctaatattcttcagtggattttctctaaagtagtatgtacagaaagccttgtatagcaaaagagtaaatcacgtaataattctgagattttttggaattgtcataactgagaaacattgctggcggtgtatggtccgcaagtgtgaaaatgttccttgtgaattgcttgcatccagcattaaggactggtttttatcttttatttttccaatcctctttccttctcaaggtgtccaagacacacagagccacagaatctcacagatgtctgagaattcctcctcctgggactctcagaggatccagaactgcagccggtcctcgctttgctctccctgtccctgtccatgtatctggtcatggtgctgaggaacctgctcagcatcctggctgtcagctctgtctctcccctccacacccccacctgtgctgggctgacatcggtttcaccttggccacggttcccaagatgattgtggacatgcagtcgcatagcagagtcatctctcatgcgggctgtctgacgcagatgtctttcttcatcctttttgcatgtatagaaggcatgctcctgactgtgatggcctatgactgctttgtagccatctgtcgccctctgcactacccagtcatcgtgaatcctcacctctgtgtcttcttcgttttggtgtcctttttccttagcctgttggattcccagctgcacagttgaattgtgttacaattcaccatcatcaagaatgtggaaatctctcattttttctgtgacccctctcaacttctcaaacttgcctgttctgacagcgtcatcaatagcatattcatatatttcgatagtactatgtttggttttcttcccatttcagggatcctatggtcttactataaaatcatcccctccattctaaggat

SEQ ID NO: 1192 - protein, 187 aa, Homo sapiens
MFLVNCLHPALRTGFYLLFFQSSFLLKVSKTHRATESHRCLRIPPPGTLRGSRTAAGPRFALPVPVHVSGHGAEEPAQHPGCQLCLSPPHPHLCWADIGFTLATVPKMIVDMQSHSRVISHAGCLTQMSFFILFACIEGMLLTVMAYDCFVAICRPLHYPVIVNPHLCVFFVLVSFFLSLLDSQLHS

SEQ ID NO: 1193 - DNA, 1318 bp, Homo sapiens
  source (1)..(1318)
  CDS (201)..(1118)
atggcttactgtgttttaggtctagggtatgcaaacattcataggaaataatcttcattcttaaagcatgtaaagtttatatcatataagcacataaatggcaaagtcacattgtcagtgctgtaaaagagataggaacaaagctctgaaagcttgtcagttactctggtgctttttctcctccaggtgacttcccaagtatgcctggccacaatacctccaggaattcctcttgcgatcctatagtgacaccccacttaatcagcctctacttcatagtgcttattggcgggctggtgggtgtcatttccattcttttcctcctggtgaaaatgaacacccggtcagtgaccaccatggcggtcattaacttggtggtggtccacagcgtttttctgctgacagtgccatttcgcttgacctacctcatcaagaagacttggatgtttgggctgcccttctgcaaatttgtgagtgccatgctgcacatccacatgtacctcacgttcctattctatgtggtgatcctggtcaccagatacctcatcttcttcaagtgcaaagacaaagtggaattctacagaaaactgcatgctgtggctgccagtgctggcatgtggacgctggtgattgtcattgtggtacccctggttgtctcccggtatggaatccatgaggaatacaatgaggagcactgttttaaatttcacaaagagcttgcttacacatatgtgaaaatcatcaactatatgatagtcatttttgtcatagccgttgctgtgattctgttggtcttccaggtcttcatcattatgttgatggtgcagaagctacgccactctttactatcccaccaggagttctgggctcagctgaaaaacctattttttataggggtcatccttgtttgtttccttccctaccagttctttaggatctattacttgaatgttgtgacgcattccaatgcctgtaacagcaaggttgcattttataacgaaatcttcttgagtgtaacagcaattagctgctatgatttgcttctctttgtctttgggggaagccattggtttaagcaaaagataattggcttatggaattgtgttttgtgccgttagccacaaactacagtattcatatttgcttcctttatattgggaataaaaatgggtataggggaggtaagaatggtatttcattacttgatcaaaaccatgccttgatgtacccaaaacaaaaggactataaaatgcaagagccctcattgtagtccttatgggatccctcccatctctgagtgatggccgtacaaagacca

SEQ ID NO: 1194 - protein, 305 aa, Homo sapiens
MPGHNTSRNSSCDPIVTPHLISLYFIVLIGGLVGVISILFLLVKMNTRSVTTMAVINLVVVHSVFLLTVPFRLTYLIKKTWMFGLPFCKFVSAMLHIHMYLTFLFYVVILVTRYLIFFKCKDKVEFYRKLHAVAASAGMWTLVIVIVVPLVVSRYGIHEEYNEEHCFKFHKELAYTYVKIINYMIVIFVIAVAVILLVFQVFIIMLMVQKLRHSLLSHQEFWAQLKNLFFIGVILVCFLPYQFFRIYYLNVVTHSNACNSKVAFYNEIFLSVTAISCYDLLLFVFGGSHWFKQKIIGLWNCVLCR

SEQ ID NO: 1195 - DNA, 922 bp, Homo sapiens
  source (1)..(922)
  CDS (201)..(722)
tcgtatgcttccaacaatgtccccaagatgctgacaaaccttggcttgaacaagagaaaaacaatctcctttgtcccatgcacaatgcagacctttttatacatggcttttgctcacactgagtgtctcatcttggtaatgatgtcctacgatcggtacatggctgtctgccaccctctgcaatattctgtcatcatgagatggggagtgtgcacagtcctggctgtcacttcttgggcatgtggttccttctggccctggtccatgtggttctcatcctgaggctgcccttctgtgggccccatgaaatcaaccacttcttctgtgaaatcctgtctgtcctcaagttggcctgtgctgacacctggctcaaccaggtggtcatctttgcttcttcagtgttcatcctggtgggggcgctctgcctggtgctggtctcctactcgcgcatcctggcggccatcttgaggaatcagtctggggaggggcgcagaaagggcttctccacctgctactcccacctttgcatggtgggactcttctttggcagcaccattgtcatgtacatggcccccaagtcccgcccccctgaggagcagcagaaggtctttccctgttttcagccttttcaacccgatgctgaaccccttgatctacagcctgaggaacccagaggtcaagggtgccctgaaagagtgttgtggaaacagagatcaaagtgagggatgccagggaaagtctagagggttgaagatttgctcccaatgagatttgtaggaacagtggtgtaaatgccttacagtctcatctcttagatttctgatatcaagaatgtatattgattggattctatccctaaacgtggagtaccatgcagatcacaaagcacatgcagacaggcgctgagccgtgtggtgcagca

SEQ ID NO: 1196 - protein, 173 aa, Homo sapiens
MGSVHSPGCHFLGMWFLLALVHVVLILRLPFCGPHEINHFFCEILSVLKLACADTWLNQVVIFASSVFILVGALCLVLVSYSRILAAILRNQSGEGRRKGFSTCYSHLCMVGLFFGSTIVMYMAPKSRPPEEQQKVFPCFQPFQPDAEPLDLQPEEPRGQGCPERVLWKQRSK

SEQ ID NO: 1197 - DNA, 952 bp, Homo sapiens
  source (1)..(952)
  CDS (201)..(752)
caaagcctggctgctgcctcaaatgaaggggcatggaactggcaaacctcaaggtgggcagggccccagggagcttttatagtctgtgcagtgcacaaagtccccggggtggcagctggcatctgattgcttatcagggcacaagctgtatccagtgggaggaaggcacccattttccttaactttgctcatcaagcaccatgtcttcgtgttgcatctcccagtgtctctttctaattctaaggtgttttaagggctggaaacacagccccagtagtggagcggcagggagaggggatggggactgcagggacaccatacctgctcttgaggccaggaccacaatgacaaccccagagactgccaggagcacagccatgaacgccagggcccagtacagggacttcacgtacatgggtagccctgggacgggggcaaacaggataatcagattagtggagaccatcccaaccaacccaactcagaaccacagacacagcacaccagcatctcacccacctcaccccagcacccaccccctcagcctgggatgccaacataaaccacaacgtttaagttccaactttatattctggagaaagaagccagatattctttttttttttttttttttttttggagacagagtcttgctttgtcgcccaggttggagtgcagtggtgcgatctcggctcactgcaacctctgcctcccgggttcaagcaattctcctgcctcaacctcctgagtagctggggttacaggtgcgtgccaccatgcccggctaattttttgtatttttagtagagacggggtttcaccatgttggccaggttggtcttgaactcctgaccttgtgatctgcccacctcggcctcccaaagtgctgggattacaggtgtgagccaacgcgtctggcccttttttttttttttttttgagactgagtctt

SEQ ID NO: 1198 - protein, 183 aa, Homo sapiens
MSSCCISQCLFLILRCFKGWKHSPSSGAAGRGDGDCRDTIPALEARTTMTTPETARSTAMNARAQYRDFTYMGSPGTGANRIIRLVETIPTNPTQNHRHSTPASHPPHPSTHPLSLGCQHKPQRLSSNFIFWRKKPDILFFFFFFFGDRVLLCRPGWSAVVRSRLTATSASRVQAILLPQPPE

SEQ ID NO: 1199 - DNA, 940 bp, Homo sapiens
  source (1)..(940)
  CDS (201)..(740)
cttgatgcctgtgtgccttgggtcccgtctgcccggctgggcctggcatggagctgcacgcagaacttcagacagcagcgggtgtgcatgtgtgagctttagattctttctggagagcgtgtggagggggtacggtgaggggtgaatgtgactgggacacatgcagtgcctggaggctggggtgcctcggaggattgaggatgaagctgtgtgttggggcgtgctggggtagtactgccgcgagcagtttttcccagaactgcccaaagctggctcagcccactcccattgaaggagggttccctggctcagccactcccattggaggacggctccctggctcagccactcccactggaggagggttccctggctcagccactcccattgaaggagggttccctggctcagccactcccattggaggacggctccctggctcagccactcccactggaggagggttccctggctcagccactcccattggaggagggttccctggctcagccactcccattggaggacggctccctggctcagccactcccactggaggagggttccctggttcagccactcccattggaggagggttccctggctcagccactcccattggaggagggttccctggctggctccatagctgctcttcttccacgagtgaagccacagagcctgttcttacccacttcctgcacaaaggctgtttccttacaggagcagagttaagctgagatccaccaggcagggctggcagctgatgccacaagttccactgagagaatcagtcaccgaggctgctcctgtgccctgtgccctgtgccctgtgcccctccccgcttctgctctgcccacttccatgctcccttgggccacggaactgtcatgactcggcctgagagcagtgggctcccatgtcgcctgggatctccac

SEQ ID NO: 1200 - protein, 179 aa, Homo sapiens
MKLCVGACWGSTAASSFSQNCPKLAQPTPIEGGFPGSATPIGGRLPGSATPTGGGFPGSATPIEGGFPGSATPIGGRLPGSATPTGGGFPGSATPIGGGFPGSATPIGGRLPGSATPTGGGFPGSATPIGGGFPGSATPIGGGFPGWLHSCSSSTSEATEPVLTHFLHKGCFLTGAELS

SEQ ID NO: 1201 - DNA, 1561 bp, Homo sapiens
  source (1)..(1561)
  CDS (201)..(1361)
gtgcggggcccgtccaaccaactcaggacgaccacccaggcctcgcagcagcccgtgaagagtgggctctgagaatgtggggcacaccaggctccctctctggtccccaaccccagccgctgaaataagtgcagccacagcagcccccggtcacgacccgagacggccatttttcaacgctcaacttcactttcacagaaatgcaccaaaggcagcctcgctctgtggtctgcagcgattactgcaccaggagaaggcacccctgtacctgcagcacttctgggccagggctttgggacgggacgcgagctgaccacctgttccttctttccgcagggtcgcggagctcgccggccgccatgtggagctgcagctggttcaacggcacagggctggtggaggagctgcctgcctgccaggacctgcagctggggctgtcactgttgtcgctgctgggcctggtggtgggcgtgccagtgggcctgtgctacaacgccctgctggtgctggccaacctacacagcaaggccagcatgaccatgccggacgtgtactttgtcaacatggcagtggcaggcctggtgctcagcgccctggcccctgtgcacctgctcggccccccgagctcccggtgggcgctgtggagtgtgggcggcgaagtccacgtggcactgcagatccccttcaatgtgtcctcactggtggccatgtactccaccgccctgctgagcctcgaccactacatcgagcgtgcactgccgcggacctacatggccagcgtgtacaacacgcggcacgtgtgcggcttcgtgtggggtggcgcgctgctgaccagcttctcctcgctgctcttctacatctgcagccatgtgtccacccgcgcgctagagtgcgccaagatgcagaacgcagaagctgccgacgccacgctggtgttcatcggctacgtggtgccagcactggccaccctctacgcgctggtgctactctcccgcgtccgcagggaggacacgcccctggaccgggacacgggccggctggagccctcggcacacaggctgctggtggccaccgtgtgcacgcagtttgggctctggacgccacactatctgatcctgctggggcacacggtcatcatctcgcgagggaagcccgtggacgcacactacctggggctactgcactttgtgaaggatttctccaaactcctggccttctccagcagctttgtgacaccacttctctaccgctacatgaaccagagcttccccagcaagctccaacggctgatgaaaaagctgccctgcggggaccggcactgctccccggaccacatgggggtgcagcaggtgctggcgtaggcggcccagccctcctggggagacgtgactctggtggacgcagagcacttagttaccctggacgctccccacatccttccagaaggagacgagctgctggaagagaagcaggaggggtgtttttcttgaagtttcctttttcccacaaatgccactcttgggccaaggctgtggtccccgtggctggcatctggcttgag

SEQ ID NO: 1202 - protein, 386 aa, Homo sapiens
MHQRQPRSVVCSDYCTRRRHPCTCSTSGPGLWDGTRADHLFLLSAGSRSSPAAMWSCSWFNGTGLVEELPACQDLQLGLSLLSLLGLVVGVPVGLCYNALLVLANLHSKASMTMPDVYFVNMAVAGLVLSALAPVHLLGPPSSRWALWSVGGEVHVALQIPFNVSSLVAMYSTALLSLDHYIERALPRTYMASVYNTRHVCGFVWGGALLTSFSSLLFYICSHVSTRALECAKMQNAEAADATLVFIGYVVPALATLYALVLLSRVRREDTPLDRDTGRLEPSAHRLLVATVCTQFGLWTPHYLILLGHTVIISRGKPVDAHYLGLLHFVKDFSKLLAFSSSFVTPLLYRYMNQSFPSKLQRLMKKLPCGDRHCSPDHMGVQQVLA

SEQ ID NO: 1203 - DNA, 922 bp, Homo sapiens
  source (1)..(922)
  CDS (201)..(722)
  modified_base (812)..(911): a, t, c, g, unknown or other
ctcccctttaacccaatcttccacacttagctgtataacttgtaataactcatgaaaacccagacacatacataggaataggaattggaattctgaaaagtttaagtgtaactggaaaaccaaacccatgctcacttcattaactgatctctgtttctctcctattcatgtagctgaaattaagtcccttccaaaattcaatgaatgagacaaatcattcttgggtgacagaatttgtgttgctgggactgtctagttcaagggagctccaacctttcttgtttcttatattttcactactttatctagcaattctgttgggcaactttctcatcatcctcactgtgacctcagattcccgccttcacacccccatgtactttctgcttgcaaacctgtcatttatagacgtatgtgttgcctcttctgctacccctaaaatgattgcagactttctggttgagcacaagactatttcttttgatgcccacctggcccagattttctttgttcatctcttcactggcagtgaaatggtgctcctagtttccatggcctatgaccgttatgttgctatatgcaaacctccccactacatgacaatcatgagctgctgtgtatgtgttgtgctcgtcctcatttcctggtttgtgggcttcatccataccaccagccagttggcattcacgttaatctgccattttgtggtcctaataaggtagatagtttttttctgtgaccttcctctagcgtcgaagttagcctgcatagacacttatgttgtcagcctactaatagttgcagatagtggnnnnnnnnnnnnnnnnnnnnnnnnnnnnnnnnnnnnnnnnnnnnnnnnnnnnnnnnnnnnnnnnnnnnnnnnnnnnnnnnnnnnnnnnnnnnnnnnnnnntttcctggcaa

SEQ ID NO: 1204 - protein, 173 aa, Homo sapiens [sequence omitted]

SEQ ID NO: 1205 - DNA, 856 bp, Homo sapiens
  source (1)..(856)
  CDS (201)..(656)
ggtgtcctgtggccccaaaataattttttattttgttgtctcttttttcttggaaataaatattgtggactttcaaaactgttttctaatgtcttagccagactggaaccccagaccagatgcactggtcctatgcaaggcaaagaatgttgagtttggacctcttaagtatttccttcagttgacagaggagatacactatggtaagtgccaatcagacagcctctgtgaccgagtttattctcctgggcctctctgcccacccaaagctggagaaaacgttctttgtgctcatcctgctgatgtacctggtgatcctactgggcaatggggtcctcatcctgatgactgtgtccaactcccacctgcacatgcccatgtacttcttcctggggaacctctccttcctggacatctgctatacaacatcctcagtccccctcatccttgacagcttcttgacccccaggaaaaccatctccttctcagcctgtgcagtgcagatgttcctctcctttgccatgggagccacagagtgtgttctcctgagcatgatggcgtttgatcgctacgtggccatctgcaacccccttaggtaccctgtggtcatgagcaaggctgcctacatgcccataaggctgccggctcctgggtagctggaagcactgcttccatggtgcagacatcccttgcaatgaggctgcccttctgtggagacaacatcatcaaccacttcacctgtgagattctggctgtcctgaagttggcctgtgctgatatctctgtcaatgtgatcagtatgggagtgaccaatgtgatcttcctgggggtcccggttctgttcatctctttctcc

SEQ ID NO: 1206 - protein, 151 aa, Homo sapiens
MVSANQTASVTEFILLGLSAHPKLEKTFFVLILLMYLVILLGNGVLILMTVSNSHLHMPMYFFLGNLSFLDICYTTSSVPLILDSFLTPRKTISFSACAVQMFLSFAMGATECVLLSMMAFDRYVAICNPLRYPVVMSKAAYMPIRLPAPG

SEQ ID NO: 1207 - DNA, 1231 bp, Homo sapiens
  source (1)..(1231)
  CDS (201)..(1031)
  modified_base (208)..(307): a, t, c, g, unknown or other
tattaagggctgcaaacaggaaggattttattcaccatcgatgcggctccgagtagtcccaaagcgaggcagtgcccccaaggtctggctgaaaacgctgctctgccttcgcggtgacccccgggtctgtgctgagcaaaacgcagttccgccctcgcgttgcccccggcccgcccgcccgggtctgtgctgaggagaacatgctgcnnnnnnnnnnnnnnnnnnnnnnnnnnnnnnnnnnnnnnnnnnnnnnnnnnnnnnnnnnnnnnnnnnnnnnnnnnnnnnnnnnnnnnnnnnnnnnnnnnnntgacatgggatgtgggccatcgggcagagggcgcggagatggggcgctgccaggggagccaaggaggaaagagagcactttccaaattgtcttccagggtttcaatgtgcattttattaactcagaatctgtcgggaataatactagggagctacctttccctggagatgggtcttgtcagtggagtgagataggctggggggaggaagaggaatgggaggctcagtttataaatattaagatcagcaagggtgtgctgctggcaggagcagagggagcctggagatttgggtggctgccgttggtaagtggttgcaatccagagagtgggattgagttcctcccttgtcatgttagcatcccgtttcctgggcgcgggtctaatgccctgcaggtggtcatttcactcatggtggctttgtctctcttctgccatctccagactcagcttcgcactccagggctgcgtaccaccagccactgtcatgttaaccccttcccaggccaatgtgtccttggtctggagcccaatctgctggacagcctgggaccgtccattttcggggtggtgggcaacctggtggccatcgtggtgctgtgcaagtcgcgcaaggaacagaaggagaccaccttctacacagttatgcggctggttgccaccgacctgttgttcactttgctggtgagccaggtgaccatcaccatgtacatgaagggcgggtaacctgggggccagctgctgtgtgagtacagcatcttcagcttgttcttcttcagtcagtccggcctcagcatcgtctgtgccatgatatctatacaggtaatttgtgttagacattcttagaagagtttcaaaagttttatgtttttatctgggttataaacagagtcctcaaatgcatacaaaggaaatcatgccatgat

SEQ ID NO: 1208 - protein, 276 aa, Homo sapiens
  MOD_RES (3)..(36): Variable amino acid
MLXXXXXXXXXXXXXXXXXXXXXXXXXXXXXXXXXXDMGCGPSGRGRGDGALPGEPRRKESTFQIVFQGFNVHFINSESVGNNTRELPFPGDGSCQWSEIGWGEEEEWEAQFINIKISKGVLLAGAEGAWRFGWLPLVSGCNPESGIEFLPCHVSIPFPGRGSNALQVVISLMVALSLFCHLQTQLRTPGLRTTSHCHVNPFPGQCVLGLEPNLLDSLGPSIFGVVGNLVAIVVLCKSRKEQKETTFYTVMRLVATDLLFTLLVSQVTITMYMKGG

SEQ ID NO: 1209 - DNA, 856 bp, Homo sapiens
  source (1)..(856)
  CDS (201)..(656)
caaggagcacagtgtcctggtggctcagaggccaccgaggcacccccagatccccatccgctccctggacctgcagtggactgttgactccagccctgctccaggattcaggctggctctttggtcataaaggaacccattgccccctggtggtgactggacacagctgtggaaggaattccagactctggcggggtgaaatggggacaggtcctgcttctcacctagacctccccatgtctgtcaccagcatccctacccaggtgttcagtgtgggctcaccctcaagccccctctgtcctctcatttcttttcttttctttccttttttttttttttttgaggcagagtctcactctgttgcccaggctggagtgcaatggcgagatctcggctcactgcaacctccacctcccaggttcaagcgattctcctgcctcagcctcccaagtaactgggattacaggcatgtgccaccaacccaagctaattttttttttttttttgagacggagtttcgctcctgtcgcccgggctggagtgcaatggcgcaatctcggctcaccgcaacctctgcttcctgggttcaagcaattctcctgcctcagcctcctgagtcgctgggattacaggcacatgccaccatgcccagctaatttttgtatatttagtagagacgggtttcaccatgttggccaagctggtctgaaactcctgacctcaggtgatccacctgcctcacccaaagtgctgggattacaggtgtgagctaccacaccctgcctagtttttgtattttttgtagagacagggtttcaccatgttggccaggctggtctcaaactcctgacctcag

SEQ ID NO: 1210 - protein, 151 aa, Homo sapiens
MGTGPASHLDLPMSVTSIPTQVFSVGSPSSPLCPLISFLFFPFFFFFEAESHSVAQAGVQWRDLGSLQPPPPRFKRFSCLSLPSNWDYRHVPPTQANFFFFFETEFRSCRPGWSAMAQSRLTATSASWVQAILLPQPPESLGLQAHATMPS

SEQ ID NO: 1211 - DNA, 931 bp, Homo sapiens; identical to SEQ ID NO: 1171
  source (1)..(931)
  CDS (201)..(731)

SEQ ID NO: 1212 - protein, 176 aa, Homo sapiens [sequence omitted]

SEQ ID NO: 1213 - DNA, 895 bp, Homo sapiens
  source (1)..(895)
  CDS (201)..(695)
tgcttgaacctgggaggccgaggttgcaatgagccaatatcatgccactgcactccagtctgggcaacaagagcgaaactccacctcaaaaataatataaaataaaataaaataaaaaaggtgctttgtgttttcatggctactgtctcttatgaattaggatttctcaacagacaaaatgtattaatagttacatatgaatgcacttttgtggaaaacacatcattaatcatttttataaaatattacagttaatcgctctggcttgcatagatatttccttgaatgagaatataataatattgggcaaagtaaacttttcatttactttattactaccatttcagttctttatattcagttttttatattttcaccatctatgctgtattgaaatcaattcagctgaaggaaggaaaaaggtctcttccacctgttcagcccacataacagtggtgattgtgtttcaccggacaatcctcttcatgtacataaagtcaacatctaatggcactacttcagagaaactggttgacctgttctgcggggtagtaatgctcatgctcaatcttatcatctatagcctggggaatatggaggtgcttggggttatgaagaaattgatcagtatgagtagaccctggtgctggaaaaatgatgagaacctgacatctttgagttcatgtacaaaataagctcacatattttgaggcaagaattttaaatataaatagaacagaagaaatgacgattatgtctagaaacaaaatttcagcattagaaagaaatttcaacattaataatctaatatttatctttaagaaaatgaccatgacctcataaaaatacagagacaagtaatctaagaagtacatgtaaagttatgggagtcaga

SEQ ID NO: 1214 - protein, 164 aa, Homo sapiens
MHFCGKHIINHFYKILQLIALACIDISLNENIIILGKVNFSFTLLLPFQFFIFSFLYFHHLCCIEINSAEGRKKVSSTCSAHITVVIVFHRTILFMYIKSTSNGTTSEKLVDLFCGVVMLMLNLIIYSLGNMEVLGVMKKLISMSRPWCWKNDENLTSLSSCTK

SEQ ID NO: 1215 - DNA, 880 bp, Homo sapiens; identical to SEQ ID NO: 1167
  source (1)..(880)
  CDS (201)..(680)

SEQ ID NO: 1216 - protein, 159 aa, Homo sapiens [sequence omitted]

SEQ ID NO: 1217 - DNA, 922 bp, Homo sapiens
  source (1)..(922)
  CDS (201)..(722)
taataaactaccaatataactaacatgtgtcttcaattcactgctttatgagctagaaaaggaatcccagaagctaacctcaaagctgttaccaccactctagctagcggagatacacttgcccctcccacaccaattatctctcacttcatatgttaatgctgtacagacttgttaaactccaggtatgaaaaaataacatggaaaggaccaattggacagagatagagttcattctgcaaggactttcagggtacccaagagctgaaaaattccttttcgtgatgtgcttagtgatgtacctggtgattctcctaggtaatggcaccttgatcattctgacactcctggatgctcgtctccacacacccatgtacttcttccttgggaatctttccttcctagacatttggtacacatcctcctccatcccctcaatgctgatacacttcctatcagagaagaaaaccatctccttcactagatgtgtgattcaaatgtctgtctcttacactatgggatccaccgagtgtgtgcttctagcagtgatggcatatgaccgttatgtagccatctgcaaccctctgagatatcccatcatcatgggcaaggcactttgtattcagatggtggctgtctcttggggactaggctttctcaactcattgacagaaactgttcttgcaatacggttacccttctgtggaaaaaaatgtcattaatcattttgtttgtgaaatattggcctttgtcaagctggcttgcacagatacttccttgaatgagattattataatgttgggcaatgtaatatttttgttttctccattactgctgatttgtatctcctacatctttatcctttctactgtactaagaatcaattcagctgaaggaaggaaaaaggccttttccacctgct

SEQ ID NO: 1218 - protein, 173 aa, Homo sapiens
MERTNWTEIEFILQGLSGYPRAEKFLFVMCLVMYLVILLGNGTLIILTLLDARLHTPMYFFLGNLSFLDIWYTSSSIPSMLIHFLSEKKTISFTRCVIQMSVSYTMGSTECVLLAVMAYDRYVAICNPLRYPIIMGKALCIQMVAVSWGLGFLNSLTETVLAIRLPFCGKKCH

SEQ ID NO: 1219 - DNA, 928 bp, Homo sapiens
  source (1)..(928)
  CDS (201)..(728)
gtgaatgctgttttatcaccacagttattcctaaacttctggtcatctttctttcaggcaggcaaataatcccctttactacttgtctcatgcagtccttttcatttttatttcttgggtcaacagttttcttccttatggctgtgatgtccttggattgatacctggccatttgcaagcctctgcattactccaccatcatgagcctgaggactagcttccacctggtcactgtctgctttgtcgtgggcttcactctcatcactggtctcatggtgaaggtttcccagttatctttctgtggaccccatgtcatccctcacttcttccgtgacctcggccctctgatccaactctcctgttctgacaccagatctactgaaacgttggcctttgtccttgtttcattcgttctttttacatccctcattataaccatcattgcatatggcaacatagtagtcacaattgtacgactcccatcagccaaggagcggcagaaagctttctccacctgctcctctcacctcattgtcctctctctggtgtatggcagctgtgtcttcatatatgtgaagccgaagcaaatggacaggctggactccaacagaatggctgctcttgtgaacacagtggtgaccccactgctgaacccgatcatttacactctgcggaacaagcaggtccaccaggctctgagggatgctcagtccagaatgaaattgtaaaaacagaatcacaacctcccagtgaaggaatgcaccttctccttgatctaatccaatctttctcctgtttctggaatcctttataaaaaatttgcaaatatgttttttttaggttctgtttgttttttcttagaataagggctaattgtccctctccctctccctctccctgtctttttggcggccgcttgggcgggcgc

SEQ ID NO: 1220 - protein, 175 aa, Homo sapiens
MSLRTSFHLVTVCFVVGFTLITGLMVKVSQLSFCGPHVIPHFFRDLGPLIQLSCSDTRSTETLAFVLVSFVLFTSLIITIIAYGNIVVTIVRLPSAKERQKAFSTCSSHLIVLSLVYGSCVFIYVKPKQMDRLDSNRMAALVNTVVTPLLNPIIYTLRNKQVHQALRDAQSRMKL

SEQ ID NO: 1221 - DNA, 868 bp, Homo sapiens
  source (1)..(868)
  CDS (201)..(668)
gataggtctcttctttgtgtttctggtcatttttctcatcaccatggggggcaacctgggcatgattgtgctaatttaattcagactgaccctcggctccagactcccatgtacttcttcctcagtcatctttccttccctgaacattttcttactcttcttgttttttgtccctcagttgagactttgggactgataagatgatcatcacctatgagcgctgtgccagccaattcttctttttcacactctgtgctagcattgagtgtttccttttggctgtgatggcttatgaccggtacgtggctgtgtgtaaccccctcctctatgccatagtcatgacaccaaagacccgcctggcgctgctggccggggcatattctggtgccatagtcaattctgtgatctgcactggctgcaccttctctatctccttctctaagtccaaccatgtagacttctttttctgtgacctcccacccctgctgaagcttgcctgtagtgaaaccaggccacgggaatgggtaatctacctctcagcttttctggtcatcacaaccagcatttcagtgattcttacatcgtacttgttcatcattcagtctgttctgaagattcgtacagcaggtggaaagccaagaccttctccacctgtgcttctcacatgactgcattgactctcttctttggaacactcatattcatatacctgaaaggcaacatgggcgaatcccttgaggaagacaagatcgtgtcaatattttacactgtggtcatccccatgctaaatccaatgatctacagcctgagaaacaaagacatgaaagaggctctgaagaaagttttcaacaggataagggtttcccaa

SEQ ID NO: 1222 - protein, 155 aa, Homo sapiens [sequence omitted]

SEQ ID NO: 1223 - DNA, 940 bp, Homo sapiens
  source (1)..(940)
  CDS (201)..(740)
aacagatgctgatgccatgcttgcacagcctgcagaaccaggagccaaataaatctcttttctttataaatttacccagtttcagatattccttaatagcaacacaaaacagattgaaattcttcctcattgtaccttgcacagatgtagacgtgctcaagtaatactgtttgagtgattgccaactgtaacctctgcagatgacacctggagaactagcccttgccagtggcaaccacaccccagtcaccaagttcatcttgcagggattctccaattatccagacctccaggagcttctcttcggagccatcctgctcatctatgccataacagtggtgggcaacttgggaatgatggcactcatcttcacagactcccatctccaaagcccaatgtatttcttcctcaatgtcctctcgtttcttgatatttgttactcttctgtggtcacacctaagctcttggtcaacttcctggtctctgacaagtccatctcttttgagggctgtgtggtccagctcgccttctttgtagtgcatgtgacagctgagagcttcctgctggcctccatggcctatgaccgcttcctagccatctgtcaacccctccattatggttctatcatgaccagggggacctgtctccagctggtagctgtgtcctatgcatttggtggagccaactccgctatccagactggaaatgtctttgccctgcctttctgtgggcccaactagctaacacactactactgtgacataccaccccttctccacctggcttgtgccaacacagccacagcaagagtggtcctctatgtcttttctgctctggtcacccttctgcctgctgcagtcattctcacctcctactgcttggtcttggtggccattgggaggatgcgctcagtagcagggagggagaaggacctctccac

SEQ ID NO: 1224 - protein, 179 aa, Homo sapiens [sequence omitted]

SEQ ID NO: 1225 - DNA, 1075 bp, Homo sapiens
  source (1)..(1075)
  CDS (201)..(875)
tttaaacagaaggtatgtatgaagtttcaatagctgctttaaaaatgagttagcacgtggctcatagcaggtgttcaattcttaccagttcctctccctctttccctaacactgtctatcctggggatatttaaaaatctctgggcactgaccctaactctagggtacacacgtgtcttatttggtctctctgcagtgacatgcacaccatggtggagaaccacacccaagtcacctggttccgcctgctgggacttacagagcaggaggagctcagaggcatcctctttgtgctcttcctgctcatgcattcagtcactgttatgggcaacctgggaatgatcactctgatccatgcagacccacagctccacacccccatgtatttcttcctgagcgtcctatccttgatagactcctcgttttccacagtggacatccccaggctgctggagagcttcctcatctcaagccaatccatctcctttgcaggctgtatggtccagatggccctcatgatcctccatggtactgctgagtgtctgctcctggccatcatggcctatgaccgattcaccgccatctgccaccctctcctctatcacactattatatcccaatgtctgtgtgccctgctggtggtgacctgctatactgtttctgttgccaattcagctttgctgactgggtgcatctttaagctgccctactgtggccccaatgtcattaaccactatttctgtgacatcccccctgtgctccaacttgccggtgcagatactacgaggttgagaccattatcttctcattgtgtgccttgctcatcctctttaccatcaccattatcccagtctcctatgcctacatcctcgtgaccatttgcaggatgcgctccctgcaagcccagagcaaagctctctccacccccacctcaccatcatctgcctcttctatagcaccatcaccttcatgtatgctcagccaagctctcacaattccatggaacacaacaaggtcatgtctgtcttctacactgtggtcatccgcaggctgaaccctctgatctacagcctga

SEQ ID NO: 1226 - protein, 224 aa, Homo sapiens [sequence omitted]

SEQ ID NO: 1227 - DNA, 856 bp, Homo sapiens
  source (1)..(856)
  CDS (201)..(656)
ctctccatagcatttctagcaatctatgtggttaccccagtaggtaatattggaatgatcctacttatcaaaattgatgcttctcttcatatccccatgtaaattttcctccaacacttggcatttgttgatctctgttacacctctgctatcactcccaagatgttgaaaaactttgtagaaacaaaaaaatctatctcatgtataggatgtatggtgcaattactagtttatggtactttgcaacaagtgactgctacatcctggctgctatggcagtagaccgttatgtggccttctgtaacccactccattatccaggggttatgtcccagagactctgcattaagctattagttagttcatatgtcatgggtttcctaaatgcctctataaacataagtttcactttctcattgaacttctgcaaatccaaaacaattaatcactttttctgtgatgaacctccaattattgccctaccatgctccaatattgacctcaacatcatgttattaacagtatttgtgggattaaatttgatgtgcactgtgatggtggtcatcatttcctgcatatatgtcctggttgccatcctgaggatatcttctgctgcagggaagaaaaaagtctctctacatgtgcctcccacctgacagcagtcaccattttctatggggttctctcttacatgtatctatgccatcgtattaatgagtctcaaaaacaagaaaaagtggcctctgtgttttatggcattattattcccatgttaaaccccttgatttacagccagagaaaccaagatgtgattgaagccataaaactaacagaaaaaaagtatttctaatttgaa

SEQ ID NO: 1228 - protein, 151 aa, Homo sapiens [sequence omitted]

SEQ ID NO: 1229 - DNA, 1030 bp, Homo sapiens
  source (1)..(1030)
  CDS (201)..(830)
ttcctaatcagattcactcctcagctccaaacccacatgtattttttccttactcatttagcatgtgtggatattttttactccactaatgtctctccacagagcttgttaatttcttatctgagaagaagaccatttcctacgctgggtgtctggcccagtgttttgtctttgtgactctgctccttactgagtattacatgcttggtgccatggcctatgactgctacatggcaatctgcaatcccctacattacagcagcaaaatgtccagagcagtttgcatctgcctggtgactttcccctacttctggggttctatggtgggcacgatgcaagtaatactgacctctcgtttgtccttttttggacccaacaccatcaaccatttctactgtactgacccacccctcttaatgttgacatcttctgacacttacataaaacaaactgccttgtttgtgtcagcagggattaacctcacagtttccctgctcatcattctcatctcctacattttcattttcatcaccattatgaggatccgttccagtgaagggcagctcaaagccttctccacctgtggctcccacctgacagctgtcactatgttctatgggtccctattctgcatgtacctgagaccaacaaatgagctgtctgttgagcaagggaaaatgggagtggtgttttgtatttttgtgagtcccatgctgaacccgtttatctaccgcctgagaaacaaggatgtgaaacaggccttgaaaagagtgtttatgagaaaccttggtaagacgaagaaaaattcagtaactacagtttcccaataagaaataaatgagtctctaaaaaaatcaaaaagtgaccttcattggttctacctaaatgcaattctctggaataacagtgatatacttttggatatgcatagcttaggatcaagtgcaagtctaatgggaataatgaatgtgaaagttgtttggaagtgatgattgataggaatcaccacagcagaagtcagctgtttatg

SEQ ID NO: 1230 - protein, 209 aa, Homo sapiens [sequence omitted]

SEQ ID NO: 1231 - DNA, 919 bp, Homo sapiens
  source (1)..(919)
  CDS (201)..(719)
taaaaaactctatattagtttagatgtttaaagcatcaatcacatgctcactaggctatttcttaatgtcacatgtatttacattttgagagaagaggaagaaatagcagatgacaccactggggtaatgcataaatgacaaacctaaatgcattttaatttccttttatttagatgtcatttgaagccaagcaaacacaatgttaaagaaaaaccatacagccgtgactgagtttgttctcctgggactgacagatcgggctgagctgcagtcccttctttttgtggtatttctagtcatctaccttatcacagtaatcggcaatgtgagcatgatcttgttaatcagaagtgactcgacactacacactccaatgtacttcttcctcagtcacctctcctttgtagatctctgttataccaccaatgttactcctcagatgctggttaactttttatccaagagaaaaaccatttccttcatcggctgctttatccaatttcactttttcattgcactggtgattacagattattatatgctcacagtgatggcttatgaccgctacatggccatctgcaagcccttgttatatggaagcaaaatgaccaggtgtgtctgcctctgtctcgctgctgctccctatatttatggctttgcaaatggtctaagcacagaccaccctgatgcttcgtctgtccttctgtggacccaatgacatcaaccacttttactgtgcggacccacccctcttagtcctcgcctgctcagatacttatgtcaaagagaccgccatgttggtggtggctggttccaacctcatttgctctctcaccgtcatcctcatttcctacactttcatcttcactgccattctgcgtatccacactgctgaggggaggcgcaaggccttctcca

SEQ ID NO: 1232 - protein, 172 aa, Homo sapiens [sequence omitted]

SEQ ID NO: 1233 - DNA, 859 bp, Homo sapiens
  source (1)..(859)
  CDS (201)..(659)
tggatctgtgcttctcttccaatgtgaccccaaagatgctggagattttcctttcagagaagaaaagcatttcctatcctgcctgtcttgttcagtgttacctttatatcaccttggtacacgttgagatctacatcctggctgtgatggcctttgactagtacatggccatctgaaaccctctgctttatggcagcaaaatgtccaaaagtgtgtgttccttcctcatcacggtgccttatgtgtatggagcgctcactggcctgatggagaccatgtggacctacaacctagccttctgtggccccaacgaaattaatcacttctactgtgcagacccaccactgattaagctggcttgttctgacacctacaacaaggagttgtcaatgtttgttgtggctggctggaatctttcgttttctctctttatcatatttatttcctacttttacatttttcctgctatcttaaggattcgctctacagagggcaggcaaaaagctttttctacctgtggctcccatctgacagctgttactattttctatgcaactctgttcttcatgtgtctcagacctccatcagaagagtccatggagcaaggacaaatggtagctgtactttataccactgtgatccccatgttaatcccatgatctacagtctgaggaacaaggatgtgaaaaaggctttatccaaagaactgttcaaaagaaaattgtttcctaaataaacatcagtattgatttttgtcatgctgtcattttatttagcctataattttttcatagagcttagtgcaatacaaatttatccaaaattatacattttccttgaagggttagggaatttttat

SEQ ID NO: 1234 - protein, 152 aa, Homo sapiens [sequence omitted]

SEQ ID NO: 1235 - DNA, 982 bp, Homo sapiens
  source (1)..(982)
  CDS (201)..(782)
tcagcttcatacacccatgtattttttcctcagccatctggcttttgttgatttttcttttacttcatctgttgccccaaataccttggtaaattttctgtgtgaagttaaaagtataacattttatgcatgtgccattcaggtatgctgcttcatcacatttgtagtttgtgaattatatttgctctcaatcatggcatatgatcggtatgttgccatctgtaaccctttactttatgtcattctcattcctagaaaactgtattaaactgattgctagcacgtatgtgtatggattcactgtgggacttgtacagacagtggcgacatcctacttgtctttttgtgattccaacgtgatcaaccacttctaccatgatgatgttccattagtggctctggcctgttctgacactcatgtcaaagagctgatgttgttaatcattgctgggttcaatactctctgctctctagtaattgtgctgatttcttatggtttcattttctttgccatcctgaggatacattctgctgaagggagacagaaagcattttctaccagtgcttcccatctgacctccatcacaatattttatggaacaatcatttttatgtacccgcagcccaagtcaagccattccctgaatatggataaagttgcttctgtgtttaatgtggtagtgattcctacattaaacccactgatctatagtttaagaaatcaggaggtaaaaaatgcactaaagagaattatagaaaagttatgtttggctgtcaaataacctaaaaatccctagacagaggcaaaacccaggactttgagttgtgtcttatctagagtcacattggtggtaaatgacagagccaaattccgtagtttggctactcaacatcactcagggtatgtttcatccactgtgtcgttttccatagtttccacataaaatgcatttggtaaattttatgtcattgaattgtaaaa

SEQ ID NO: 1236 - protein, 193 aa, Homo sapiens
MIGMLPSVTLYFMSFSFLENCIKLIASTYVYGFTVGLVQTVATSYLSFCDSNVINHFYHDDVPLVALACSDTHVKELMLLIIAGFNTLCSLVIVLISYGFIFFAILRIHSAEGRQKAFSTSASHLTSITIFYGTIIFMYPQPKSSHSLNMDKVASVFNVVVIPTLNPLIYSLRNQEVKNALKRIIEKLCLAVK

SEQ ID NO: 1237 - DNA, 853 bp, Homo sapiens
  source (1)..(853)
  CDS (201)..(653)
taaattactgagagtacaaaacatgcctttttcaaatttgcaattccaaagtctatgacagatttgacatagatactgcatacacatttttaattgaatgaacaaacaaaatattaaaatcataatacatttaaagttttcccccttgttttataggtaaactgcttctatgatctgaagtaagcagctataaagaatagatggagctaaggaccaatgtgactgactttgtactcttgtgcttcacgcagaatccaaaggagcagaaagtactttttgttatgttcttgctcttctacattttgaccatggtgggatacctgctaattgtagtcaccgtaactgtcagtgagaccctgggctcaccaatgtacttctttcttgctggcttatcatttatagatatcatttattcttcatccatttcccacagattgatttcagacttgttctttgggaataattccatatccttcccatcttgcttggcccagctctttacagagcacctttttggtgggtcagaggtctttcttctgttggtgatggcctatgaccttgcattacttggttatcatgagacaatgggtgtgtgttttgctgctggtagcgtcctgggttggaggatttctgcactcagtatttcaacttagtgttatttatgggctcccattctgtgacctcaatgtcattgatcattttttctgtgatatgcaccctttattgaaactggtctgtactgatacccatgttattggcctcttagtggtggccaatggaggactaggttgcactattgtgtttctgctcttactcatctcttatggtgtcatctgcactctctaaagaacct

SEQ ID NO: 1238 - protein, 150 aa, Homo sapiens
MELRTNVTDFVLLCFTQNPKEQKVLFVMFLLFYILTMVGYLLIVVTVTVSETLGSPMYFFLAGLSFIDIIYSSSISHRLISDLFFGNNSISFPSCLAQLFTEHLFGGSEVFLLLVMAYDLALLGYHETMGVCFAAGSVLGWRISALSIST

SEQ ID NO: 1239 - DNA, 973 bp, Homo sapiens
  source (1)..(973)
  CDS (201)..(773)
ggtcagcccaactttggatgccccatgtacttcttccttggctacttatcatttatggatgctgttcattctactacagttaccccaaatatgattatagacttactctatgagaagaaaaccatttcgttccaagcttgattacccagatttttataggacacctatttgggggtgctgagattttactccttgttgtcatggcctatgatggctacgtgaccatctgcaaacccctgcattatttgaccatcatgaaccaacgggtgtgcattctactgctgctgttggcctgggctggaggtttcttgcatgctgtagttcaacttctttttgtttacaaccttcccttctgtggccccaatgtcattgaccatttcatctgtgacatgtaccctttattaaaacttgcctgcactgacacctatgttactggcctcactgtggttgccaatgatggggcaatctgtgtggtcatctttatgctcttactcttctcctatggggtcattctgcactccctgaagaatcttagtcaggaagggaggcacaaagccttatccacctgtggctcccatatcactgtggtgatcctcttctttgtcccttgtattttcatgtatgtgagacctcctttgaccttacccattgataaatccttgactgtgttttacactgttatcacacctatgttgaaccctctaatctatactttaagaaatgcagagatgaaaaatgctatgaagaagctctggactagaaaaagaaaatgaggtggcagacaaatgtatcatctattttcagtgaagagttgctccctccaggaaagccatttgtgattatttaatggcagtgaaattttcctcaggtttaataactagtatgcagtgaaaatcatttattacatgaatacttgcaataatcaaaatatatttagaaaattttaataatttattggaaaaatatatgttca

SEQ ID NO: 1240 - protein, 190 aa, Homo sapiens
MAYDGYVTICKPLHYLTIMNQRVCILLLLLAWAGGFLHAVVQLLFVYNLPFCGPNVIDHFICDMYPLLKLACTDTYVTGLTVVANDGAICVVIFMLLLFSYGVILHSLKNLSQEGRHKALSTCGSHITVVILFFVPCIFMYVRPPLTLPIDKSLTVFYTVITPMLNPLIYTLRNAEMKNAMKKLWTRKRK

SEQ ID NO: 1241 - DNA, 1003 bp, Homo sapiens
  source (1)..(1003)
  CDS (201)..(803)
ctaggcgagcaaataacacattctcagcagcaggtaaaagttattttgaaacaagtctaagtaaagcagataatgggacagaaaggtgagggagagattttaatggtatagctacacaaagcatttttttttcttataacctaaggtgattctgaagataatgaaatcattgcatcattatttggaatgagtgcacaataatggccacgtgtagtggacacctaccacatgccagagacaaggctgggaattttatatacattatgtctcatctcacagcgtctttgcaaggcagttttttttttcttttatatggagtctcgctctgtcacccaggctggagtgaagtggcacgatcttggctcactgcaacctctgcctcccaggttcaagtgattctcctgcctcagccgcccaagtacctgggacttacaggtgtgcaccaccatgcctggctaatttttgtattttcagtagagagggggtttcaccatgttggccaggctagtcttgaactcctgacctcaagtgatctgcctgcctcagcctcccaaagtcctgagattataggtgtgagccacagcgcccggcctgacagatttcttatcagtttcacagatgagggaattggggctccaaggaggtcacataacccccaccaccatgcctccacccccctaccccacccccacccaagccataggcagtggtttgaggagctggaatccaaaccaggtctgttagattctcccctgccctccaccaggtccctcatgattctgttgatggaaggcaatatttaacaagtgactcacaaagtgacttgggtgtaatacctagatctgttcagtgcgttccttagaaagctcctcatgatctcaatgcaatcattctctggttcccatctccccttacagcacagagcaccaatttcgttcctacccttgcccttcaggtataacccgtggctggttcccttccttagaaagtgcattcatgaagt

SEQ ID NO: 1242 - protein, 200 aa, Homo sapiens [sequence omitted]

SEQ ID NO: 1243 - DNA, 868 bp, Homo sapiens
  source (1)..(868)
  CDS (201)..(668)
aaagattggaaaattacttcatctttatgaaagaagctttgtaacagggaaggccaggataactgtagaattatctaccatggttgatgccgtttccacatagagaatgggttatcagttctcaattaactgctacatgctggatgctctttatatcccagtggggagagagatgaagggtgagaagaaatgtccaactcatgacagcattcatcctcatggaccttccccatgtcccagctctggacgccccactctttggagtcttcctggtggtttatgtgcttactgtgctggggaacctcctcatcctgctggtgatcagggtgtactctcacctccacacccccaagtactacttcctcaccaatctgtccttcattgacttgtggttcttcactgtcatggtgcccaaaatgccgaggaccttgttgtccctgtgtggcaaggctgtgtccttccacagttgtatgacccaactctatttcttctacttcctggggagcaccgagtgtttgctctacacggtcatgtcctatgatcgctatagaggaaatactcagcacttcccaggtagtgaaaacactccccacgaagtgagccaaatgctagtggcccggggggcacacgggctcccactcatcatcctggcagatctgagtgggtaactaagagttgatagttcttagtgggcaattcaaaattagtaatataatttagttatccaagtgaaatttattacatgtataggtctcagcattaaacattattccaaacaacttgcacagttataattctttcacagattatctaagacatttttaaattcacagctagatttttatttatgatgaacatgcttgtagta

SEQ ID NO: 1244 - protein, 155 aa, Homo sapiens [sequence omitted]

SEQ ID NO: 1245 - DNA, 994 bp, Homo sapiens
  source (1)..(994)
  CDS (201)..(794)
gaatcatcgcctccaaaccccaatgtacttcttcctcagtaatttgtcaattttggacatttttttcaccacctcagttatcccaaagctattagcctgtctcctgcaggacaagaagaccatatcttttgctgggtgcatcacccaaacttatttcctttgttttcttggggacagtggagtttatcctcttggcagtgatgtcctttgactgctacgtggccatctgtgaccccctgcactacaccattatcatgaacagcagggcctgcctcctactagttctgggctgctgggttggagccttcctgtctgtgttgtgcccaaccattgtggtgtccagattgcctttctgttacaaggaaattagtcacttcttctgtgacatcacccctctgctacatgtgtcctgtatagacactcatttcatcgagatgataaacttcctcttatcttccctcatcctcctgacctcactggtgctcaccactgtgtcctacatctacatcatttctaccatcctgcacatcccctcagcccaaggacgtcggaaggccttttccacgtgcgcttcccacatcaccgtcatttccatcgcttatataagcaacatcttcaggtatgtgaggcccagccagagtcattcaatgggttttgacaaggtgacagctgtccccacaatggtgacccctcttctgaatcccttcacttatagtctaagaaatgaaaaggtaaaggcagtcttgaaagaagcagtcagcaaaattatgtcctcatggcacaggagaacttaaaactttaaccaagcttttctgctcagaatggttattttcatctctagctcagtgtggagaaagacagatttagacaccagaaaatcaaaggcatatgggaaggtatgaataggctcagtgccgcatcagaggcaaagtactgtagtcacagtttagaagagacaattcagccatagagaaaatgacattccctgaactct

SEQ ID NO: 1246 - protein, 197 aa, Homo sapiens [sequence omitted]

SEQ ID NO: 1247 - DNA, 934 bp, Homo sapiens
  source (1)..(934)
  CDS (201)..(734)
agccatttggcttctgtggacattgggtattccatatcagttacgccaatcattctcatcaatttcttaagagagaaaacgactattcctgtcacaggctgtatagcacagcttggctctgatgtcatgtttggaaccacagagtgcttcctgctggtcactatgtggctatctgctctcccctgctttactccatccaaatgcccccagtcgtctgcttcctcctactgggagcctcctacctgggtggatgcctgaacgcttcgtcttttacaggctgtttgatgaacctgtccttctgcggtccaaataaaatcaaccactttttctgtgacctcttcccactcttgaagctttcttgtggccatgtttacattgctgaaatatcccctgccatctcctgtgcatctgtccttatcagcacgctgtttaccataatcgtgtcctacatctacatccttcactccatcctgaaggtgtgctctactgagggaaggaagaaggctttctccacctgcgcttcccacctcactgcagtcactttgttctatgggaccattttgtttgtttatgtgatgcccaagtcaagctattcagcggatcaggtcaaggtggcatttgtgatctacacggtggtgattcccatgctgaaccccctcatctacagtctcaggaataaggaggtgaaagaggccatgagaaaattgatggcaagaacacattggttttcctgaattaaatcagtataatccataaataactaaaccaatgatttcggagacatttgtccttaatattctaattatatttatcattgactgtatcacttatatagtgaagtgcttgtataaatatagaaagccaatgcttacttccatgtacaaagttaattgtgtaatttatatggatatctgctggagtcgatttttttttt

SEQ ID NO: 1248 - protein, 177 aa, Homo sapiens
MPPVVCFLLLGASYLGGCLNASSFTGCLMNLSFCGPNKINHFFCDLFPLLKLSCGHVYIAEISPAISCASVLISTLFTIIVSYIYILHSILKVCSTEGRKKAFSTCASHLTAVTLFYGTILFVYVMPKSSYSADQVKVAFVIYTVVIPMLNPLIYSLRNKEVKEAMRKLMARTHWFS

SEQ ID NO: 1249 - DNA, 928 bp, Homo sapiens
  source (1)..(928)
  CDS (201)..(728)
agcatcatggaggaagtggaaatgaataatttaaataattaatggggtgagggaagccaaagacatgctccacagttaactaccctatctctatactgtgaaattcagactgtaatcctttaatgattaataataatctttctttatctatctcttgtaggtaattcagaccctaatacctggaaggtattactctctgaatggatcaccacatgcctcccaacaatgtgactgaattcattctcttggggctcacacagaatccacacttgcagaaaatactctttattgtatttttatttatttttctatttaccatgctggccaatctgttcattgtcatcaccatctcctgtagccccacactttcatcacccatgtacttctttctcacttacttatcctttatagatgcctcctacacctctgtcacaacccccaaaatgatcaccgacctgctctaccagaggagaactatttccttggctggctgcctgactcagctctttgtggagcacttgctgggaggctcagagatcatcctccttattgtcatggcctatgaccgctacgtggccatctgcaagcccctgcactacacaaccattatgcaacaagggatctgccaccttctggtggtgatagcctggattggaggcatcctgcatgccactgtgcagattcttttcatgaccgacttgcccttctgtggtccccaatgtcattgaccactttatgtgtgatctcttcccattgttgaaacttgcctgcagagacacctacagacttgggatgctggtggcagccaacagtggagccatgtgcttgctcatcttttccctgctcgtcatctcctacatagtcatcctgagctccctgaaatcctatagctctgaaggacagcgcaaagccctctccacctgtggct

SEQ ID NO: 1250 - protein, 175 aa, Homo sapiens [sequence omitted]

SEQ ID NO: 1251 - DNA, 943 bp, Homo sapiens
  source (1)..(943)
  CDS (201)..(743)
  modified_base (62)..(161): a, t, c, g, unknown or other
ctatggttatttgaggttgggaagggtagacaagttcagaagataggagagatttgtgaatnnnnnnnnnnnnnnnnnnnnnnnnnnnnnnnnnnnnnnnnnnnnnnnnnnnnnnnnnnnnnnnnnnnnnnnnnnnnnnnnnnnnnnnnnnnnnnnnnnnngttgaccgctatgtggacatctgtaagcccttgcactacatgaccatcataagccagtgggtctgtggtgttttgatggctgtggcctgggtgggatcctgtgtgcattctttagttcagatttttcttgccctgagtttgccattctgtggccccaatgtgatcaatcactgtttctgtgacttgcagcccttgttgaaacaagcctgttcagaaacctatgtggttaacctactcctggtttccaatagtggggccatttgtgcagtgagttatgtcatgctaatattctcctatgtcatcttcttgcattctctgagaaaccacagtgctgaagtgataaagaaagcactttccacatgtgtctcccacatcattgtggtcatcttgttctttggaccttgcatatttatgtacacatgccctgcaaccgtattccccatggataagatgatagctgtattttatacagttggaacatcttttctcaaccctgtgatttacacgctgaagaatacagaagtgaaaagtgccatgaggaagctttggagcaagaaattgatcacagatgacaaaagataaatgaaggtttcaaatccttctttatagtttggagtgacctagaagaaatcaatgagaatattatatttttattgttgatttaatgtaatcctgccttggtacatgaggattagttcctttgggaaaagagacagtgtaaacaaataacaatggttaatgttgagtcagttttatgtggcagaaaagacagcatgcaatac

SEQ ID NO: 1252 - protein, 180 aa, Homo sapiens
MTIISQWVCGVLMAVAWVGSCVHSLVQIFLALSLPFCGPNVINHCFCDLQPLLKQACSETYVVNLLLVSNSGAICAVSYVMLIFSYVIFLHSLRNHSAEVIKKALSTCVSHIIVVILFFGPCIFMYTCPATVFPMDKMIAVFYTVGTSFLNPVIYTLKNTEVKSAMRKLWSKKLITDDKR

SEQ ID NO: 1253 - DNA, 946 bp, Homo sapiens
  source (1)..(946)
  CDS (201)..(746)
  modified_base (2)..(3): a, t, c, g, unknown or other
  modified_base (31)..(32): a, t, c, g, unknown or other
  modified_base (70)..(71): a, t, c, g, unknown or other
  modified_base (111)..(112): a, t, c, g, unknown or other
  modified_base (143): a, t, c, g, unknown or other
tnnccaaaggttttatactttgggttgcttnnattagaagacaatagcctatctacctacagtgcctgtnngctgctctagtatgttcttttgtgcccagtctttgccacnntgtgggaaatattaccttcttgtcctcaatngggcctgatgaccgctacgcgagcccagtgtgtaaccccctacattataccaccaccatgacaacacgtgtgtgtgcttgtctggctataggctgttatgtcattggttttctgaatgcttctatccaaattggagatacatttcgcctctctttctgcatgtccaatgtgattcatcactttttctgtgacaaaccagcagtcattactctgacctgctctgagaaacacattagtgagttgattcttgttcttatatcaagttttaatgtcttttttgcacttcttgttaccttgatttcctatctgttcatattgatcaccattcttaagaggcacacaggtaagggataccagaagcctttatctacctgtggttctcacctcattgccattttcttattttatataactgtcatcatcatgtacatacgaccaagttccagtcattccatggacacagacaaaattgcatctgtgttctacactatgatcatccccatgctcagtcctatagtctataccctgaggaacaaagacgtgaagaatgcattcatgaaggttgttgagaaggcaaaatattctctagattcagtcttttaatgatgcaaaatcatcacaatgttattttatctcacttagatctactttatacaataactcaaatgttaaaatgctatatggtatatagaatgtaaaatttcatctaatattatttttgtctttagttgagaaacagttctaagtatccacgagttagaaaaatacgatgacaatttctcatggagttaatgaaatatgtg

SEQ ID NO: 1254 - protein, 181 aa, Homo sapiens
MTTRVCACLAIGCYVIGFLNASIQIGDTFRLSFCMSNVIHHFFCDKPAVITLTCSEKHISELILVLISSFNVFFALLVTLISYLFILITILKRHTGKGYQKPLSTCGSHLIAIFLFYITVIIMYIRPSSSHSMDTDKIASVFYTMIIPMLSPIVYTLRNKDVKNAFMKVVEKAKYSLDSVF

SEQ ID NO: 1255 - DNA, 859 bp, Homo sapiens
  source (1)..(859)
  CDS (201)..(659)
  modified_base (788)..(859): a, t, c, g, unknown or other
acaagaactggatttcaaactggatttgaggacccccacctttggtaagtgacttattatctgcgagcctctgtttctctcttctttaaatgaggacagtaaatcccatacggcagggtggtggggagaatcagagatgatacagctggtgatcacatctggtttgtgttcccaggggcaccagactagggtttctgagcatggatccaaccgtcccagtcttgggtacaaaactgacaccaatcaacggacgtgaggagactccttgctacaagcagaccctgagcttcacggtgctgacgtgcatcatttcccttgtcggactgacaggaaacgcggttgtgctctggctcctgggctgccgcatgcgcaggaacgctgtctccatctacatcctcaacctggccgcagcagacttcctcttcctcagcttccagattatacgttcgccattacgcctcatcaatatcagccatctcatccgcaaaatcctcgtttctgtgatgacctttccctactttacaggcctgagtatgctgagcgccatcagcaccgagcgctgcctgtctgttctgtggcccatctggtaccggccgccgccccacacacctgtcagcggtcgtgtgtgtcctgctctggggcctgtccctgctgtttagtatgctggagtggaggttctgtgacttcctgtttagtggtgctgattctagttggttgaaacgtcagtttcatcccagtcggtggctgatttttttatgtgtggttctctgtgttccagcctggtcctnnnnnnnnnnnnnnnnnnnnnnnnnnnnnnnnnnnnnnnnnnnnnnnnnnnnnnnnnnnnnnnnnnnnnnnn

SEQ ID NO: 1256 - protein, 152 aa, Homo sapiens
MDPTVPVLGTKLTPINGREETPCYKQTLSFTVLTCIISLVGLTGNAVVLWLLGCRMRRNAVSIYILNLAAADFLFLSFQIIRSPLRLINISHLIRKILVSVMTFPYFTGLSMLSAISTERCLSVLWPIWYRPPPHTPVSGRVCPALGPVPAV

SEQ ID NO: 1257 - DNA, 874 bp, Homo sapiens
  source (1)..(874)
  CDS (201)..(674)
aggccatattttactgagatcttagatttgttatatattaggttttggtcttctaacattctccagtggattttctctaaagtaggtatgcacagaaagagttgaatagcaaaaaagtaaatcatgtaataattctgagatttttgggtttgtcacaactgagaaatattgctgagggtgtatggtcctcaagtgtgaaaatgttccttgtgaattgcttgtatccgaaatatacacacaacattaagtcctggtttttatcttttattttttccaatccttttttcttctcaaggtgtccaagtcacacagagccacagaatctcacaggtgtctcagaattcctcctcctgggactctcagaggatccagaactgcagccactccttgctgggctgttcctatccatgtgcctggtcacgatgctggggaacctgctcatcatcctggccgtcagccctgactcccacctccacatccccatgtacttcttcctctccaacctgtccttgcctgacattggtttcaccttggccacggtccccaagatgattgtagacatgcaatcacatagcagagtcatctcccatgcaggctgtctgacacagatacctttctttgtcctttttgtatgtatagatgacatgctcctgactgtgatggcctatgactgatttgtggccatctgtcaccccctgcactacccagtcatcatgaatcctcacctctgtgtcttcttagtgttgatgtctttttccttagcctgttggattcctagctgcacaactggattgttacaattcacctgcttcaagaatgtggaaatctctaattttttctgtgactgatctcaacttctcaaccttgcctgttc

SEQ ID NO: 1258 - protein, 157 aa, Homo sapiens
MFLVNCLYPKYTHNIKSWFLSFIFSNPFFFSRCPSHTEPQNLTGVSEFLLLGLSEDPELQPLLAGLFLSMCLVTMLGNLLIILAVSPDSHLHIPMYFFLSNLSLPDIGFTLATVPKMIVDMQSHSRVISHAGCLTQIPFFVLFVCIDDMLLTVMAYD

SEQ ID NO: 1259 - DNA, 1012 bp, Homo sapiens
  source (1)..(1012)
  CDS (201)..(812)
atgagaaaaaaacaaattttatatctaccattatcattcatgtcttgttaactagggaagagttacgctatcccttaagacttgaatttcatttgagggcttattagttaatgtctgcacattcctggaacagttaataataacagaccaagggctaggaacaatggaaaacaattaatgaaaaagcctacacagcataaatgaatgtctttctactgacaggcatcctggcaatgtcctcctatctactcagattgaagaactcacatctctccagagccttcggctgcctccctaggatgctcccttcccagacctatgtcaacatctccttcttccaaccgcctgctcttctcatgattggcatcccagggctggaggcggttcatggctggctcgccatccccttctcctccatgtacactgtggccctccctgggaactgcctgatcctcctggctgtgaagaggaaccccagcctgcaccagcccatgtgctacttcctgtccatgctggcgctccccaaagcgggcctcaccttgtccacactgcccatcaccttggctgtgctctggtttgaccaccggctcatgggcttcaatgcctgcctggtccagatgttcttcctgcactcctctgtggtggagtcctcagtgctcctggccatatcctttgaccactttgtggccatctccaaccccctgcactatgcagctgtcctcacaaatagtgtcatcatcaggattgggctggccattgtggctcaagttaccttgtgcctcttcctgtgccatttccggttaagagtctaaatttctgccctggtgataacatcccatcccactcgttctgtttccaccctgatgtaatgaggcgggcctgtgcggacatcacgatcaatatatgctatggggtctacgtggttgtttctacagggggcttagactcgctgctcatctttctgtcctataccttcatcctgcacacagtcatgggtctggctgctcccagg

SEQ ID NO: 1260 - protein, 203 aa, Homo sapiens [sequence omitted]

SEQ ID NO: 1261 - DNA, 1033 bp, Homo sapiens
  source (1)..(1033)
  CDS (201)..(833)
tcattatggataatttattttataaaacacgaactgattttttattcaagttggcattcagaattttttattataggcaccaccagtcaccctggttggaaatgaaaatctagtctacagttcccgaagcagtatcactcacaagagtaaaaatctaaaactaagagctcctgtctcctggataccccagatccctgaatatgttaacccctaataatgcctgctccgtgcctacctctttccggctcactggcatccctggcctggaatccctgcacatctggctctccatcccctttggctccatgtacctggtagctgtgctggggaacataaccatcctggcagtggtaaggatggagtacagcctgcatcagcccatgtacttcttcctgtgcatgttggctgtcattgacttggtcctgtcaacctctaccatgcccaaactactggccatcttctggtttggtgcccacaacattggtgttaatgcctgtttggcccagatgttcttcattcattgctttgccactgttgagtcaggcatcttccttgccatggcttttgatcactatgtggccatctgtgacccactgcatcataccttgttgctcacccatgctgtggtgggtcgtttggggctggctgccctcctccggggggtaatctacattggacctctgcccctagtgatttgtctgaggttgcccctttaccacacccaaatcattgcccattcgtactgtgagcacatggctgtggtcaccttggcatgtggtgtgacacaagggtcaacaacttatatggaatggggattggctttctggtattaatcctggattcattggccatcactgcctcctatgtgatgattttcagggctgtaatgggcttggccacctctgaagccaggcttaaaaccttagggacatgtggctctcacatctgtgccatcctcgtcttctacatccccattgctgtttcctctctcacacaccgctttggccatcgtgtgcctccccatatccatatc

SEQ ID NO: 1262 - protein, 210 aa, Homo sapiens
MLTPNNACSVPTSFRLTGIPGLESLHIWLSIPFGSMYLVAVLGNITILAVVRMEYSLHQPMYFFLCMLAVIDLVLSTSTMPKLLAIFWFGAHNIGVNACLAQMFFIHCFATVESGIFLAMAFDHYVAICDPLHHTLLLTHAVVGRLGLAALLRGVIYIGPLPLVICLRLPLYHTQIIAHSYCEHMAVVTLACGVTQGSTTYMEWGLAFWY

SEQ ID NO: 1263 - DNA, 1075 bp, Homo sapiens
  source (1)..(1075)
  CDS (201)..(875)
cattttattcaagcccaaaagctcaggaaacagaaggaaatagagctcctaaaatgaatggagtttgtttcatagcctaagaaagggttatgaggtagctcttctttctcaagcccacacttactagggactttataagtaatgatcaaatgaacaatgcttcttactcctagggtggacaactactgcctggaatctctatgttctcctgcaacaccagcacttctggtcagtctaccttcctcctcactggttttccaggcctggaagcctctcatcattgggtttccatccccatcaacctcttctgtgtggtttccatcctgggtaataatatcatcctcttcctgatccacacagatccagccttacatgaacccatgtatatcttcctgtccatgttggcagcctctgatctgggcctctgtgcctctaccttccccactatggtgcgtctcttctggctgggagctcgtgagctgccctttgatctctgtgcagcacagatgttcttcatccataccttcacctatgtggagtccggtgtactgctggccatggccttcgatcgctttattgccatccgggaccctctgcattatgccataatcattacctgctcagtcacagccgaggtgggaactgccattctggtgagggctgttctgctcaacctcccgggacctatcctcctgcagcagctgctctttcccaagatcagcgctctctgtcactgctactgcctgcactgtgaccttgtggggttggcctgctcagacacccagatcaatagcctggttggcctggtttccatcctcttctcactgtgccttgactccttcctcatcatgctttcatatgccctgatcctatgaactgtgctgggcattgcatcacctggggagcggctcaaggcactcaacacgtgtgtctcacacctctgcattgttctcatcttttatttgcccaaacgggctgtctgtcttgcaccgagtaaagaagcatgactaccctgctctggcagtgctcatggccaacctacacttcttggtcccacccttcatgaaccccattg

SEQ ID NO: 1264 - protein, 224 aa, Homo sapiens [sequence omitted]

SEQ ID NO: 1265 - DNA, 1129 bp, Homo sapiens
  source (1)..(1129)
  CDS (201)..(929)
taagattagattttgatatcaatttgcattattttttctcggttttttgtttctagttgagtctacctatctatttctccttttaggtttgtgtctaagaattatgtctatatacctggtgttgtaagacctcaatgagttcaataggatagagccaggcatttgagccgatctacttatacctctacagaaaacctcttatgagcttctcatcttttccctcaaatactgggatgtccattctcaatacctctgaaatggaaatctctattttctacttggttgggatcccaggtttggagcatgccaatatttggatctctatccccatatgtctcatgtacactgttgctatcctagggaattgtaccattctgtttttcataaaaacagagccttctttgcatgagcccatgtactattttctctccatgttggctctctctgacctgggactatccctctcctctctccctaccatgttaaggattttcctgttcaatgctccaggaatttcccctgatgcctgtattgctcaagagtttttcatccatggattctcagctatggagtcatctgtacttcttataatgtcctttgatcgctttattgccatctgcaaccccctgagatacacttccatcctcaccagtgccagagtcattcaaattgggcttgctttttctctcaaaaatgttttgttgatcctcccatttcctttcactctaaaacatctaaaatattgtaagaagaacctcctgtcccaatcctactgcctccatcaagatgtcatgaaactggcctgcactgacaacaaggtcaacatcatctatggcttatttgtggctctcacaggcatcctagacttgacatttattttcatgtcctacatgttgatactgaaagcagtgttgagcatagcatcatgaaagaaaaggctcaaggtcctcaatacatgtgtttcccacatctgtgctgtgctcatcttctatgtgcccattatctccctagctgtcatctaccggtttgccaaacacagtttcccaatcactaggatcctcatagctgatgcttttctgctggtgcctccattgatgaaccccattgtatactgtgtgaagagccagca

SEQ ID NO: 1266 - protein, 242 aa, Homo sapiens [sequence omitted]

SEQ ID NO: 1267 - DNA, 1033 bp, Homo sapiens
  source (1)..(1033)
  CDS (201)..(833)
ttttatgccattgccctctctgggaacagcgtgatcctgtttgtcatcattacccagcagagtctccatgaacccatgtattatttcctctccatgctatcagccactgatctgggcttgactgtttcttcattgtcaacaacattaggtatcctctggtttgaggcagtgaaatcagtctatacagctgcattgtccagatgttttttcttcatggattcacttttatggaatctggagtgctggtggctacagcctttgaccgttatgtggccatctgtgatcctctgaggtacactaccattctcactaattccagaatcattcaaatgggtcttctgatgattacacgtgctatagtactaatattaccactacttttgctccttaagcctctctatttctgtagaatgaatgccctttctcactcctattgttaccatccagatgtgattcaattagcatgttcagacattcgggcaaatagcatctgtggattaattgatctcatcctgaccactggaatagatacaccatgcattgtcctgtcatatatcttaattattcgctttgtcctcagaattgcctcccctgaagaatggcacaaggtcttcagcacctgtgtctcccacgtgggagcagttgctttcttctacatccacatgctgagcctgtccttggtgtatcgctatggtcggtcagcccccagagtagtccattcagtgatggctaacgtatacctgcttttaccccctgtgctcaaccccatcatctacagtgtaaaaacaaaacaaatccgcaaggctatgctcagtctgctgcttacaaaatgaacagacatagttttatttgatacaaacctggcatgaatgacttgcactgtagaaaagcgaacttgctctcttactgcctattgcatgtgggtttttaaaatatttttcattcaccaaacaaatagtaaatatgttgtacatttggtcataaaatataagtatgatatatcacccaagacatttgtagtggaattaggaaa

SEQ ID NO: 1268 - protein, 210 aa, Homo sapiens [sequence omitted]

SEQ ID NO: 1269 - DNA, 892 bp, Homo sapiens
  source (1)..(892)
  CDS (201)..(692)
gaacctgtttaaatattttccattgttttctttacataggaaaatatatgttatgctatttcttgacacctaagattgagctatatttaatttaaccaacaactgaacttaaatatgttcagcaagtacaattaaaaacttttatctattgtgcatctttctttagacccacgagtggataagctagtgacctatctgtgatgtttctgctcaatacctcagaagttgaagtctccacattcctattgattgggataccaggacttgagcatgcacacatttggatctctatccccatctgccttatgtacctcatggccatcctgggcaactgcaccatcctatttgttatcagaacagagcattccctgcaagagcccatgtactatttcctctccatgctggccctgtccgacctgggcctgtctttctcctccctacccacgatgctgagaatcttcttgttcaacaacatggggatttctgctgatacatgcattgcccaggaattcttcatccatggattcacagacatggagtcttcagttctcctaatcatgtcctttgatcacttagtagccatttgcaaccccctaagatatagctctattctcaccagcttcagggttttgcaaattggactggcttttgccattaaaagcattctcctagtgctaccccttttactttaaagagactcagatactgtaataaacaccttttatcccactcctactgccttcaccaggatgtaatgaagctggcctgctctgacaacagggttaacttttactatggtttgttcgttgcactctgcatgatgtcagacagtgtttttattgctatttcctatatgtgttcatcctgaagactgtgttgggtattgcatccc

SEQ ID NO: 1270 - protein, 163 aa, Homo sapiens [sequence omitted]

SEQ ID NO: 1271 - DNA, 1105 bp, Homo sapiens
  source (1)..(1105)
  CDS (201)..(905)
aactttttattaccatccactgcttaaattcatccagacccttctcactgagaattcacattttcgattgttctttatgtagtacatttctaatcgtgtgaatttttttggttttcaattctgcagaattttacctgttttcctgctgattggcacacatacagtcataaagatcatggacttatgcattcacaagcaggatgttccttcccaataacacccagtttcacccctcctccttcctgttgctggggatcccagggctagaaacacttcacatctggatcggctttcccttttgtgctgtgtacataattgcactcatagggcgcttcactattctacttgtgatcaagactgacagcagcctataccagcccatgttctacttcctggccatgttggccaccattgacttgggcctttcaacagctaccatccctaagatgcttgggatcttctggtttagcctcagggagattatctgtgatgcctgcctcatccagatgtttttcatccacaactttactggcatggagtcagcagccctcgtgggaatggcttatgaccactttgtggccatctgcaacccgctacgatatagcatcatcctcaccaaaaaggctgtttctgtgattggtcttggtgtgttagtgaggtcatttatgtctgttattccatttgtttttctcattttgcggttgcccttctgtggggatcatgtcattccccacaccaactgtgagcacatgggtcttgctcatctgtcttgttccagtatcaagatcaatataatctatggcttgggtgctatttcaatcctagtattcgacatcatagccattgccctttcttatgtgcaaatacttcacgctgttttccatcttccttcctgtaaagcctgactcaagtccctcagcacatgtggttcacatgtgtgtgtaatccttgccttctatacaccagccctcttttcctttgtgactcatcgctttggccaaaatgtgccccgctatatccatatactcctagccaatctctatgttgtggtgccaccaatgctcaatcctgtcatatatggagtcagaaccaagcagatctatgt

SEQ ID NO: 1272 - protein, 234 aa, Homo sapiens [sequence omitted]

SEQ ID NO: 1273 - DNA, 1192 bp, Homo sapiens
  source (1)..(1192)
  CDS (201)..(992)
  modified_base (83)..(182): a, t, c, g, unknown or other
ctgatatttgatacctcactattgcagaaatatttcctgacagaaagaggtcttaatggatcaggctggaacacttaaatttnnnnnnnnnnnnnnnnnnnnnnnnnnnnnnnnnnnnnnnnnnnnnnnnnnnnnnnnnnnnnnnnnnnnnnnnnnnnnnnnnnnnnnnnnnnnnnnnnnnntttcatggctggatttccatgcccttttgctgtatttacttgatgcctctgctgagcaatgctacaattctactgacaatctggtctgatcgtactcttcgggaccctatgttctactttctagccatcttatcagccatagacctagccctctcaacatcctcagtgcctcgtatgttgggtatcttctggtttgatgcacataaaattggctttggagcctgggtagcccagatgtttctgatacacactttcacaggaatggagtccactgtgctgctggcaatggcctttgaccgctatgtggccatctgtacatcactccactatacctctactctgacaccccgagtattggcaggcattggtgtgagcattataatgcgcccagtcctgctcatgttgcccattctctacctaacccatcgtctgcccttctgtgaggctcggattattgcccactcctactgtgagcacatgggtattgctaagttggcctgtgctagcattcacatcaatgctatttatgggctttttgtggcttcttattttggatgtcgcacttgttggaatctcctatacctacattctccgagctgttttccacctcccatctcaagacgctcgtcacaaagcactgagaacgtgtggctcacatgttggggtcatgtgtgttttctatacaccctccctcttctccttcctcacctaccgatttcgcaaaaaaaattccccgttatgtccacattcttgttgccaacctctatgtggtcattccacctgccctcaatcctattatctatggtgtgagaaccaaacagattcatgagcatgtggtccatactttcacctcaaagtaaggtctcttatttctttacttcttgagggtgtggatatggctgagagaagtcaattttgagacttcactaggtaattattttgtaagtgaatttcatatcaagagattctgcaagtcctaaaggaacaaactttggagaatattttccggt

SEQ ID NO: 1274 - protein, 263 aa, Homo sapiens
MPFCCIYLMPLLSNATILLTIWSDRTLRDPMFYFLAILSAIDLALSTSSVPRMLGIFWFDAHKIGFGAWVAQMFLIHTFTGMESTVLLAMAFDRYVAICTSLHYTSTLTPRVLAGIGVSIIMRPVLLMLPILYLTHRLPFCEARIIAHSYCEHMGIAKLACASIHINAIYGLFVASYFGCRTCWNLLYLHSPSCFPPPISRRSSQSTENVWLTCWGHVCFLYTLPLLLPHLPISQKKFPVMSTFLLPTSMWSFHLPSILLSMV

SEQ ID NO: 1275 - DNA, 1108 bp, Homo sapiens
  source (1)..(1108)
  CDS (201)..(908)
agctgctcacatctggatctccatccccttttgtgtggtctacctgttggccctactgggaaacggctctcttctgtttatcatcaagacagagcccagcctccatgagccaatgtacctcttcctatgcatgctggctgtagttgatcttgttgtgtgttctacagctgtgcccaaacttctcagtctcttctggttccatgatggagagattcgctttgaaacctgcctcactcgtgttcctgattcactcttgctccaccatggaatctggcttcttcctggccatggcttttgaccgatatgtggccatttgcaatccattaagacattcagctattctgacacgcgctgtaattgggagagtgggcctagctattgttctcaggggcatagcacttctcagtcctcactctttcctactacgctggcttccctactgcagaacccatatcatttctcacacctactgtgagttcatggccctcatcaggattgcctgtgctgagacaaaattccgcagagcctacagcctcattgttgccttccttactggggtggtagactttatattgatcatttattcttatgtcctcatactccacactgtcttccagctcccatccaaagatgcccggctcaaatctttgggcacctgtggctcccatgtctgtgtcatcttagtatcctatactccagccttcttctcgtttctcacccacaggtttgggcaccatgtggctccccattttcacatatttgtggccaacatctatcttcttgtcccacccatggtgaaccccattatctatggggtaagaaccaaaaggatttgggacaggttccttaaagttttcagtttttcaaagcctctaagtaaatcatttttgttggtgagaaatatctgaacaaaacattgtattatcttagaatgtaaggtctttttattaaggccctcttttaataatcagaaaactaagatttttctgtggaaagtaacttatttaaacataattataagtttaaacagatataagtttagattttctatgcactttagaaatatttaccaagtagtggtaaatatttgaatttgattacttgacat

SEQ ID NO: 1276 - protein, 235 aa, Homo sapiens
MMERFALKPASLVFLIHSCSTMESGFFLAMAFDRYVAICNPLRHSAILTRAVIGRVGLAIVLRGIALLSPHSFLLRWLPYCRTHIISHTYCEFMALIRIACAETKFRRAYSLIVAFLTGVVDFILIIYSYVLILHTVFQLPSKDARLKSLGTCGSHVCVILVSYTPAFFSFLTHRFGHHVAPHFHIFVANIYLLVPPMVNPIIYGVRTKRIWDRFLKVFSFSKPLSKSFLLVRNI

SEQ ID NO: 1277 - DNA, 907 bp, Homo sapiens
  source (1)..(907)
  CDS (201)..(707)
ctgtactttggggcttgtctagtgagatatcatttggaggctgcttggctcaactctttgttgcccatgtgtcaatcattgccacattgctgagtcctcagtgctgctgtccacggccgtagactgccagcctttgcgctatggggcgttgctggcccagtttgtggtaggtctagtggctctgactaccatgacccgtgatgtctgtgtcatgtacaccctgtgatcctgttcaagaaactgccttactgtggacagtgggccctgcccacacctactgcgaacacatgggtgtggcttgcctggcatgtggagatacgtgccccatcatcaggtatggactggccaccacactgctctccccagccctggacctagggctcataggtgcttcctatgccctcattttccgtgctgtctgccgtctgccatcccatgttgcctgccacaaggctctgggtaactgcgggacctatgctagcatcattggtctcttctacacacctgccctcttctccttccttgctcactgttttgggtgtcacacagtgcccaaccatattcacatcctactggctaacctctacgcagtggtgttcccagctttcaatcctgtggtctatggagtgcagactcagcagagctcagaggctcaggaacttgcttcaacttttctgggcaggagcagtgaagaaggttggccctgagagggcctccccacaggaataaatgtgatccctattttcttcagcgtgcctgcccagatgaccaagtgatgctgcaggacccatctgggtagagctctgactaaagcatctccattgtctgccgtcaggtggccctatgctcactccagccctattttatcacccattatgtaggcagaatatactgaactgacctctct

SEQ ID NO: 1278 - protein, 168 aa, Homo sapiens
MSVSCTPCDPVQETALLWTVGPAHTYCEHMGVACLACGDTCPIIRYGLATTLLSPALDLGLIGASYALIFRAVCRLPSHVACHKALGNCGTYASIIGLFYTPALFSFLAHCFGCHTVPNHIHILLANLYAVVFPAFNPVVYGVQTQQSSEAQELASTFLGRSSEEGWP

SEQ ID NO: 1279 - DNA, 1474 bp, Homo sapiens
  source (1)..(1474)
  CDS (201)..(1274)
tgcatgtagttagactacttttctctatactcatatttatatagcagcaacttacattgacccagggagaactcagtcattaaaatgggaacagcagtttatgcagtttgaagaagattctagagtaactggatgattagtatcagaagtattgggtctgagagtctttcttcaagtgatgaacattgctgttaatatcaatgagaggttttttcttggaatataggaaagaggcggaccagcccctaggaagcagtggaggaagaattaccatacaatttcctcatgttcattataagcaatttgtttttaggacacagaagctattgatcttaatggccatgtacaacatgagtgaccatggtacaggcctgttcatccttttgggtatccctggacttgagcagtaccacgtctggatcagcatcccattctgcttaatctatctcatggctgttgtggccaagagtatccttctctacctcattgtggtagagcacagtcttcatgcacccatgttctttttcctttccatgctggccattactgatctcatattgtccaccacatgtgtccccaaaaacttagcatctctggtttggtccccaaaagtttccctggctgtctcacccaattattctttctgcactatagctttgtgttggactcagctatactgctggccatggcatttgaccgctatatggccatttgctcacccttcgagatacactactattctgactcccaaaaccattgtcaaaattgctgtgggaatatgtttccgaagtttctgtgtttttgtcccatgtgttttccttgtgaatcgtttacccttctgcaggacacatatcatttctcacacatactgtgagcacataggtgttgcccagcttgcctgtgctgatatctccatcaatatctggtgtggattttgtgttcccatcatgacggtgatgacagacgtgatcctcattgctgtctcctacaccctcatcctctgtgctgtcttttgcctcccctcccaagatgcccgtcagaaggccctttgctcctgtggttcccatgtctgtgttatcctcatattctatataccagcattcttctccattcttgcccattgctttgggcataatgtccctcatacctttcatattatgtttgccaacctttatgtaatcattccacctgctctcaactctattgtctacagaataaagaccaagcaaatccagaacagaatccttttgctctttcccaaggggtcccagtgataggtgcctgagctcttggaggtagggacaagttcctagtgtgtgttaggtcaaagactgaacctgtgttcagacacccaagagaaaggacagactaaaatttattaacgaaaacttgagttttgctttctttgtgatttgaggcagaagtctactcaatcatttcagttatagcaaagtaagttctgagtctaggaaat

SEQ ID NO: 1280 - protein, 357 aa, Homo sapiens
MRGFFLEYRKEADQPLGSSGGRITIQFPHVHYKQFVFRTQKLLILMAMYNMSDHGTGLFILLGIPGLEQYHVWISIPFCLIYLMAVVAKSILLYLIVVEHSLHAPMFFFLSMLAITDLILSTTCVPKNLASLVWSPKVSLAVSPNYSFCTIALCWTQLYCWPWHLTAIWPFAHPSRYTTILTPKTIVKIAVGICFRSFCVFVPCVFLVNRLPFCRTHIISHTYCEHIGVAQLACADISINIWCGFCVPIMTVMTDVILIAVSYTLILCAVFCLPSQDARQKALCSCGSHVCVILIFYIPAFFSILAHCFGHNVPHTFHIMFANLYVIIPPALNSIVYRIKTKQIQNRILLLFPKGSQ

SEQ ID NO: 1281 - DNA, 1060 bp, Homo sapiens
  source (1)..(1060)
  CDS (201)..(860)
aatttttagaatatttctcttcaaggctgaatactacacatatttaggtcagtagttaacaaaactgagtaggtaagacttgttaacctgagctcattgagggttaataaatatatgctaattgattatgaccaattgactctctactttctttcacattagacagaaaagtggtgaaagttccttaccataattctggcatgtcagctcccaaccactccactgccaatcatgatatgtttgtcctcattggcgttcctggcctgaaggagctgcacgtgtggatctccatccccttctgtctgatgtacctggtggctgtgtcaggaaatggtctccttgtctgtgtggtggcagtggagcacagtcttcatgaacctatgtaccttttcctctccatgctggcattttgggatctgattctatccacatctgcagtacccaaagccttgagcattttctggtttgatgatgtggacatctcctttggtggctgtgtcactcagctcttttttatgcattttgcctttgtagcggagtcaggcattctcttgaccatggctttcgaccgctatgtggccatctgctacccattgaggtatagcaccatacttagccacagtgttattggcaaaattgggggtgtcgtggtgttcaggagttttgcaactgtcttctccatcgtcttccttgtgaagcgtctgcccttctgccggacaaacatcattgcccacaccttctgtgaacacatggggctggcaaagctaggttgttctgaaatcaccatcaatatttggtatggaatctctgtaccactactcagtgttacgttagatatggtgacaatagtcatctcctaggggctcatagttcaagcagtcttcaggctgccctcccttggtgcttggatgaaagcactcagcacctgtggttcccatggcagtgtcatcctcatgttctgccttccaggaattttcactgtcattgttcagcgctttgcctgaaaatttcccaagtatgtccacatcctgctggccaatctctatgttcttgttccccc

SEQ ID NO: 1282 - protein, 219 aa, Homo sapiens [sequence omitted]

SEQ ID NO: 1283 - DNA, 964 bp, Homo sapiens
  source (1)..(964)
  CDS (201)..(764)
caattctcccgcctcagcctccctagaagctgggattacaggggcatgccaccacacccatctaatttttgtattcttagtagagatggggtttcaccatgtagaccaggctggtcttgaactcctgactcaggtgatccacccgcctctgcctcccaaaatgctgggattacaggcatgagctaccgtgcccagcctccatgtacttcttcctgacaaactttgcaggtctggagatcttctactttttcaccattgcccctctgactctggccaatgtcctacccatggggagaaacctcatttccctgcccggctgtggaggccagatgttcttcttcatcttcctgggaagggctgactgcatcctgctggccgtcatggcctttgactggtttgtggccatctgttgtcctctctgttacggcctcatcatgagctggaggttgtgtgtccagctgaccctggggtctctgctgttggggttcttcttagccatgcagctgaccgtgcttatcttccaactccctttatgcagcagcaaagaaatcagcacgttctactgtgatgtcctccctgtcatgagactggcctgtgcagatacctgggtccatgaggccactatgtctatggtcagcaccacctttctcaccgtccccttcctgctcatcactctttcctatgtctccatcatggccgccatcttgaagatttgctctgcagaggggaggcacaaggccttctccacctttcctcccacctgactgtggttctcctccaggactgatgtacacgcctcgccttcttgtgtcccagctctagctactatcctgagaggggccaggcagtgtctgtggtttacaccttcattacccctgtgctgaaccctttgatctacagcatgaggaacacagaacttaaggatgctttgaagagagcaatgacgagggtcccgctgctctaa

SEQ ID NO: 1284 - protein, 187 aa, Homo sapiens [sequence omitted]

SEQ ID NO: 1285 - DNA, 1033 bp, Homo sapiens
  source (1)..(1033)
  CDS (201)..(833)
ttggatatgaatgaagttatacttcattattgctactgtactattacaactataccctatgatacatagcgtcatgatttcagaatcatttgtgtgtataacatttcgatctttgttttccatgttgaagctctttttttaaattgaagctcatgtagcctctttgttgttctccacaagtacttcggcagggtgccaccatgactgcttgcaatgcctcacagggccacccttctttcttcattctccaaggaattcctggcatggaggacaaacacagatggatatctatccccttctcctccatgtatttcattatggtgcttgggaactgcaccatcctcctcaccatctccacagagcgctccctgcacaaacccatgttcctgctcctctgtctgttggccctcacagacctgggcatgtctacaaccaccattcccaaggtgctgtgcattttctggtttggccagagtgagatcagctatgaaggatgcctggttcagctgttcttcatccactccatctctgccatgcagtcagctgtcctgatgaccatggcctttgaccactatgtggccatctgcaagcccttgcgctatgccaccatcctttccaatagttgcactggactcattggcttagtgagtttggtgagagctatcctctttattctccccatgcccatcctccttcagcaaatgccctatcatgccaatcgtgtcatccccaccacctcctgtgagcacatggctgtggtgaagatggtttgtgtagatactacagtcaacaggatatatggcctggtggtggccttgttggttgctggctagatctctcagctattgcttcatcttatgtgctaatcatccaggctataatgcatctctcttctaaggaagcccaccacaaagcagtcaacacctgcaccacacacatctgtgtcatgcttatttcttatactccctcacttttctcttttctcgctcaccgctttggccaaggcattccaccccatgtccacatcattctt

SEQ ID NO: 1286 - protein, 210 aa, Homo sapiens
MTACNASQGHPSFFILQGIPGMEDKHRWISIPFSSMYFIMVLGNCTILLTISTERSLHKPMFLLLCLLALTDLGMSTTTIPKVLCIFWFGQSEISYEGCLVQLFFIHSISAMQSAVLMTMAFDHYVAICKPLRYATILSNSCTGLIGLVSLVRAILFILPMPILLQQMPYHANRVIPTTSCEHMAVVKMVCVDTTVNRIYGLVVALLVAG

SEQ ID NO: 1287 - DNA, 1009 bp, Homo sapiens
  source (1)..(1009)
  CDS (201)..(809)
cagtcataggaccattcaatagaatcaaaaaacatagtttggatacaaaatgattattttttcctaaatttattatttagattgtgaaaaatgcgtttttatatttttttctctggatgaaaataatctcactactctctccttatacaggacaactttattggcacaaaaactagcatgttttgtaattggtgagcatcatgaatggagccaacagctccagcctgacaccaagatatttcattctcagtggcgttcctgggctggaagctgcacacatctggatctccctgcctttctgcttcatgtacatcattgttgttttggggaactgtggacttatatacctcattagccatgaggaggccctgcaccaacccacctactacttcctagacttgctgtctcttacagatgttactggatgcacctcatttgttcccaatatgttatgtattttttggtttggcctcaaggaaattgactttaatgcctgccttgtgcagatgtttttcatccacatgctgacaggcatggagtctggggcgctcatgcttatggctctagaccgctatgtggccatttgctaccctctacactattccaccatcttcaccaacactgtaattaccaaagttgggcttgtcaccttcattcaaagtgtgttgcttatgattccatttgctttcctgatcaagtgtcttccctattgcaggggcaacctcatccaccacacctattttaacatatgtctgtggccaaattatcctgtggtaatgtccagattaatgccatctatggtctcatagctgccatattgattggggggtttgacatgttctgtatctccatgtcttacaccatgattatccgtgctgtagtgaatttgtcatctgcagatgctgccacaaagccttcagtacctgtacagcacatatatgtgctattttcatcacttatgtcccagcctttttcaacttcttcactcaccgctttgggggacacacca

SEQ ID NO: 1288 - protein, 202 aa, Homo sapiens
MNGANSSSLTPRYFILSGVPGLEAAHIWISLPFCFMYIIVVLGNCGLIYLISHEEALHQPTYYFLDLLSLTDVTGCTSFVPNMLCIFWFGLKEIDFNACLVQMFFIHMLTGMESGALMLMALDRYVAICYPLHYSTIFTNTVITKVGLVTFIQSVLLMIPFAFLIKCLPYCRGNLIHHTYFNICLWPNYPVVMSRLMPSMVS

SEQ ID NO: 1289 - DNA, 1186 bp, Homo sapiens
  source (1)..(1186)
  CDS (201)..(986)
ttcttctactttataataggattgggagtatatcatacatttttccatttctcatctatatctcctatcagtatctcatcaattttctggatgagaaagtgttagcaaatattttgacaactttgttttccattgacctaattcatgtgtcttatcatacaaaaatccaggtgaaattttctcaactgagaatttatttcatgacattacccagcgatgactccactgtcccagtctctgaattcctcctcatctgcttccccaactttcagagttggcagcacttgctgtccctgcccctcagcctcatttcctcctggccatggggaccaacacccaccccccccatcaccatccacctggaggcctctctgcacctgcccctgtactacctgcccagcctcctctccctgctggacatcgtgctctgcctcaccgtcatccccaaggtcctggccatcttctggtttgatcttaggtcgatcggcttccctgcctgcttccttcagatgttcatcatgaacagtttcctccccatggagtcctgcacattcatggtcaaggactatgatcattatgtggccatctgccacccactgcagtacctgtccatcatcactcatcaatttgtggccaaagctagtgtcttcattgtggtgcagaatgctttgctgctttcacctgttcctattctctctgcccagctccattactgtaggaaaaatgtgattgagaactgcatctgtgccaacctgtctgtgtccaggctctcctgtgataatttcacccttaacagactctaccaatttgtggctggttggaccttcctgggctcggatttcatcctcatcttcctctcctacaccttcattctaagagctgtgcttagattcaaggtggagggggtggcagtgaaggccctgagcacatgtggctcccactttatcctcatcctcttcttcagcacctgctggttgtggtgttgacaaatgtggccagaaagaaggtccccatggacatcctgatcctgtttaatgtccttcatccctttagtcctcctgcattaaaccctatcatatgtggatttcaaactaaagagttaaagaaggaattttagaagttgctgcagaggggcctttgaaaacacggaagggactctccatagaagcacctattactgtttcta

SEQ ID NO: 1290 - protein, 261 aa, Homo sapiens
MTLPSDDSTVPVSEFLLICFPNFQSWQHLLSLPLSLISSWPWGPTPTPPITIHLEASLHLPLYYLPSLLSLLDIVLCLTVIPKVLAIFWFDLRSIGFPACFLQMFIMNSFLPMESCTFMVKDYDHYVAICHPLQYLSIITHQFVAKASVFIVVQNALLLSPVPILSAQLHYCRKNVIENCICANLSVSRLSCDNFTLNRLYQFVAGWTFLGSDFILIFLSYTFILRAVLRFKVEGVAVKALSTCGSHFILILFFSTCWLWC

SEQ ID NO: 1291 - DNA, 856 bp, Homo sapiens
  source (1)..(856)
  CDS (201)..(656)
tgtgcctggtcacggtgctggggaacctgctcatcatcctggccgtcagccctgactcccacctccacacccccatgtacctcttcctctccaacctgtccttgcctgacatcggtttcacctccagcatggtccccaagatgattgtggacatctaatctcacagcagactcatctcctaggcaggctgcctgactcccatgtctctctttgccatttttggaggcatggaagagagacatgctcctgagtgtgatccctatgacccgtttgtagccatctgtcaccctctatatcattcagccatcatgaacccgtgtttctgtggctttctagttttgttgtcttttttttctcagtctcttttagacgcccaggtgcacaacttgattgccttacaaatgacctgcttcaaggatgtggaaattcctaatttcttctgggaaccttctcaactcccccatcttgcatgttgcgacaccttcaccaataacataatcatgtattcccctgctgccatatttggttttcttcccatctcggggacccttttctcttactataagattgtttcctccattctgagggtttcatcatcaggtgggaagtataaggcctgctccacctgtgggtctcacctgtcagttgtttgctgattttatggaacaggcttttgggggtacctcagttcagatgtgtcatcttccccgggaaaggctgcagtggcctcagtgatgtacacggtggtcacccccatgccgaaccccttcatctacagcctgagaaacagggatattaaaagcgtcctgcggcggccgcacggcagcacagtctaatgtcaatatctccttatctg

SEQ ID NO: 1292 - protein, 151 aa, Homo sapiens
MSLFAIFGGMEERHAPECDPYDPFVAICHPLYHSAIMNPCFCGFLVLLSFFSQSLLDAQVHNLIALQMTCFKDVEIPNFFWEPSQLPHLACCDTFTNNIIMYSPAAIFGFLPISGTLFSYYKIVSSILRVSSSGGKYKACSTCGSHLSVVC

SEQ ID NO: 1293 - DNA, 916 bp, Homo sapiens
  source (1)..(916)
  CDS (201)..(716)
tgagggataaaccattctgtcctggtccacccttctcccgtatccctttgtctttccagcagtcatgcttgcatgtggtagcgctggccttcatgctattaggctaaagtggtgctggtctctgctgtatttgacttcctacaacttgaaaaaggggaagtcagtgtcactcagtatcatgatagcagtaaaggcagattatgtgggtccatattaggctagtctcagataatcccagcatatactctactcttacgggaggagaaattgtgggaagagctgtgttgctcttgaatggaagctttttttcctgtgtccacagataccctcagagaagaatggctcctggaaatggctttttcatgactaaaatcattttgctggagttaacagatcagccagatctccaactccctctgttcttcctgtttctagtgtatggtcactgcgttgggaaatttggcttggtaactctcgttgtgctcaattcacaccttcatacccccatgtactttttcctctttaacttgtccttcatagatctctgttattcttctgtgtttacaccccaaatgctgatgaacttcataacacagaaggatattatctcccacatggggtgcatgtcccagcttttcttttttctttatttttttttggtatttctgaatgctatgtgctcacctcaatggcctatgatcagcatgtcaccatgatcaccatgtagccatctgtaacccacttttgtataatattgccatgtcccccaaagtgtactctcaccttatgcttggtttatacttgctagccttttctagtgccatggcccacactggatgcatgctgagactgaccttctgtgatgcaaacaccatccatccctatttgtgtgacatcctccctctgctccagctct

SEQ ID NO: 1294 - protein, 171 aa, Homo sapiens [sequence omitted]

SEQ ID NO: 1295 - DNA, 874 bp, Homo sapiens
  source (1)..(874)
  CDS (201)..(674)
ccaggagattcagctctccctctggagataaagagtgaggatccattattaatgttttctacacctgttcctacagatcacacccagcaagttaatggctgtggaaaatgactcttcagtgacaagagtttattcttttgggattaacagaccagcctgagatctaattgcccctgtttttcctgttcttggtgaactatatgaccaccatggtgggcaacttgagtttaattaatctaatttgcctgaattcacaccttcacactcccatgtattttttccttttcaatctgtccttcattgatctctgttattcatttgtctttacccccaaaatgctgatgagctttatttcagagaggaacatcatctcctttccaggatgcataactcagctctttttcttctgcttttttgtccactctgagtgctatgtgctgacagccatggcctatgatcgctatgtggccatctgcaaaccccttctgtacatggtcaccacgtcccctcagatctgttctctactgatgcttggttcatatgtgatggggtttgctggggccatggtccacacagagtgtatgatgaagctcatcttttgtgactccaacgtcatcaaccattacatgtgtgacatcttcccactgctccagctctcctgcagcagcacctaggccaatgagctggtgatgtctgttattgtaggcacagttgttatagtatcaagcctcattatcttaatctcttatgctttgattcttttcaatatccttcacatgtcctcagccgagggttggttcaaagccatcggtacctgtggctcccacataataactgttggcctattctatgaatttgggctgatcactcatgt

SEQ ID NO: 1296 - protein, 157 aa, Homo sapiens [sequence omitted]

SEQ ID NO: 1297 - DNA, 916 bp, Homo sapiens
  source (1)..(916)
  CDS (201)..(716)
tgagggataaaccattctgtcctggtccacccttctcccgtatccctttgtctttccagcagtcatgcttgcatgtggtagcgctggccttcatgctattaggctaaagtggtgctggtctctgctgtatttgacttcctacaacttgaaaaaggagaagtcagtgtcactcagtatcatgacagcagtaaaggcagattatgtgggtccatattaggctagtctcagataatcccagcatatactctactcttacgggaggagaaattgtgggaagagctgtgttgctcttgaatggaagctttttttcctgtgtccacagataccctcagagaagaatggctcctggaaatggctttttcatgactaaaatcattttgctggagttaacagatcagccagatctccaactccctctgttcttcctgtttctagtgtatggtcactgcattgggaaatttggcttggtaactctcgttgtgctcaattcacaccttcatacccccatgtactttttcctctttaacttgtccttcatagatctctgttattcttctgtgtttacaccccaaatgctgatgaacttcataacacagaaggatattatctcccacatggggtgcatgtcccagcttttcttttttctttatttttttttggtatttctgaatgctatgtgctcacctcaatggcctatgatcagcatgtcaccatgatcaccatgtagccatctgtaacccacttttgtataatattgccatgtcccccaaagtgtactctcaccttatgcttggtttatacttgctagccttttctagtgccatggcccacactggatgcatgctgagactgaccttctgtgatgcaaacaccatccatccctatttgtgtgacatcctccctctgctccagctct

SEQ ID NO: 1298 - protein, 171 aa, Homo sapiens [sequence omitted]

SEQ ID NO: 1299 - DNA, 886 bp, Homo sapiens
  source (1)..(886)
  CDS (201)..(686)
tgtgcaggtaacccagacagggatgagtgtaacgccacacagcgtttagaacagtgcctatcccatagttagtgctcagtaaatgtttcttttcttctccctcccactaccttaatttccattaacctcccggtgtgtgtagcctttctctctttctgagtgactctttctttttctctcacagacagtcctagaggagaatgcctgccaagaactcctcctccgtgacagcgtttatcctctcaggcttaaccgaccagccgggactccagatccccgccttcttcctgtttctaggtttctacgcggtcacggtggtggggaacctgggcttgataatcctgatagggctcaactctcgcctgcatatccccatgtactttttccccttcaacttgtccttcatagattttagttattccactaccctcgcccctaaaatgctgatgagctttgtctcagagaacatcatttcctatgcagggtgtatgactcagctttttttcttctgtttctttgtcttttctgaatcctatattctatcagcgatggcgtatgaccgctacgtgggcatctgtaacccactgttgtacacggtcaccatgtctccccagatgtgtttgctccttttactgggtgtctatgggatggggattttggggctgtggctcatatgggaaacataatgtttatgtccttttgtggagacaaccttgtcaatcactatatgtgtgacatccttcctctccttgagctctcctgcaacagctcttacataaatttgctggtggtttttattattgtgaccgttggcattggggtgccgattgtcaccatttttctctcttatggttttattctttccagcattctccacattagttcc

SEQ ID NO: 1300 - protein, 161 aa, Homo sapiens [sequence omitted]

SEQ ID NO: 1301 - DNA, 931 bp, Homo sapiens
  source (1)..(931)
  CDS (201)..(731)
tagattttagtttctctacgaccatcattcccaaaatgctgatgagttttgtctcaaggaagaacattatttccttcacagggtgtatgagtcagttcttcttcttctgtttctttgtcttttctgagtccttcatcctgtcggcgatggtgtaggaccgctacgtgggcatctgtaacccactgttgtacacgatcaccatgtctccccaggtgtgtttgctccttttactgggtgtctacgggatgggggtttttggggctgtggctcatacaggaaatatagtgtttctcaccttttgtgcagacaaccttgtcaatcactacatgtgtgacatccttccccttcttgagctctcctgcaacggctcttacataaatgtcctggtcatctttattgttgtgaccgttggcattggggtgcccattgttgccgtttttatctcttatggttttattctttccagcattctccgcgttagttctgctgagggcaggtctaaagccttcagtagctgcagctcctacataattgcagtttctcttttctttgggtcaggagcttttacgtacctcaaacccccttccattttacccctggaccaggggaaagtgtcctccctgttctataccactgtggtgcccatgtttaacccattaatctacagcctgaggaataaggatgtcaaacttgccctgaagagaaccttttccagaataagcttttcttgaaaaaaattttagaaacagaaaagagatactaggatttttttaaaatcagattgcttttgcgatgatttttttttcagtgaggaatctaagcttccagtgctttccatcctatatatagagaaaattttaactctcttttctgagtggatttattcttccccaccctcacctccatctcttccttgatttataaagaagtt

SEQ ID NO: 1302 - protein, 176 aa, Homo sapiens [sequence omitted]

SEQ ID NO: 1303 - DNA, 925 bp, Homo sapiens
  source (1)..(925)
  CDS (201)..(725)
gacatggtttcacctccaccatggtccccaagatgattgtggacatccaatctcacagcagtcatctcctatgcgggctgcctgactcagatgtctctttttgccatttttggaggcatggaagaaagacatgctcctgagtgtgatggccctatgaccggtttgtagccatctgtcaccctctatattattcagccatcatgaacccatgtttctgtggctttctagttctgttgtcttgttgtctcagtcttttagactcccagctgcacaatttgattgccttgcaaattacctgcttcaaggatgtggaaattcctaatttcttctgtgacccttctcaactcccccaccatgcgtgttgtgacaccttcaccaataacatagtcatgtatttccctgctgccatatttggttttcttcccacctcggggatccttttctcttactataaaattgtttcctccattctgagggtttcatcatcaggtgggaactataaagccctctctgcctgtgggtctcacctgtcagttgtttgcttattttatggaacaggcgttggagggtacctcagttcagatgtgtcatcttcccccagaaagggtgcagtggcctcagtgatgtacacggtggtcacccccatgctgaaccccttcatctacagcctgagaaacagggatattaaaagtgtcctgcggcgcctgcacggcagaacagtctaatctcaatatcttattatctgttccattccttttgtagtgtgggtttaaaaaggcagcaaggtctggccgggcgcggtggctcatgcctgtaatcccagcactttgggaggctgaggcaggtggatcacctgaggtcgggagttcaagaccagcctgaccagtatggagaaacctcgtctctactaaaaatacaaaattag

SEQ ID NO: 1304 - protein, 174 aa, Homo sapiens
MNPCFCGFLVLLSCCLSLLDSQLHNLIALQITCFKDVEIPNFFCDPSQLPHHACCDTFTNNIVMYFPAAIFGFLPTSGILFSYYKIVSSILRVSSSGGNYKALSACGSHLSVVCLFYGTGVGGYLSSDVSSSPRKGAVASVMYTVVTPMLNPFIYSLRNRDIKSVLRRLHGRTV

SEQ ID NO: 1305 - DNA, 1048 bp, Homo sapiens
  source (1)..(1048)
  CDS (201)..(848)
tttcattgttgaagtctgagtcaaatttgattatagggcctttagatttgaatccttctctaactttccttattgttattgagcaggtaagtcaaaggcctgagttgatataaacagctggcagcaatttcactgaggtgactgtcttcatcctctctggatatgcaaatcaccctgaattacaagtcagttttttcttgatgtttctcttcatttatctattcactattttgggaaacctgggactgatcatgttaatcagaatggattctcagcttcacacccctatgtactttttcctcagcaatttagcattcattgacatattttactcctcttccgtaacacctaagacattggcgaatttccaatccaatcagagatccatctcctttgttggctgctttgttcaaatgtacttttctgttggattggtgtgtactgagtgtttcctgctgggatcaatggcctatgattgctatgtagcaatctggaatccctcattcagtagtcatttcttagaaagcgtgcaactggctgggagtaatgtcatacacgataggtttcacaaattctctggtatctgtctgtgtgataagtggttttgttctgtgattccagcatcaatcttttttttctgtgacaccacagctcttttagcactgtcctgtgtagatgcattcagcacagaaatggtgagctttgccttagctggattcactcttcttggctctatccttatcatcacagtcacttatatcgccatcacctcagccatcctgaagaaccagtgggcagcaggatggcagaaggccttctccacctgcgcattccacctcatgggttaactatcttctatgggtccctgattttcacctatttgcaactggataaaacatcatccctgatccacgcacagttggcatttgtattctatatgactgtcattcccatgctgaatccactcatctagagtctgaggaacaaagatgtaaaaaatgctctttgagagtcatacatagaaaactttttccatgacaaatttatg

SEQ ID NO: 1306 - protein, 215 aa, Homo sapiens [sequence omitted]

SEQ ID NO: 1307 - DNA, 1009 bp, Homo sapiens
  source (1)..(1009)
  CDS (201)..(809)
tagtgcatgattgaataaaataatttatttaatttatttaattacagtaatgtatccacttggacccaattttatcaccacctgtgcatttgctgacaaggatttcatcttgcttttccaagaaacgaacatgaggatataattggataaacttaattttcacaggctgttgcatttagtacatataaacaatagctaaaatgtcagggttgccttcagatatggatctatacaagcttcaattaaacaattttactgaagtcaccatgtttatattaataagcttcacagaagaatttgatgtgcaagtcttcctatttttattatttttagcaatctatctattcactctaataggcaatttagggctggttgtaccgatcattggggatttctggcttcacagcccaatgtactattttcttggtgttttatcattcttggatgtctgctattctacagttgtcactccaaaaatgttggtcaatttcctggcaaaaaataaatctatttcatttcttggatgtgcaacacagatgtttcttgcttgtacttttggaaccacagaatgctttctcttggctgcaatggcttatgatcgctatgtagccatctacaaccctctcctgtattcagtgagcatgtcacccagagtctatgtgccactcatcactgcttcctatgttgctagcattttacatgctactatacatacagtggctacatttagcctgtccttctgtggatccaatgaaattaggcatgtcttttgtaataatgcctcctctgcttgctatttcttgttctgacactcacgtaatccagcttctattcttctactttgtgggctctattgagatagtcactatcctgattgtcctgatctcctatggttttattctgttggccattctgaagatgcagtctgctgaagggaggagaaaagtcttctctacatgtggagctcacctaactggagtgacaatttatcatgggacaatcctcttca

SEQ ID NO: 1308 - protein, 202 aa, Homo sapiens
MSGLPSDMDLYKLQLNNFTEVTMFILISFTEEFDVQVFLFLLFLAIYLFTLIGNLGLVVPIIGDFWLHSPMYYFLGVLSFLDVCYSTVVTPKMLVNFLAKNKSISFLGCATQMFLACTFGTTECFLLAAMAYDRYVAIYNPLLYSVSMSPRVYVPLITASYVASILHATIHTVATFSLSFCGSNEIRHVFCNNASSACYFLF

SEQ ID NO: 1309 - DNA, 1024 bp, Homo sapiens; identical to SEQ ID NO: 1133
  source (1)..(1024)
  CDS (201)..(824)

SEQ ID NO: 1310 - protein, 207 aa, Homo sapiens; identical to SEQ ID NO: 1134

SEQ ID NO: 1311 - DNA, 955 bp, Homo sapiens
  source (1)..(955)
  CDS (201)..(755)
  modified_base (1)..(62): a, t, c, g, unknown or other
nnnnnnnnnnnnnnnnnnnnnnnnnnnnnnnnnnnnnnnnnnnnnnnnnnnnnnnnnnnnnngagtgccatgagcaccgagcgctgcctgtgcgtcctgtggcccatatggtaccgctgcctcctccccccacacacctgtcagcggtcgtgtgtgtcttgctttgggccctgtccctactgcggagcatcctggagtgaatgttctgtgacttcctgtttagtgatgctgattctatttggtgtcaaccatcagatttcatcacagtcgtgtggctgatttttttatgtgtggttctctgtgggtccagcctggtcctgctgattaggattctctgtggatcctggaagatgcctctgaccgggctgtacgtgacgatcctgctcacagtgctagtcttcctactccgcagcctgcccttcggcattcggtgggctctgtctactgggatccacctggatttggaagtcattttctgtcatgtccatctagtttccattttcctgtcccctctaaacggtagtgccaaccccgtcatttacttcttcgtgggctcctttaggcagcgtcaaaataggcagaacctgaagctggttctccagagggctctgcaggacatgcctgaggtgaaggtggagggcggcttcctgagggaaccctggagctgtcgggaagcagattcgggcagtgaggaagaacctctgccctgtcagtcagacgggactttgagagcaatactgccctgccacgcttgacaattacatgcgttttcttagtgttgtgcctcagaaatgtctcagcggtaactcaaggtcgtcgaatagatgtttatctatactgacagttccagttttcatccacagaaagcattagtctgacagtacaatgtttagattctccttgatattaccaacacatttttcctgttatcttacactgaaaactttttctgcaa

SEQ ID NO: 1312 - protein, 184 aa, Homo sapiens [sequence omitted]

SEQ ID NO: 1313 - DNA, 994 bp, Homo sapiens
  source (1)..(994)
  CDS (201)..(794)
ctcttgtctccaattcccatgtactttttcctcagtaacctgtctctgcttggatacttaactgtcactcccagggtcacggctagcagggctaggttacttagagggtaggaggctaagttcctcgtacaatgcttgtgctgctcagatgttcttttttgtagccttggccacagtggaaaatatcgctgttgacatcaatggcctatgaccactatatagcagtgtgcaaacccctacactacactaccaccacgatagccagtgtatgtgctcatctggtcataggctcctatgtctgtggctttctaaatgcctccctccgcattggggacatattcagtctctctttctgtaagtccaatcttgtccatcaccttttctgtgatgttccaccagtcatggctgtgtcttgctctggtaaacacattagcaagaagattctggtttttatgtcaagcttcaatgtctttttggctcttctagttatcttgacctcctacctgttcatattcatcaccatcttgaagatgcactcagctcagggacacttaaaagctttgtccacctgtgcctctcacctcattgcagtctccatcttctatggaactactatctttatgcacttacagcctagctccagccattccatggacacagatgaaatggcatccttgttctatgctgtgttcatctccatgctgaaccttgtgttctacagcctgaggagcaaagaagtcaagaatgcattcaaaaaggcggttgagaaggcaaaatttttcttagaactgtgatttaatgtggtagggtacacaataacccagtttcattcttttcagaacttccccatgaaattaatcacattgcattttcacaatgcatttaaattccagttgtgatagccttacttcttcagaaggtaatagccttacctttctttttacctgcctagtaaaaagaaaatacgtccagaatgtattacatgaacgaaaat

SEQ ID NO: 1314 - protein, 197 aa, Homo sapiens [sequence omitted]

SEQ ID NO: 1315 - DNA, 1168 bp, Homo sapiens
  source (1)..(1168)
  CDS (201)..(968)
tctgcacagatgtttagctctgagcccaccatagatggaaatcagtccctgtgtgccaaattcacatttgtggctttttcttctatagaagaattacagcttgtactcttcattgtgttcttaatcatcacttatgcactataggaggaaatatcatcatcatctccctgatctggatcacccctgccctgcacactccaatgtatttcttcctggtgaacctctcatttctggagatgtgctataccaccagtgtggtgcctcatgctggtgcacctgctggtggagaccaaaaccataagtgtgggtggctgtgcaacccagatgtacatatttgccatcttgggactgacagaatgctgcttgctagcagctatggcttacgatcgctttgtagctatttgttacccactgcattacactctcttcatgggccctcgtgtttgtttgaaattggctgcagcatcttggttcactggagtggtggtggagtcagcccagatcaccctgatcttcactttgcctttctgtggaacaggaaagattcaacacttttttgtgacataatgcctgtactgaaactggcttgtattgatacctcccaaattgaaattgtgatgttttctctctccgtgctatttattgtgagtccttgtttcctcattctgtgctcccacatgcacatccctgtgaccatcttgagaatcccttcagcagctggaagacacaaagctttctccacttgttcttctcatatcttggttgtttctctgttctatggcactgccttgttcacttatctgcaacctaagactgcacacactccagaaacagacaaagcaactgcactcatgtacacaatggtcacacctgctttgaatcctgttatctataccttgaggaacaaggaagtaaaggaagcctttcaaaggataacccaaaggaactctcttagacaaacggcctaaaccagtcatagtagctgaaacctatgctactgtacagagaggttacccgattttatgattcttctaccaacatattcttttattaaagcatttatagcctagctaccaaaaaacatttggatttgtcacacatttttcaatgtctgtaagtaaaaggaaactacacagtagattcattcaattgttaatcattcattcat

SEQ ID NO: 1316 - protein, 255 aa, Homo sapiens [sequence omitted]

SEQ ID NO: 1317 - DNA, 1018 bp, Homo sapiens
  source (1)..(1018)
  CDS (201)..(818)
aaaaatgtgggtggagcaggttgggaaagcactgtagaacagtagaccattcgggagccttagagtcaggcaaacctgggttcacatcatgactccatcataatgacctggaataattgacttgaacaaacgggtcttagtttctcttccacatctgggagacaataaggcctgtctctgatgcgtgctgtgatgagtaaatggataagccaagcatggagtgtggccataatagtatctttgttaatattaactaccttcctctcttctcttgggcccagacctggaagaagaagcagtccagtggtgacagtgggaaccagaccacctggctgatcctagtgggcttcggggagctgcaatacctgggcttccttcccttcactctcttcctggccatctatgtggtgacagttgggggcaatgccctcatcatgctggctgtggcctctagtcggacactgcacccaccaatgtacttcttcctctgccacttctccctgctggagattggctatacctccaacgtcatactatggctgttgcagagtttcttggaggggaaggaagtcatctctctagtcagctgtctggctcagttctacgtgttttcctcgctggctgcagctgagtgcctcctgctatctgccgtgtcctatgactgttacttggccatctgctgcccccttcactatcctgccctgatgagcacctggttttgtcactgcctggccgctggtgcttggttcagtggcttcttctcctctgccttcactatggccctggcagcacctctgtcctggcagcagggagattgaccactatttctgtgagtttgctccagtagtcaggcagttctgcggggatgtgggagtcatgtagggagctgaagtcagcatctcaggcttcctgacactggccgccttcctactgattgtggcatcctctgccttcattgagggctgtactgcaaataccctcaggccatgagaggcagaaagccttcttcacctgttcc

SEQ ID NO: 1318 - protein, 205 aa, Homo sapiens [sequence omitted]

SEQ ID NO: 1319 - DNA, 1264 bp, Homo sapiens
  source (1)..(1264)
  CDS (201)..(1064)
cctacggttatgaatgcttgggagggctgcaccggacatccacgggatgctgggggtgagaagacactagagaggggtcagagggaaggagcagagggagataatgggtcaaagtgtctgaggaaggagcctgggctgggtagccccagccacccgggcctaagcccaggtggaggggaggagataggaacgaggacgggatgtggagaagtggggaaaggcaggccgacgttggcagggtgcgaggaggccttggagaaaggagggtggatggggcaggcccccaagggaggcaaggagcgccgacagaagggcccaggcgcttgcagggcgcgagttcccacctcaagcaccgtggcggctcccgcgctgcgcacctggaagtgcgcaggctgctccgccgcctcgtcggcgcgctggtagctgaagcaggcttctgctatgtccaggtggccgaggggcagcgggtcgtgggggttcttgaagtagcagaggcagcagcggcgcccgtccaacacgaaccgacggctgcggtaccacgcagtcgcgctggttcccgcgcggtacccgccccgggctctgcagcctccccatcgccgtcgctgccctcctctgcccgggttccggccccggtatggctgcctgcgcgccaaccgtttgttccccggcccccgcgccttcgcgctgcggctgctgcgctccctgcccccgcggtgcccccttcccgccgccccgctcctctctcaggcgctcaaagtggcctggaatttgtagaacgcccccctccaagcccgttggcagttgtcctagcccgctggcccttgcccccgcccgctggccgttgcccccgcgacgccccggaagccaggtcctgcctcccgcacctgccaagtccccgccctgccggagtctcgctctgtcgcccaggctggagtgtagtggagccatctcggctcactgcaacctccgcctccccggttcaagcaattctcccgcctcagcctcccgagtacttgggattacaggcgcccgccacctcgcccggctactttttgtatttttaatagagacggggtttcgccgtgttggtcaggctggtctcaagctcctgacctcaagtgatctgcttgccttggtctcctaaagtgctgggattacaggcgtgagccaccgcgtccggcccaaaagccttttttggatgagaaagactcactcagcttcgtcctgaagagcaagtgggctggggaagaggagagtatgaatg

SEQ ID NO: 1320 - protein, 287 aa, Homo sapiens
MWRSGERQADVGRVRGGLGERRVDGAGPQGRQGAPTEGPRRLQGASSHLKHRGGSRAAHLEVRRLLRRLVGALVAEAGFCYVQVAEGQRVVGVLEVAEAAAAPVQHEPTAAVPRSRAGSRAVPAPGSAASPSPSLPSSARVPAPVWLPARQPFVPRPPRLRAAAAALPAPAVPPSRRPAPLSGAQSGLEFVERPPPSPLAVVLARWPLPPPAGRCPRDAPEARSCLPHLPSPRPAGVSLCRPGWSVVEPSRLTATSASPVQAILPPQPPEYLGLQAPATSPGYFLYF

SEQ ID NO: 1321 - DNA, 1006 bp, Homo sapiens
  source (1)..(1006)
  CDS (201)..(806)
ccagcaacattatttttccttttttttttgggggggggacggagtcttgctctgtcacccaggcctgcagtggcactatcttagctcaccgtaacctcagtctcccaggttcaagcaattctcctgcttcagcctcccaagtagctgggattacaggcgcccgccaaaacacctagctaatttttatatttttagtagagatggggttttgccatgttggccaggctgacctcgaactcctgacttcaggtgatccgcctgcctcagcctcccaaagtgctgggattacaggcatgagccactgcgcccagccctttttttttttcttttcctttttttttttgagatggagtctcactctgttacccaggctggagtgcagtggcacaatcttggctcactgcaacctctgcctcccaggttcaagcaattgttgtgcctcagtctccagagcagctgggactatagttgtgcaccaccacacccagctaatttttgtatttttagtagagtcaaggtttcaccatgttggtcagcctggtctcgaactcctggcctcaagttatccacctgccttggcctcccaaaatgctggaattacagaagtgagccactacgccccggtcagcaatgcaaattctttttttttttccccccgagatggagtcttgctctgtcacccaggctggagtgcagtagcacgatctcggctgactgcaacctccacctcctgggttcaagcaattctcctgcctcagcctcccgagtatctgggattacaggcacccaccaccacacccagctaatttttgtatttttagtagagacagggtttcaccaagttagccaggctggtctcaaactcctgacctcgcgatccacctgccttggcctcctaaagtgctgggattacaagcgtgagccaccgcacccgcctgccgatgtaacttctaagtcgtcttcacaaaatgggctgtcgtctcaaagcattagaaactgtaaaatc

SEQ ID NO: 1322 - protein, 201 aa, Homo sapiens [sequence omitted]

SEQ ID NO: 1323 - DNA, 907 bp, Homo sapiens
  source (1)..(907)
  CDS (201)..(707)
agtgtgaaatggtatctcattgcggttttaacttgcatttttctaatggctaatgatgttgagtacttatgtgtttattggtcatttggataatctattttgtgaagtgcctgttcaagcctttttgtgtctgcaatttttactagcgagtttatttcttcttatttaaacctcactctgggctccggacaaatatatcaatggaattcttcatactgctgcttgtatgttttgaaaggacctcagctgaacataaaggtaaacttacaatttcctctctcactcttcccccctccactttcagaccttggcctccaccaccgacacatcctctagtagatgacctcatcatccacacagtggcacagaccagaaacctaggcagctttcctgatacctcttctcatctgtttccctactcccacccaatccatcgcgtttcctcctgcctatttcttgaacccaatcaattcccccaaattcctccatctccaccattgcctaagccaccatggtctctcacttgcattactgcaatagcctcctttctttctttcttctttctttctttcttttttttattttggaaaggaagtctctgtcacccaggctggagtgcagtggcgcaacctgggctcactgcaacctcagcctcccagattcaagcaattctcctgcctcagcctcccaagcagctgggattataggtgctcaccaccacaacccgctaatttttgtatttttagtagagacagggtttcaccatgttggccaggatgatctcgaacgcctggcctcaagtaatctgcccacctcagcctcccaaagtgctgggattataggcacgagccaccacacccagtcaatagcttcctttctaacaagtcttgttcccttcaggctgtac

SEQ ID NO: 1324 - protein, 168 aa, Homo sapiens [sequence omitted]

SEQ ID NO: 1325 - DNA, 853 bp, Homo sapiens
  source (1)..(853)
  CDS (201)..(653)
gaaatattacagatttttaagtccactcgcttcttggtactcagatgtttacattagttcatttgatataagatgaaaggaactagatctaattagaaaattaaaatgctggaaatagacttaatcagaaaactaaaacagggacattggaaactgatgacatacactgtttcaattcttccacaggtgctgattgcctgatgggtgtttacttgttctttgttggcattttcgatataaaataccgagggcagtatcagaagtatgccttgctgtggatggagagcgtgcagtgccgcctcatggggttcctggccatgctgtccaccgaagtctctgttctgctactgacctacttgactttggagaagttcctggtcattgtcttccccttcagtaacattcgacctggaaaacggcagacctcagtcatcctcatttgcatctggatggcgggatttttaatagctgtaattccattttggaataaggattattttggaaacttttatgggaaaaatggagtatgtttcccactttattatgaccaaacagaagatattggaagcaaagggtattctcttggaattttcctaggtaaattatattttttcatttcctggaaaaacataattttgctagaaatacgttaaatttcagcaaaggtggatttgtttgtttcagaaagtgagataacatagtcaagactgtgtcctttttcacacaaaaaagtttttactattgtgtttattgaagttttattaaactttttattagacaatatttagtgtggaaaataaagacatactaccaggatctctggatgatatttttattatccataagatccttt

SEQ ID NO: 1326 - protein, 150 aa, Homo sapiens [sequence omitted]

SEQ ID NO: 1327 - DNA, 943 bp, Homo sapiens
  source (1)..(943)
  CDS (201)..(743)
tggtgaaataatatacatttatattaggtaaggagaaaataatttcttccagctaattaatcaggatgtatcttagaggatgaaaaatctctcttttgaaatgagcagagtcttgtatttgatatgaattacctcattcattttaaatgtcactaatgccctattgtttaatctctttgatctaggtagagccagatcaaatggataaaaaccaaacagaagtgatgagagaatttttcttgtcagggttctcacagacaccatctattgaagcagggctatttgtactatttcttttcttctatatgtccatttgggttggcaatgtcctcatcatggtcacagtagcatctgataaatacctgaattcatcacccatgtatttccttcttggcaacctctcatttctggacctatgttattcaacagtaacgacccctaagcttctggctgacttctttaatcatgaaaaactcatttcctatgaccaatgcattgtgcaactcttcttcctgcattttgtaggggcagctgagatgttcctgctcacagtgatggcgtacgatcgctatgttgcaatctgtcgcccgctgcactacaccactgtcatgagtcgggggttatgctgtgtgttggttgctgcctcctggatgggaggatttgtgcactccactgtccagaccattctcactgtccatctacccttttgtgggccaaatcaggtggaaaacttttttttgtgatgttccccctgtcatcaaacttgcttgtgctgacacttttgtcattgaattgctcatggtatctaacagtgggttgatctccaccatctcctttgtggtgctgatttcctcctacaccactatcctagtcaagattcgctccaaggaaggaaggcgaaaggcactctccacgtgtgcctctcacctcatggtggtaacac

SEQ ID NO: 1328 - protein, 180 aa, Homo sapiens [sequence omitted]

SEQ ID NO: 1329 - DNA, 901 bp, Homo sapiens
  source (1)..(901)
  CDS (201)..(701)
ctctgtctctctctctctctctctctatccatctatctatcttgcaaagcataaaggcaaaagtaaataataattcatataattatctaagtgagcccagggaaaatattaattcctaacaatcatgtgaatactctttgtcttatagcctcaccattttatttttatattagaatcaaagcatctatttgatttgcaaaatggtaaaaagcttattcttaatccatcttaattatcttttcttccctctagataacttcagcagctcagattcagttaatggatggagtaataaatcagtggttactgaattcaatttgttggggctgtctagctcttgggaactccaagtcttctttttctttatcttctctgtgttttatggagctgcagtgttgggaaacatccttatcatcatcacagtaattatagactctcatttgcattccccaatgtactttcttcttagcaatctctcttccatcgatgtgtgtcaggctacatttgccactcccaagatgattgcagacttcctcaacgaacacaagaccaccactttccagggatgcatgtcacaaatctttttcttgcatgtttttgggggtagtgagatggtgcttcttgttgccatggcctatgatagatacattgctatatgcaaacctctgcactacatgaccatcatgaaccggagggtgtgaactgttctggtgggggtttcctgggccattggcatctcacactcagccacccacctggcattcaaagtcaatctgcctttctgtggacccaacagggtagacaattttttctgtgacctcctcctagtgatcaagcttgcctgcttagacacctatggttttgagatactggtgctcactaacagtggtctgctctcact

SEQ ID NO: 1330 - protein, 166 aa, Homo sapiens [sequence omitted]

SEQ ID NO: 1331 - DNA, 1030 bp, Homo sapiens
  source (1)..(1030)
  CDS (201)..(830)
ttttccctgatctacggtgctactgtggtgggaaacattctcattatggtcacagtgacatgtagttcgacccttcattctcccttgtactttctccttggaaatctctcttttttggacatgtgtctctccactgccacaacacccaagatgatcacaagaccatctctgtgtggggctgcgtgacccagaagttcttcatgcacttctttgggagtgctgagatgactcttctgataatcatggcctttgacaggtatgtagccatatgtaaacccctgcactataggacaatcatgagccacaagctgctaaaggggtttgcgatactttcatggataattggttttttacactccataagccagatagttttaacaatgaacttgcctttctgtggccacaatgtcataaacaacatattttgtgatcttccccttgtgatcaagcttgcttgcattgaaacatacaccctggaattatttgtcattgctgacagcgggctgctctctttcacctgtttcatcctcttgcttgtttcttacattgtcatcctggtcagtgtaccaaaaaaatcatcacatgggctctccaaggcgctgtccacattgtctgcccacatcattgtggtcactctgttctttggaccttgtatttttatctatgtttggccattcagtagtttggcaagcaataaaactcttgctgtattttatacagttatcacaccgttactgaatccgagtatttataccctgagaaataagaaaatgcaagaggccataagaaaattacggttccaatatgttagttctgcacagaatttctagatgttagcactatataattaacttttaaatgctatgataagatagtttgaatagattatgtataatgcatcatttcacttttcttatgttataataataacgcataaagacaatactaaattactttaaattttacatttaagacttttataaacataaggataattagagatctgcagcaaaatagacataaaaataga

SEQ ID NO: 1332 - protein, 209 aa, Homo sapiens [sequence omitted]

SEQ ID NO: 1333 - DNA, 979 bp, Homo sapiens
  source (1)..(979)
  CDS (201)..(779)
acccgaagctccgtgctcgccccatgtacattcttctgggagtgctctcattcctggacatgtggctctcctcagtcatcgttccttgaattattttaaacttcactcctgccaacaaggctatcccgtttggtggctgtgtggctcaactgtatttctttcacttcctgggcagcacccagtgcttcctctacaccttgatggcctatgacaggtacctggcaatatgtcagcccctgcgctacccagtgctcatgaatgggaggttatgcacagtccttgtggctggagcttgggtcgccggctccatgcatgggtctatccaggccaccctgaccttccgcctgccctactgtgggcccaatcaggtagattactttatctgtgacatccccgcagtattgagactggcctgtgctgacacaactgtcaatgagcttgtgacctttgtggacatcggggtagtggccgccagttgcttcatgttaattctgctctcgtatgccaacatagtaaatgccatcctgaagatacgcaccactgatgggaggcgccgggccttctccacctgtggctcccacctaatcgtggtcacagtctactatgtcccctgtattttcatctaccttagggctggctccaaaggccccctggatggggcagcggctgtgttttacactgttgtcactccattactgaaccccctcatctatacactgaggaaccaggaagtgaagtctgccctgaagaggataacagcaggtcaagggactgaatgaaaataagtaactatctacggccataccaccctgaacacgcccgatctcgtctgatctcagaacctaagcagggtcgggcctggttattacttgggtgggaaaataagtaactacagccacataaccatcgctaccactctcttcagctactgctgcacgtgacaaatgttcaataaatagatgttagtttcagcagaaat

SEQ ID NO: 1334 - protein, 192 aa, Homo sapiens
MAYDRYLAICQPLRYPVLMNGRLCTVLVAGAWVAGSMHGSIQATLTFRLPYCGPNQVDYFICDIPAVLRLACADTTVNELVTFVDIGVVAASCFMLILLSYANIVNAILKIRTTDGRRRAFSTCGSHLIVVTVYYVPCIFIYLRAGSKGPLDGAAAVFYTVVTPLLNPLIYTLRNQEVKSALKRITAGQGTE

SEQ ID NO: 1335 - DNA, 1045 bp, Homo sapiens
  source (1)..(1045)
  CDS (201)..(845)
  modified_base (14)..(113): a, t, c, g, unknown or other
cctgtccggagagnnnnnnnnnnnnnnnnnnnnnnnnnnnnnnnnnnnnnnnnnnnnnnnnnnnnnnnnnnnnnnnnnnnnnnnnnnnnnnnnnnnnnnnnnnnnnnnnnnnnggcctgttcccggtgcatggccggggctcagagggcaagccctgtggagaacttaagaaggaaaagggcatccaccggctggaggccatgctgttcgccctggatcgcatcaacaacgacccggacctgctgcctaacatcacgctgggcgcccgcattctggacacctgctccagggacacccatgccctcgagcagtcgctgacctttgtgcaggcgctcatcgagaaggatggcacagaggtccgctgtggcagtggcggcccacccatcatcaccaagcctgaacgtgtggtgggtgtcatcggtgcttcagggagctcggtctccatcatggtggccaacatccttcgcctcttcaaggtcagtgccttggttggtcccctgaggtgctcttcccccaacggactctgcccgccccacttcagggtgccaggcctggccgaccagcccctttttcctccttttttcctcactctaagggacagttttttcctcagagcagtgtctgagaatttggggcagctcttcctggtttcagtatgttgtcttgtggtctcagcacaggcacagcagatgaaaggcatcgggacccagccttgtggcgctgaccgaggtgctgaaacagcacctgccgctggaggctcggtgagcaactccactcctctctggggaattctgtaccaggaggaaaaggatgttctggagaacgacagagggaggaggagataggcagacagacagataaaaagatacgcaggtggatagacagacagacagacagataagaagaatggaaatatgaatgctggagattgccagggagaaaaagcaagacttttgttttgacactgttttcatataattgcaattcccaagaaagatgtttttcttctgggtagttgaggaagctccctgtggccctcctgccc

SEQ ID NO: 1336 - protein, 214 aa, Homo sapiens
MLFALDRINNDPDLLPNITLGARILDTCSRDTHALEQSLTFVQALIEKDGTEVRCGSGGPPIITKPERVVGVIGASGSSVSIMVANILRLFKVSALVGPLRCSSPNGLCPPHFRVPGLADQPLFPPFFLTLRDSFFLRAVSENLGQLFLVSVCCLVVSAQAQQMKGIGTQPCGADRGAETAPAAGGSVSNSTPLWGILYQEEKDVLENDRGRRR

SEQ ID NO: 1337 - DNA, 931 bp, Homo sapiens
  source (1)..(931)
  CDS (201)..(731)
agagatatggtatgtctcttctacagttcccaagatgttggtcaacttcctttcagagaaaaaaaccatctcctttgctggatgttttctccaattttatttcttcttctctttggtacatctgaatgcttgattttgactgtgatggcctttgatcagtaccttgttatctgccatcccttgcactatcctaataaatcatgactgggcatctctgtgccaaactggtcatactgtgctgggtttgtggatttctgtgtttcctgatccccactgttctcatctctcagatgcccttctgtggtccaaacattaatgaccatgttgtgtgtgacccagggccactatttgcattggcttgtgtctctgccccaagaatccaactgttttgctacactctaagctcattagttatttttggtaacttcctctttattattggatcctatactcttgtcctgaaagctgtgttgggtatgccttcgagcactgggaaacataaagccttctctacctgtgggtctcatttggctgtggtatcactgttctatggctctcttatggtcatgtgtgtgagtccaggacttggacactctatggggatgcagaaaatcaaaactttgttctatgctatggtgaccccactcttcaatccccttatctatagcctccagaataaggagataaaggcagccctgaggaaagttctggggagttccaacataatctaagccatattagattattcctccatgatcagatcagtacagtctaacaaagagaaatcagaattatatagttatttaaatctaaaaaatatggatctagtgatattgactatatcagcctatgaaattaaacacctgttgggccccttacaaattaaagttgccaaattatatagataaatggaagcgtgtggcttcccttt

SEQ ID NO: 1338 - protein, 176 aa, Homo sapiens [sequence omitted]

SEQ ID NO: 1339 - DNA, 991 bp, Homo sapiens
  source (1)..(991)
  CDS (201)..(791)
tgtcaacctaaatgacagagaggaaaatgcttcaaaagaaaatgacgtttattagggaataggcattgcaatgggaatacaggtgccatagtgaactatgcgcatatttaggcagggaggtaaaggaagacaaaggtttttaaaggaaaaatcagggggattgtgtaattgttttgagatagttatccttggctacaaggatgaataacaagggtggtgccagttcgaggttggacaggcagttgctgggaagatgtcctcgtaaaagtattttttgtgtgtgtaaggttgcaatggtctttgtgcaaagttatggtttttgcaagagaagaggtcttgctttgtctcccaggctggagtgcagtggtgtgatcatggcttactgcagacttgacctcctggcctcaatcaacaacagggacaataggcatgtgccatgcctggcttttatttatttatttatttatttaatttatttatttattttcatagagatagagtcttgctgtgttgcccaggctggtcttgtactcttggcctcaagcaatccttctgcctcagcctcccagaattctgggattacaggcatgaaccaccatgcccagacttgtcagggttatttttgtttgtttgttttgtttttaaagagagtctcactctgttgcccaggctggagtgcagtggcacaatctctgctcactacaacctccgcctcatgggttcaagcgattctcctgcctcagcctcccaaggagctgggactacaggtgcacaccaccatgccccgctaatttttgcatttttagtagagatggggtttcaccatgttggccaggctggtctcgaactcctaaccaagtgatctgcctgccttgacctcccaaagtgctgggattgttagggtttttaacacaagtgactccatttttattctgacaactttcacaagagaaatgtaacataaatgttaaagcatgtgacataaatatat

SEQ ID NO: 1340 - protein, 196 aa, Homo sapiens [sequence omitted]

SEQ ID NO: 1341 - DNA, 961 bp, Homo sapiens
  source (1)..(961)
  CDS (201)..(761)
gaaataggagaaatctactcttctgttcttctttgcaacactgcaaaacagcagaggtgagtggcaatgtagctccatcacccccaaaaaccaggactaaagagataatgaaatattttagtattgaatttaaaatgtcatcattcagaaatactattttttttcagatgggccatacacacacaacctgagctaaatctatgaaaaagatgaacaatgtaatagaattcatactgctgggcctcactcacaatccagaactgcagaaattcttgtttgttatgtttttaatcacctacttgatcacattggcaggtaacctgttcatctcagtcatcatcttcatcagcccagccctgggttcccccatgtactcttttccgtcctatttgttcattatagacattttctgctcttcttccatagcccctaaaatgaactttgacttgatctctgaaaagaacaccatatccttcaatggctgcatgactcagctcttcacagaacatttcttttattattattattattatactttaagttttagggtacatgtgcacaacgtgcaggtttgttacatacttatacatgtgccatgttggtgtgctgcacccattaactcatcatttaacattaggtatatctccaaatgctatccctcctccctccccccaccccccaccccacaacaggtcccagtgtgtgatgttccccttcctgtgtccatgtgttctcattgttcaatttccacctatgagtgagaacatgcagtgtttggttttttgtccttgtgatagtttgctgagaatgatggtttcccgtttcatccatgtccctacaaaggacatgaactcatcattttttattgctgcatagtatttcacggtctatatgtgccacattttcttaattcagtctatcgttgttggacatttgggttggttccaagtctttgctattg

SEQ ID NO: 1342 - protein, 186 aa, Homo sapiens
MKKMNNVIEFILLGLTHNPELQKFLFVMFLITYLITLAGNLFISVIIFISPALGSPMYSFPSYLFIIDIFCSSSIAPKMNFDLISEKNTISFNGCMTQLFTEHFFYYYYYYTLSFRVHVHNVQVCYILIHVPCWCAAPINSSFNIRYISKCYPSSLPPPPTPQQVPVCDVPLPVSMCSHCSISTYE

SEQ ID NO: 1343 - DNA, 883 bp, Homo sapiens
  source (1)..(883)
  CDS (201)..(683)
ctgcatgggaaagtgctataggacacacatggccgaagtggggatagaattcagtgccctcacaggcagcttctctggcttttttaaaaccatgagcttaggctttgtcaatagagtacactggctttcataagcttaggattcaccttccaggaaagaaaacaaacaacataggcagccgtgatcaagtccagcctcccatgtttgaagggagctcaaaaactctgcaaagggaggcagccggaggttcggcgccattatggttggtgagcacagcccaaaccaaagtcaaatgcagcaggctcctgaatatcaaacgtgttagtcactcagggttagtgaatgggaagctgtcaacttcacacaacatgctggaaagtcctttacctgaactaccaggtgctttttgttttatttcagagctcagaatttgggccctgaaggaagtgaacttacagggcactggacttctgtacctgaaaaggcaaatgattgttcaaaaagaacttaaaaggcatccttcaagcctactatctctagttcttttttctttttttttttttttttttgagacaagagtctcgctctgtcccccaggctggagtgccgtggtgcaatctcggctcaccgcaacctccgcctcccaggttcaagtgattctcctgcctcagcctccagagtagctgggattacaggcgcactccaccacgcccagctaatttttgtatttttagtagagatggggtttcgccatgttgcccaggctggtctcgaactcctgacctcaggtgattcacccgcctcagcctcccaaagtgctgggattacaggcatgagccaccgcgcctggctctctaagtttaagtattaaagagtgaaagct

SEQ ID NO: 1344 - protein, 160 aa, Homo sapiens
MFEGSSKTLQREAAGGSAPLWLVSTAQTKVKCSRLLNIKRVSHSGLVNGKLSTSHNMLESPLPELPGAFCFISELRIWALKEVNLQGTGLLYLKRQMIVQKELKRHPSSLLSLVLFSFFFFFFETRVSLCPPGWSAVVQSRLTATSASQVQVILLPQPPE

SEQ ID NO: 1345 - DNA, 1360 bp, Homo sapiens
  source (1)..(1360)
  CDS (201)..(1160)
cccagctccctctttatccctaggaccctgaggctcagaggggcagcttcaggggaggacaccccactggccaggacgccccaggctctgctgctctgccactcagctgccctcggaggagcgtacacacccaccaggactgcattgccccagctgtgcagcccctgccagatgtgggaggcagctagctgcccagaggcatgcccccctgccagccacagcgacccctgctgctgttgctgctgctgctggcctgccaggtgaggactcacagcaccctcagcacccaggggccctcctgtgaggactgcacactgatggctctctgtctgcctgcctgcctgcctgcctgcctgcctgtctgtctgtctgcccgtctgcctgcccatctgcctgtctgtctgcctgtccgtctgtctgtccatctgtccatctgcctatccatctgcctgcctgtctgcctgtccgtctgcctgtctgtctgcctgtccatctgtccatctgcctatccatctgcctgcctgtctgtcggcctgcctgcctgcctgtctgtctgctgcctgtctgtccgtctgcctgtctgcctgtccgtctgcctgcctgtccgtctgcctgtccgtctgcctgcctgcctgtctgtctgcctgcctgtctgcctgcctgtccgtctgcctgtccgtctgcctgcctgtctgcctgcctgtctgcctgtctgcccgtctgcctgtctgtctgcctgtccgtctgcctgtctgtccgtctgtccatctgcctatccatctgcctgcctatctgtctgtccgtctgcctgcctgtctgtctgcctgtctgcctgtctgtctgcctgtctgtccatctgcctatccatctacctgcctgcctgtctgcctgtctgtctgcctgtctgtctgcctgcctgtctgtctgtctgtctggttgcttgtgcatgtgtcccccagccacaggtcccctccgctcaggtgatggacttcctgtttgagaagtggaagctctacggtgaccagtgtcaccacaacctgagcctgctgccccctcccacgggtgagccccccacccagagcctttcagcctgtgcctggcctcagcacttcctgagttctcttcatgggaaggttcctgggtgcttatgcagcctttgaggaccccgccaaggggccctgtcattcctcaggcccccaccaccgtgggcaggtgaggtaacgaggtaactgagccacagagctggggacttgcctcaggccgcagagccaggaaataacagaacggtggcattgccccagaaccggctgctgctgctgcccccaggcccagatgggtaataccacctacagccccgtgg

SEQ ID NO: 1346 - protein, 319 aa, Homo sapiens
MPPCQPQRPLLLLLLLLACQVRTHSTLSTQGPSCEDCTLMALCLPACLPACLPVCLSARLPAHLPVCLPVRLSVHLSICLSICLPVCLSVCLSVCLSICPSAYPSACLSVGLPACLSVCCLSVRLPVCLSVCLPVRLPVRLPACLSVCLPVCLPVRLPVRLPACLPACLPVCPSACLSACPSACLSVCPSAYPSACLSVCPSACLSVCLSACLSACLSICLSIYLPACLPVCLPVCLPACLSVCLVACACVPQPQVPSAQVMDFLFEKWKLYGDQCHHNLSLLPPPTGEPPTQSLSACAWPQHFLSSLHGKVPGCLCSL

SEQ ID NO: 1347 - DNA, 1087 bp, Homo sapiens
  source (1)..(1087)
  CDS (201)..(887)
ctgatatgtgttcctgggtttccaatttcttccttcttgtgtgtgacctgagccctttttactcacacagtcatggaagtaggcagatgagagcacttaggaacgaactcccttaacacagacacaggtgtcctgcgtactcacgtggtcagggatgagacagatgagaacactccgaatgcactcccccgatatgcagcatggaccttcagtcactctgcacaccgccagctcccccgacacgcaacatggaccttcagtcactctgcacaccgccagctcccccgacatgcagcctgcaccttcagtcactgtgcacaccgccagctcccccgacatgcagcctgcaccttcagtcactctccacaccgccagctcccccgacatgcagcctgcaccttcagtcactctccacaccgccagctcccccgacatgcagcctgcaccttcagtcactctccacaccgccggctcccccgacatgcagcgtgcaccttcagtcactctgcacaccgccggctcccccgacatgcagcttgcaccttcagtcactgtgcacaccgccagctcccccgacatgcagcccgcaccttcagtcactctgcacaccgccagctcccccgacatgcagcccgcaccttcagtcactctgcacaccgccagctcccccgacatgcagcccgcaccttcagtcactctgcacaccgccagctcccccgacatgcagcccgcaccttcagtcactctgcacaccgccagctcccccgacatgcagcccgcaccttcagtcactctccacaccgccagctcccccgacatgcagcttgcaccttcagtcactctccacaccgccagcagccctgacaatctccacgttggacctttgatgtttttcttatagcttcttcgtacactgatctaaacttcttcttttgtaatgcttttacttctattcacttttccctcttaaattttttaactgtatgaattatatccaataattatgtgtaatataactacagctggccctctgtatccacgggttccatagatggggattcaaccaagcattgagagaaaatattca

SEQ ID NO: 1348 - protein, 228 aa, Homo sapiens
MDLQSLCTPPAPPTRNMDLQSLCTPPAPPTCSLHLQSLCTPPAPPTCSLHLQSLSTPPAPPTCSLHLQSLSTPPAPPTCSLHLQSLSTPPAPPTCSVHLQSLCTPPAPPTCSLHLQSLCTPPAPPTCSPHLQSLCTPPAPPTCSPHLQSLCTPPAPPTCSPHLQSLCTPPAPPTCSPHLQSLCTPPAPPTCSPHLQSLSTPPAPPTCSLHLQSLSTPPAALTISTLDL

SEQ ID NO: 1349 - DNA, 2614 bp, Homo sapiens
  source (1)..(2614)
  CDS (201)..(2414)
  modified_base (205)..(304): a, t, c, g, unknown or other
  modified_base (2494)..(2593): a, t, c, g, unknown or other
cacaggctttatctggctttatccccacaccgtctgactccacttcatcgtactcaggacggtgaggtgactgcaaggaaggagaatgcttgttaatatcagccaaagaacaagagtcccctgaacctgacagtggcaggaaagtcatcaggacaggtcaggctcagcaaggaccttaagaacaattccctctgtaatttatggnnnnnnnnnnnnnnnnnnnnnnnnnnnnnnnnnnnnnnnnnnnnnnnnnnnnnnnnnnnnnnnnnnnnnnnnnnnnnnnnnnnnnnnnnnnnnnnnnnnnttggtcccgggaaccccctcattcccgggaaacccctcagtcaggaaacccctcagtcccgggaacccctcagtcccgagaaccccctcagtcaggaaacccctcagtcccgggaatccctcagtcccaagagacccctcagtcccggaaacccctcagtcccgggaaccctctcagtcccgggaaccccctcggtcccgggaaccccctcagtcaggaaacccctcagtccagggaacaccctcagtcaggaaacccctcagtcccaagagacccctcagtcccggaaacccctcagccccgggaaccccccagtccctggagcccctcagtcccgggaaacccctcagtcccgggaaccccttcgatcccgggaacccctcagtcaggaaacccctcagtcccgggaacccctcagtcctggaaacccctcagtcccgggaacccctcagtcaggaaacccctcagtcccgggaaacccctcagtcccaggaaacccctcagtcccgggaacccctcagtcccgggaacccctcagtcaggaaacccctcagtcccgggaaacccctcagtcccaggaaacccctcagtcccgggaacccctcagtcccgggaaccccctcagtcaggaaacccctcagtcccgggaacccctgagtcccaagagacccctcagtcccggaaacccctcagtcccaggaaccccttcagtcccaggaaccccctcggtcccgggaaccccctcagtcaggaaacccctcagtccagggaaccccctcagtcaggaaacccctcagtcccaagagaccccctcagtcccggaaacccctcagccccgggaaccccccagtccctggagcccctcagtcccgggaaacccctcagtcccgggaaccccttcgatcccgggaacccctcagtcaggaaacctctcagccccgggaaccccctcagtcccgggaaacccctcagtcccaggaacccctcagtcccaggaaacccctcagtcccgggaacccctcagtcccgggaacccttcagtcccaggaacccctcggtctcaggaaccccctcggtcccgggaacccctcagtcccggaaacccctcagtcccgggaaccccttcggtcccgggaatcccctcgttcccgggaacccctcagtcaggaaacccctcagccccgggaaccccctcagtcccgggaaacccctcagtcccgggaacccctcagtcaggaaacccctcagtcccgggaaacccctcagtcccaggaaacccctcagtcccgggaaccctcagtcccgggaacccctcagtcccgggaaacccctcagtcccgggaaacccctcagccccgggaaccccctcagtcccgggaaacccctctgtcctgggaacccctcagtcaggaaacccctcagtcccggggaaacccctcagtcccgggaacccctcagtcccgggaaacccctcagtcccgggaaccctcagtcccgggaacccctcagtcccgggaaacccctcagtcccgggaaacccctcagccccgggaaccccctcagtcccgggaaacccctctgtcctgggaacccctcagtcaggaaacccctcagtcccgggaaacccctcagtcccgggaacccctcagtcccgggaaacccctcagtcccgggaaccccctcagtcccgggaaacccctcagtcccgggaacccctcagtcacgaaacccctcagtcccgggaaacccctcagtcccaggaaacccctcagtcccgggaacccctcagtcccaggaaccccctcagtcccgggaaccccctcagtcccgggaaacccctgcagtcccggggaacccctcagtcaggaaacccctcagtcccgggaaacccctcagtcccaggaaacccctcagtcccggaaccccctcagtcccggtaacccctcagtcccgggaaacccctcagtcccgggaaccccctcagtcccgggaaacccctcagtcccggaaacccctcagtcaggaaacccctcaatcccgggaaacccctcagtctcaggaaacccctcagtcccatgaaccccctcagtcccgggtacccctcatttaagatacccctcattcctgggatacccctccatcccatgatacccctctgctcccgcaacccttcagtccctggaacccttnnnnnnnnnnnnnnnnnnnnnnnnnnnnnnnnnnnnnnnnnnnnnnnnnnnnnnnnnnnnnnnnnnnnnnnnnnnnnnnnnnnnnnnnnnnnnnnnnnnnatgtgtgaggccctgccacag

SEQ ID NO: 1350 - protein, 737 aa, Homo sapiens
  MOD_RES (2)..(35): Variable amino acid
MXXXXXXXXXXXXXXXXXXXXXXXXXXXXXXXXXXWSREPPHSRETPQSGNPSVPGTPQSREPPQSGNPSVPGIPQSQETPQSRKPLSPGNPLSPGNPLGPGNPLSQETPQSREHPQSGNPSVPRDPSVPETPQPREPPSPWSPSVPGNPSVPGTPSIPGTPQSGNPSVPGTPQSWKPLSPGNPSVRKPLSPGKPLSPRKPLSPGNPSVPGTPQSGNPSVPGNPSVPGNPSVPGTPQSREPPQSGNPSVPGTPESQETPQSRKPLSPRNPFSPRNPLGPGNPLSQETPQSREPPQSGNPSVPRDPLSPGNPSAPGTPQSLEPLSPGKPLSPGNPFDPGNPSVRKPLSPGNPLSPGKPLSPRNPSVPGNPSVPGTPQSREPFSPRNPSVSGTPSVPGTPQSRKPLSPGNPFGPGNPLVPGNPSVRKPLSPGNPLSPGKPLSPGNPSVRKPLSPGKPLSPRKPLSPGNPQSREPLSPGKPLSPGKPLSPGNPLSPGKPLCPGNPSVRKPLSPGETPQSREPLSPGKPLSPGNPQSREPLSPGKPLSPGKPLSPGNPLSPGKPLCPGNPSVRKPLSPGKPLSPGNPSVPGNPSVPGTPSVPGNPSVPGTPQSRNPSVPGNPSVPGNPSVPGTPQSQEPPQSREPPQSRETPAVPGNPSVRKPLSPGKPLSPRKPLSPGTPSVPVTPQSRETPQSREPPQSRETPQSRKPLSQETPQSRETPQSQETPQSHEPPQSRVPLI

SEQ ID NO: 1351 - DNA, 859 bp, Homo sapiens
  source (1)..(859)
  CDS (201)..(659)
  modified_base (480)..(579): a, t, c, g, unknown or other
tcaacaattatgagccaaagagtgtgtgttgagcttgtggcagtttcttgttggacagtgggctttctacatacaatgagccaattagtttttccctctatttgcccttctgtgttcccaatgttgtagacagttttttctgtgatcttcctttggtcatccagttagcttgtatagatatttatgttcttgggacctccatgatttcaaccagtggtgtgattgctcttataagttttctgcttttgctcacctcctacatcattgttcttaatattgtcagggactactcctccacaggatcctccaaggctctttctacctgtacagcgcattttattgttgtgttaatgttctttgggccctgtattttcatttatgtgtggccttccacaaacttcctggtagacaaaattctctccgttttctataccatcttcactccctttctgaatccacttatctatactttgagaaacnnnnnnnnnnnnnnnnnnnnnnnnnnnnnnnnnnnnnnnnnnnnnnnnnnnnnnnnnnnnnnnnnnnnnnnnnnnnnnnnnnnnnnnnnnnnnnnnnnnntgcaccactgcattccatcctgggcaacagagagagaccctgtctcaaaacaaaaaaacaaaaaacaaaaaactacctgagactggacagtttatttaaaaatgtttaattgactcatttccacaggctgtacaggaggcatggctggggagggctcaggaaatttacaatcatggccgaaggtgaaggggaagcaagcacatcttcacatggtgacgggagagagaaagcgaagagggaagtgctacacactttcaaacaaccagatctcgtgagaact

SEQ ID NO: 1352 - protein, 152 aa, Homo sapiens
  MOD_RES (94)..(127): Variable amino acid
MISTSGVIALISFLLLLTSYIIVLNIVRDYSSTGSSKALSTCTAHFIVVLMFFGPCIFIYVWPSTNFLVDKILSVFYTIFTPFLNPLIYTLRNXXXXXXXXXXXXXXXXXXXXXXXXXXXXXXXXXXHHCIPSWATERDPVSKQKNKKQKTT

SEQ ID NO: 1353 - DNA, 922 bp, Homo sapiens
  source (1)..(922)
  CDS (201)..(722)
tcctcctcctgggactctcagaggatccagaactgcagccggtcctcgctttgctgtccctgtccctgtccatgtatatggtcacggtgctgaggaacctgctcagcatcctggctgtcagctctgactccccgctccacacccccatgtgcttcttcctctccaaactgtgctgagctgacatcggtttcaccttggccatggttcccaagatgattgtgaacatgcagtcgcatagcagagtcatctcttatgagggctgcctgacacggatgtctttctttgtcctttttgcatgtatggaagacatgctcctgactgtgatggcctatgactgctttgtagccatctgtcgccctctgcactacccagtcatcgtgaatcctcacctctgtgtcttcttcgtcttggtgtcctttttccttagcccgttggattcccagctgcacagttggattgtgttactattcaccatcatcaagaatgtggaaatcactaattttgtctgtgaaccctctcaacttctcaaccttgcttgttctgacagcgtcatcaataacatattcatatatttcgatagtactatgtttggttttcttcccatttcagggatccttttgtcttactataaaattgtcccctccattctaaggatgtcatcgtcagatgggaagtataaaggcttctccacctgtggctcttacctggcagttgtttgctgatttgatggaacaggcattggcatgtacctgacttcagctgtgtcaccaccccccaggaatggtgtggtggcgtcagtgatgtatgctgtggtcacccccatgctgaaccttttcatctacagcctaggaaagagggatatacaaagtgtcctgcggaggctgtgcagcagaacagtcgaatctcatgatatgttccatcc

SEQ ID NO: 1354 - protein, 173 aa, Homo sapiens; identical to SEQ ID NO: 1150

SEQ ID NO: 1355 - DNA, 1120 bp, Homo sapiens
  source (1)..(1120)
  CDS (201)..(920)
ttttgtgatgaatttcccaggtgttatttgtgcttcttgtatttggatgtctaggtctctcacaaggccacggaagttttccttgattattcccccaaatatgttttcctagcctttagaattcacttctccctcaggtacaccaattagtcttaggtttcattgtcttaggccccaccactggggccgctacacgtgacatgggatgtgggccatcgggcaaagggcgcggagatggggcgctgccaggggagccaaggaggaaagagagcactttccaaattgtcttccagggtttcaatgtgcattttattaactcagaatctgtcgggaataatactagggagctacctttccctggagatgggtcttgtcagtggagtgagataggctggggggaggaagaggaatgggaggctcagtttataaatattaagatcagcaagggtgtgctgctggcaggagcagagggagcctggagatttgggtggctgccgttggtaagtggttgcaatccagagagtgggattgagttcctcccttgtcatgttagcatcccgtttcctgggcgcgggtctaatgccctgcaggtggtcatttcactcatggtggctttgtctctcttctgccatctccagactcagcttcgcactccagggctgcgtaccaccagccactgtcatgttaaccccttcccaggccaatgtgtccttggtctggagcccaatctgctggacagcctgggaccgtccattttcggggtggtgggcaacctggtggccatcgtggtgctgtgcaagtcgcgcaaggagcagaaggagaccaccttctacacagttatgcggctggttgccaccgacctgttgttcactttgctggtgagccaggtgaccatcgccatgtacatgaagggcgggtaacctgggggccagctgctgtgtgagtacagcatcttcagcttgttcttcttcagtcagtccggcctcagcatcgtctgtgccatgatatctatacaggtaatttgtgttagacattcttagaagagtttcaaaagttttatgtttttatctgggttataaacagagtcctcaaatgcatacaaaggaaatcatgccatgat

SEQ ID NO: 1356 - protein, 239 aa, Homo sapiens [sequence omitted]

SEQ ID NO: 1357 - DNA, 1123 bp, Homo sapiens
  source (1)..(1123)
  CDS (201)..(923)
  modified_base (224)..(323): a, t, c, g, unknown or other
tgtggatccaatggataaaatatgagtttatataaattagtaaatgccaaaatcaaggaagaaacaatttttattttaattgtactttaagttagataaatggtaaggtcaacagcttgttacaacccttaagtattattttcaggctgattgtcaatatgttttgtacaatgttctcacttataggtgggaattgaacaatgagaacacatggacacaggaannnnnnnnnnnnnnnnnnnnnnnnnnnnnnnnnnnnnnnnnnnnnnnnnnnnnnnnnnnnnnnnnnnnnnnnnnnnnnnnnnnnnnnnnnnnnnnnnnnnatcctcatagccatgggctttgacagatatatagcaatatgcaaacccctacactacactacaattatgtgtggcaacgcatgtgtcggcattatggctgtcgcatggggaattggctttctccattcggtgagccagttggcctttgccgtgcacttacccttctgtggtcccaatgaggtcgatagtttttattgtgaccttcctagggtaatcaaacttgcctgtacagatacctacaggctagatattatggtcattgctaacagtggtgtgctcactgtgtgttcttttgttcttctaatcatctcatacactatcatcctaatgaccatccagcatcgccctttagataagtcgtccaaagctctgtccactttgactgctcacattacagtagttcttttgttctttggaccatgtgtctttatttatgcctggccattccccatcaagtcattagataaattccttgctgtattttattctgtgatcacccctctcttgaacccaattatatacacactgaggaacaaagacatgaagacggcaataagacagctgagaaaatgggatgcacattctagtgtaaagttttagatcttatataactgtgagattaatctcagataatgacacaaaatatagtgaagttggtaagttatttagtaaagctcatgaaaattgtgccctccattcccatataatttattaattgtctaggaacttccacatacattgcctcaatttatctttcaacaacttgtgtgttatattttggaatacagatacaaagttat

SEQ ID NO: 1358 - protein, 240 aa, Homo sapiens
  MOD_RES (8)..(41): Variable amino acid
MRTHGHRXXXXXXXXXXXXXXXXXXXXXXXXXXXXXXXXXXILIAMGFDRYIAICKPLHYTTIMCGNACVGIMAVAWGIGFLHSVSQLAFAVHLPFCGPNEVDSFYCDLPRVIKLACTDTYRLDIMVIANSGVLTVCSFVLLIISYTIILMTIQHRPLDKSSKALSTLTAHITVVLLFFGPCVFIYAWPFPIKSLDKFLAVFYSVITPLLNPIIYTLRNKDMKTAIRQLRKWDAHSSVKF

SEQ ID NO: 1359 - DNA, 997 bp, Homo sapiens
  source (1)..(997)
  CDS (201)..(797)
cactacacctggcctattttttaaaaatttttgagacatatatttctattgtcatttctttctcttttttttttcatgaagaagttttactctgtcacccaggctcaattgcagtggcattatcatggctcactgcaaccctgacctcctaggcccaagcgatcctcctgtctcatcctcctgagtagctgggactatacatgccacaatggccagttaatttttttctttttttttttttttttgcagagatgaggtctcagtttgttgcccaggctggtttcaaactcctgagctcaagtgatcctcccaccttgacctttcaaagtcctagcattataggcgtgagccaccgtgtccacccaatttttttaaaaattttaattttaggctgcaggttgcacgtgctggtttgttgcattggtatattgtatgatgctgaggtttgggcttgtaatcatcccattgtccaggtagtgaacagaatagaatatccaataggttattttcagctgccccttatggagttcccagtgtctgttgttcccatctttgcgtccgtgcgtattcaatgtttagctcccacttataacgaaaacgtggtatttggatttcttttttttttttttgagatggagttttgctcttgttgcccagcctggagtgcaatgacgcgatctcggctcaccgcaacctctgcctcccgggttcaagcaattctcctgcttcagcctcccaagtggttgggattacaggcatgcgccaccacgcccggccaattttgtaattttagttgagacagggtttctccatgttggccaggctggtctcgaactcccaacctcaggtgatccatccacctcagcctcccaaagtactgggattacaggcgtgagccactgggcccggcggtgtttggatttctgtttttgccttaatttgctcagggtcatggcctccagctgcatccacgttgctccaaagcacatggtttagt

SEQ ID NO: 1360 - protein, 198 aa, Homo sapiens [sequence omitted]

SEQ ID NO: 1361 - DNA, 952 bp, Homo sapiens
  source (1)..(952)
  CDS (201)..(752)
agactgaacaatagggcaaagcgagttgatttggagacagaggccaggctctcgagcagacgtgtggcctgatggcagtagagagagacctgggatgcagaggccaagtgatgggaaacagaaaggctgagtcatgaaagatggagaagcagaatgaggagggatggagatgtcagtaatcgggtaaggggagcagagttatggaggaaaggggagaaggaggccttctcatggggactacagagacagaaccagccaggcagcttagtagggattggtggaggatgcagagtcagatgatggtgacaaggaggaatagagatggggtcacggggacagaatgttggagggtggaaagccaaagtgacagaggtcagggaggcagaggggaacaagtgaccccgggccccctgccctgtgcagatgtggatgaatgcacccagagcccaggcctgtgtggccgaggggcctgcaagaacctgcctggctctttccgctgtgtttgcccggctggcttccggggctcggcgtgtgaagaggatgtggatgagtgtgcccaggagccgccgccctgtgggcccggccgctgtgacaacacggcaggctcctttcactgtgcctgccctgctggcttccgctcccgagggcccggggccccctgccaaggtgagggtgctgagcccagccctactccatcactgtttgctgtggagactggagagagattattgaggggcagagaggcagagtgatggggctcagggatggagaacaggggctgagggatggggacctcactccagagtcttctctcctttcaacaaaataaggcagtcctccccacccctcctccctttttgaaagatactcttgtgcttatgggaaccctgaggagggggtcacctgaggcagggcaggcaacatggagttggtgccttagcccccaccttag

SEQ ID NO: 1362 - protein, 183 aa, Homo sapiens [sequence omitted]

SEQ ID NO: 1363 - DNA, 1099 bp, Homo sapiens
  source (1)..(1099)
  CDS (201)..(899)
ctggagtctctgagctcagcgtctgctccatattctagcacagtggagaagcccaggctcttccagaacccacagttctcacattccttacttgtcccactagcataaaacgtttgggacagtggcaaggaggtgtggtcccctttgaagggcgccacctctgacttcatcctgctgatctttgcctcccctgtcccctcatgctcaccaccaccaagaagttccccaagagccacttacatttctcacaaatatctggcaggccttcctggccaccccaggagcatggcctccagctccaccaaaggaacctgcgaagcttcctccgaagttgccacgctccatctcgatggcacggtcaaagctggcaccgccaccgccacccatggccaggcccatgcgctcaatgccagcgcccagggccgggcccatggcggggcccatgcgctcgaggctgttggcacccatgcgctccaggcccatgcgctcgaggctgttggcgcccatgcgctccaggcccatccgctccagattgttggcgcccatgcgctccaggccggtggccatgcgatccatcacggggcccatgcgctccaggccagctcccatacctgcgggcaccatgcgctccatgctcaggcccatgcgctcgatggcagggcccatgcgctccacgccagagcccatgcgctcaatggtctggcccacacggtcgatgggagcggccatgcgctcaaggccgaagcccatgccggcacccatgcgctccacgccagagccaatgcgctccatggtctggcccatgcgctcaatgctggaggccatgtggtcgaggcccagcgggcccatgcgctcaatgccggagcccatgcgctccacggagcccatgcggtccatgaccaggcccatgcgctcgatctcggagcccacgcgatccatgccgtggcccaggcccgcgcccatgcgctccatgccggcacccccgaggcggtcaatgccaggacccatcctctcgatcccagggacgcttcctccacctccacctgaaacagggacacaaaacacaggtgggtgtcaagaacttgagtgtgcgtgtgca

SEQ ID NO: 1364 - protein, 232 aa, Homo sapiens
MLTTTKKFPKSHLHFSQISGRPSWPPQEHGLQLHQRNLRSFLRSCHAPSRWHGQSWHRHRHPWPGPCAQCQRPGPGPWRGPCARGCWHPCAPGPCARGCWRPCAPGPSAPDCWRPCAPGRWPCDPSRGPCAPGQLPYLRAPCAPCSGPCARWQGPCAPRQSPCAQWSGPHGRWERPCAQGRSPCRHPCAPRQSQCAPWSGPCAQCWRPCGRGPAGPCAQCRSPCAPRSPCGP

SEQ ID NO: 1365 - DNA, 922 bp, Homo sapiens
  source (1)..(922)
  CDS (201)..(722)
gtcttatatgtaaatgaggcggggtgtgggcccgggcagacagtaagggctcaataacagaaggtcccatctgggctgtgaccaagtggaggtgtttgtgagcccatccaggcccctttcctctctgccctctgccaggtgctgtttccctccaagcccagtttcacccaaggtcaaggtggggcctgaggaagggagaaatggaggtggattgtaataagagtcatggctgctgtgggcatgggcctgccttgcccactgttccaacctgtggcctgtgcctggtccaagccctaccatccctggctggatgctggcctggcttcctgctccaacaggccacagggtcttctgaaaattccaaatcagaccacagtcctccccctcctcacacaccttccatggctccctattgctctacagtccaccctctctctgtcccccaatgcctctctgaccttctctgtctctggccactcctggctcactccaccccagatgtgtggggtttgcctgctcctggaagccacctgtttagcacagtcccacctcagggcctttgcacctgccattgtgtccacctggctcccacctccctgagacacctcagagacagggtcttgctctgtcacccaggctggagtgcagtggtgcgatctcggctcactgcaatctccgcctcccgggttcaagcaattctcatacctcagcctcctgagtagccgggattacaggtgtggtaccctcctggatcctctgtccaaagcagctctctccctgccaccctccactgcctccccctgttgaatttcttccttgaaggccgtcttcccagatacggttatgtggctgctgttgcctcccccatcagactgggtgatggggggaggccttgctctgcccaccccctgctcctgcatcc

SEQ ID NO: 1366 - protein, 173 aa, Homo sapiens [sequence omitted]

SEQ ID NO: 1367 - DNA, 940 bp, Homo sapiens
  source (1)..(940)
  CDS (201)..(740)
ctcccctttaacccaatcttccacacttagctgtataacttgtaataactcatgaaaacccagacacatacataggaataggaattggaattctgaaaagtttaagtgtaattagaaaaccaaacccatgctcacttcattaactgatctctgtttctctcctattcatgtagctgaaattaagtcccttccaaaattcaatgaatgagacaaatcattcttgggtgacagaatttgtgttgctgggactgtctagttcaagggagctccaacctttcttgtttcttatattttcactactttatctagcaattctgttgggcaactttctcatcatcctcactgtgacctcagattcccgccttcacacccccatgtactttctgcttgccaacctgtcatttatagacgtatgtgttgcctcttctgctacccctaaaatgattgcagactttctggttgagcacaagactatttcttttgatgcccgcctggcccagattttctttgttcatctcttcactggcagtgaaatggtgctcctagtttccatggcctatgaccgttatgttgctatatgcaaacctccccactacatgacaatcatgagctgctgtgtatgtgttgtgctcttcctcatttcctggtttgtgggcttcatccataccaccagccagttggcattcactgttaatctgccattttgtggtcctaataaggtagatagtttttttctgtgaccttcctctagtgaccaagttagcctgcatagacacttatgttgtcagcctactaatagttgcagatagtggctttctttctctgagttcctttctcctcttggttgtctcctacactgtaatacttgttacagttaggaatagctcctctgtaagcatggtgaaggcctgctccacattgactgctcacatcactgtgg

SEQ ID NO: 1368 - protein, 179 aa, Homo sapiens [sequence omitted]

SEQ ID NO: 1369 - DNA, 1102 bp, Homo sapiens
  source (1)..(1102)
  CDS (201)..(902)
tgcacaggtccagtacacacaccatgcccgggtctttcttcaccacctccgccccctcctgcatgggtccttatttcctggatttcacatcttcctctttcttggtccccccttgcttgtgttgagcctatcctccaggagttcttgagaaagactgcccggaaggtaacattgctgaattcttgcatcctaccccatagatggctgatgcttggctgagctgcagatcgttgtccttcagaatcatgaagagatgctgttggccagctgccacactgcggttgagcaggctaaagccattctgtttcggaagtctttggttgttttttgttttgtttttatttttttgtagacacagggtcgcgctatgttgctcagacaagtttccaactcctgggctcaagcaatcctgctccggccacgctgtggatcctttatatgtaaccgattttgttcttcctggaaagtttttaagattttgggccccagagttctgcagtttcacactgatattcccctatgtgggactaatttttttttttttttttttttttgagaccatctcactctgtaatccaggctggagtgcagtggtacgatctcggctcactgcaacctctgcctcccgggctcaagcaattctccctcagcctcccgagtacctgggactacaggcgagctccaacacacccagcttcatttcctccactgtgcctgcactcaacaggcactttcccgctggaagctcattctttacttttcagaagttggattatttctttgatttccttccctctattttctcacttctctttcttttcaaatttatgttgtgcagcaatcacttcctttctggaactcctattactcagaatgtagggcctctagggctgtttttctaacttcctttttctctctctctttttttttttttttttttttttttgagacagagtctcactctattgcccaggctggagtgcagtggcataatcttggcttactgcaacctctgcctcccgagttcaagggattctcctgcctctgcctcccgagtagctgggattacaggcatgtgccatgacgcctggctaatttttgt

SEQ ID NO: 1370 - protein, 233 aa, Homo sapiens [sequence omitted]

SEQ ID NO: 1371 - DNA, 1078 bp, Homo sapiens
  source (1)..(1078)
  CDS (201)..(878)
ctgtgtcacttcatcaacaagaaaaataaagtcatcattttcattatcaacctctctgtggctgaccttgcacacatgttgtccttacccctctggatttactattacatcagccaccactggcctttccaggggccccttgacctagtgtgcttctacctgaagtatctcaacatatataccagcatttgcttcctgacatgcatcagccttcagaggtgcttctttctcctcaagtgtcatatactggaagcataggtatgacgggggtcatcatggagactgcttgtttaccatttcccattctgagaagcactggcttagccaacaacaccaaatactgctttgctgccttagggcttcagcacattagcatggcttcctcccttggcatggtaactgtagctgaacttggagggtttgtattacccattataattattacttatttcacatggaaaacaagaaaatctttatgggaattccaagttccccctaggaataccaaagagaggaaaaaggctttgaggatggtcctgatgtgtgaagtggtgttcattgtgtgtttcactccttaccacctcaacttcccattctttatgatggtgaaggaacatgtctttttgaactgctcttttataaagatcattctctgtttccacattatttccctgtgtcttgcaaatctgaattgttgtcttgatccagttgtatattattttatgacctcaaaatttcatgatcaattttcagatcatggcagcttggttcttcagtcatgtatgagatgtaataacagtaccttagaaattcatcagaggaaggaggatcttcaaactatctctcttgaatgtttgaaagattccaagacaatataatcaaataattaactagaaaaatcgatatgctctattagtgtatctatgtcactttgaagatttttcttttttttttttctttttttttattatactttaagttttagggtacatgtgcacattgtgcaggttagttacatatgtatacatgtgccatgctggtgcgctgcacccactaactcgtcatctagcattaggta

SEQ ID NO: 1372 - protein, 225 aa, Homo sapiens [sequence omitted]

SEQ ID NO: 1373 - DNA, 889 bp, Homo sapiens
  source (1)..(889)
  CDS (201)..(689)
agcaaattaatcttatgctgtatatgaatgttttatctcccaaattaaaacataaagatccaaatgacattacttgttttgtagacatctcttcctaatagcacccaatatagagattgaggatatagcaaatactcaataattgcctctcaaattaaaatgaattgaattccttcttctttctcggcagatagaacaaaatggatattctggttattgataatggcagtgaagtgacagagttcatcctggtgggtttgtacaaccatccaaaatttcagattgccttttatcgcaccatggtagtggtctacctgatcacatttgttggtagcagtctcattattgttgtggttaaagttgatgggtggcttcacactcctatgtgttttttcctaagcaacctgtccttccttgatatctgctactccagcaattcagtaccttttttgttgttcaatggcttaagagactaccccaccatttcctataacagctgttatgcccagatgaccagtgctttttttctggggatgacagggtgtcttctccttgctgtcatggcttatgagagatttgttgtgatctccaatcccctgcgctacatcatcattatgaacaataaggtctgcatacagttggccatggtgacctgggccagtgccttccttatgtcattaatacaataattgcaataatacattgcaataatacattaattgcaatgattgcattgcaattcctgcccatttttgtggacacaatgtcatcaaccattttacctgtgaggtgcaggaattgttgaagcttgtctgctcagacatcccaggcagcctcatcctcggtctagtcatcggcatattcaccttgtccctgcccttcaccttgc

SEQ ID NO: 1374 - protein, 162 aa, Homo sapiens [sequence omitted]

SEQ ID NO: 1375 - DNA, 922 bp, Homo sapiens
  source (1)..(922)
  CDS (201)..(722)
ctcccctttaacccaatcttccacacttagctgtataacttgtaataactcatgaaaacccagacacatacataggaataggaattggaattctgaaaagtttaagtgtaactggaaaaccaaacccatgctcacttcattaactgatctctgtttctctcctattcatgtagctgaaattaagtcccttccaaaattcaatgaatgagacaaatcattcttgggtgacagaatttgtgttgctgggactgtctagttcaagggagctccaacctttcttgtttcttatattttcactactttatctagcaattctgttgggcaactttctcatcatcctcactgtgacctcagattcccgccttcacacccccatgtactttctgcttgcaaacctgtcatttatagacgtatgtgttgcctcttctgctacccctaaaatgattgcagactttctggttgagcacaagactatttcttttgatgcccacctggcccagattttctttgttcatctcttcactggcagtgaaatggtgctcctagtttccatggcctatgaccgttatgttgctatatgcaaacctccccactacatgacaatcatgagctgctgtgtatgtgttgtgctcgtcctcatttcctggtttgtgggcttcatccataccaccagccagttggcattcacgttaatctgccattttgtggtcctaataaggtagatagtttttttctgtgaccttcctctagcgacgaagttagcctgcatagacacttatgttgtcagcctactaatagttgcagatagtggctttctttctctgagttcctttctcctcttggttgtctcctacactgtaatacttgttacagttaggaatcgctcctctgtaagcatggtgaaggcccactccacattgac

SEQ ID NO: 1376 - protein, 173 aa, Homo sapiens [sequence omitted]

SEQ ID NO: 1377 - DNA, 946 bp, Homo sapiens
  source (1)..(946)
  CDS (201)..(746)
agcatgtcttgcaaatgaaaaacaaatcaagagcccacacgccccaaccacctcttttattgggctctccctctccagggccaggtaccagacaactaggaacagcccctatgtcccagagcctgctgaagtgactcacactcacaaccctgagcctggtgactgcctatccattcattcctcaataaagtctcttgctcatgtctcacttcctccctcttcctcttgaaaggaagcgttccccatgtggccctgcagagcacggttcccgggttcccagggttccccatgtggccctgcagagcacggttcccgggttcccgggttccccatgtggtcctgcaaagcacggttcccgggttcccagggttccccatgtggccctgcagagcacggttcccgggttcccaggttccccgtgtggccctgcagagcacggttccccgggttccccgtgtggccctgcagagcacggttccccgggttccccgtgtggccctgcagagcacggttccccaggttccccatgtggccctgcagagcacggttcccgtgttcccgggttcctaggttccccgtgtggccccgcagagcacagttcccgggttcccagtgttccccatgtggccctgcagagcacggttcccgggttccccgtgcggaccgcagagcacggttcccgggttcccagggttccccgtgcggccccgcagagcatgccatgtctcccgtttctcgggacctagaatgtaatgaatgtcttcccggatgacagtactttctgtgtctgggggtcttaccatacctgattaaaacaaatccctgatgaatagagtgagtctctgtatcccattctgcgggcatgcacacaacaaatacacacatattcacagagtcccttatgtgtgctcagacatgtgaactttgcatcacaaaaccactgagt

SEQ ID NO: 1378 - protein, 181 aa, Homo sapiens
MSHFLPLPLERKRSPCGPAEHGSRVPRVPHVALQSTVPGFPGSPCGPAKHGSRVPRVPHVALQSTVPGFPGSPCGPAEHGSPGSPCGPAEHGSPGSPCGPAEHGSPGSPCGPAEHGSRVPGFLGSPCGPAEHSSRVPSVPHVALQSTVPGFPVRTAEHGSRVPRVPRAAPQSMPCLPFLGT

SEQ ID NO: 1379 - DNA, 883 bp, Homo sapiens
  source (1)..(883)
  CDS (201)..(683)
  modified_base (574): a, t, c, g, unknown or other
  modified_base (586): a, t, c, g, unknown or other
  modified_base (606): a, t, c, g, unknown or other
  modified_base (665): a, t, c, g, unknown or other
cagaagggtttaaaaaatgaaataaaaggggggaggccatcccagaaggtttgcacaaggtgaaaaccaaaatttttttagtcaaaaaaaagattatttcacagaaagatctttgttncacataaaccacccaaatatctgatgnnacagggcaagcataacaatactattcagaaagagcccttcatttgccaggaagaatgtcagattccaaccacagtgataaccatcttccagacaccttcttcttaacagggatcccagggctggaggctgcccacttctggattgccatccctttctgtgccatgtatcttgtagcactggttggaaatgctgccctcatcctggtcattgccatggacaatgctctccccgcacctatgtacataatcctctgccttctctcactcacagacctggctctcagttctaccactgtgcccaagatgctggccattttgtggctccatgctggtgagatttcctttggtggatgcctggcccagatgttttgtgtccattctatctatgctctggagtcaaaaattctacttgccatggccttgggggnagttttaccatncaatctgcaggatttaccanaattactttcccgaaccgtgttgtccctttgggatttggcttacaaaaaaaagctcttnggcccccaccttgaataattggcctaaactttgcggggaaactttccttggggctttccccatttccccccaagaatggtggggggtccaaaaaaagggtaaaggtcccacccggttcccggttggaccggggccttctaaatcggcccacctcccgggcaaggagggcgacaagggccaagtgaaaaggagaataagggtcccctttccccttttcg

SEQ ID NO: 1380 - protein, 160 aa, Homo sapiens
  MOD_RES (125): Variable amino acid
  MOD_RES (129): Variable amino acid
  MOD_RES (136): Variable amino acid
  MOD_RES (155): Variable amino acid
MSDSNHSDNHLPDTFFLTGIPGLEAAHFWIAIPFCAMYLVALVGNAALILVIAMDNALPAPMYIILCLLSLTDLALSSTTVPKMLAILWLHAGEISFGGCLAQMFCVHSIYALESKILLAMALGXVLPXNLQDLPXLLSRTVLSLWDLAYKKKLXGPHLE

SEQ ID NO: 1381 - DNA, 1198 bp, Homo sapiens
  source (1)..(1198)
  CDS (201)..(998)
  modified_base (429): a, t, c, g, unknown or other
  modified_base (552): a, t, c, g, unknown or other
  modified_base (894)..(993): a, t, c, g, unknown or other
ctggaccaacttggagaaggcccagggaactttagggagacaaagcagaggtatcaagtttagagacaatgaaaactatgactcagtctgttagctgctgtcaacctcccttatgcaatttggttttgtttggaagagcagtgagggtccatgttaaggtaattcatactttctattttcacagaaatgcctaaagaagaatgaccatggaaaattattctatggcagctcagtttgtcttagatggtttaacacagcaagcagagctccagctgcccctcttcctcctgttcctgggaatctatgtggtcacagtagtgggcaacctgggcatgattctcctgattgcagtcagccctctacttcacacccccatgtactatttcctcagcagcttgtccttcgtcgatttctgctattcctctgtcnttactcccaaaatgctggtgaacttcctaggaaagaagaatacaatcctttactctgagtgcatggtccagctctttttctttgtggtctttgtggtggctgagggttacctcctgactggcntggcttgtgatcgctgtgttgccttctgtagcccactgctttatattgccatcctgtcctcatgggtctgctcactgctagtgctggctgccttcttcttgggctttctctctgccttggctcctgcaggggccctgatgaaactggccctttgccaaatcccccttttccacctttacttcggggatgtcgttcccctcctcgatctttcctgctccgccccgcccctgatggggcttctccttttttttcgttggcggggtttaccccctgtggtggcccccccctggcggtgtgcgggctgcctggccttcatgcctcaaacgaaacaacaaaaaagannnnnnnnnnnnnnnnnnnnnnnnnnnnnnnnnnnnnnnnnnnnnnnnnnnnnnnnnnnnnnnnnnnnnnnnnnnnnnnnnnnnnnnnnnnnnnnnnnnnggtaagagaatgcatgccctgcggtttcggctctagaagaatccccataaagtatggacacacctctgaaatgtccaccgagtaccaactagcacagatattatttacttatttaaatacattttttaactaaggaaaataattttatcaaaagggacagcaaataaaagaaatggtaaaaataaacctccaaccaacttcagct

SEQ ID NO: 1382 - protein, 265 aa, Homo sapiens
  MOD_RES (77): Variable amino acid
  MOD_RES (118): Variable amino acid
  MOD_RES (232)..(265): Variable amino acid
MTMENYSMAAQFVLDGLTQQAELQLPLFLLFLGIYVVTVVGNLGMILLIAVSPLLHTPMYYFLSSLSFVDFCYSSVXTPKMLVNFLGKKNTILYSECMVQLFFFVVFVVAEGYLLTGXACDRCVAFCSPLLYIAILSSWVCSLLVLAAFFLGFLSALAPAGALMKLALCQIPLFHLYFGDVVPLLDLSCSAPPLMGLLLFFRWRGLPPVVAPPWRCAGCLAFMPQTKQQKRXXXXXXXXXXXXXXXXXXXXXXXXXXXXXXXXXX

SEQ ID NO: 1383 - DNA, 871 bp, Homo sapiens
  source (1)..(871)
  CDS (201)..(671)
  modified_base (278)..(377): a, t, c, g, unknown or other
gtgggccatattacagcatggacattctctcatgtggaaattaatgtttcagtagtaacacaggtaaatagcaccctctgatgggaactattgacttagataagattggactactaaaagaaaagatgtcctaaggatattcaaagaagactctagtaggataagcttggattctgctcaaactcataagatctggaattatgctattttacaccgggaatttccaaaggatcggggaaaaagtgaaaggtttgactcccttactcacctcaacaagnnnnnnnnnnnnnnnnnnnnnnnnnnnnnnnnnnnnnnnnnnnnnnnnnnnnnnnnnnnnnnnnnnnnnnnnnnnnnnnnnnnnnnnnnnnnnnnnnnnngctagagatgcatgcctgcggttcggctctagaggatcccccatgtcctcagccgagggttggttcaaagccatcggtacctgtggctcccacataataactgttggcctattctatgaatttgggctgatcactcatgttaagttatcatctgattggtatatgggtcaggggaagtttctctcagtgttttacacgaatgtggtacccatgctgaaccccctcatttatagcctcaggaacaaggatgtcaaacttgctctaaaggaaaccctaaataaaattacaaactgagtagagccaatggtgctgccttagcccctctccaattgctgagtcttcctctcctcttcctgctcctcctcatccgcttcctcctaatcttttctgccttctctccatctttctttctaaagtcgtgttggcaaggtttctgcctttcttctctcactatgcaatgtaactgtgtgggtctatccttggacagaagagtt

SEQ ID NO: 1384 - protein, 156 aa, Homo sapiens
  MOD_RES (26)..(59): Variable amino acid
MLFYTGNFQRIGEKVKGLTPLLTSTXXXXXXXXXXXXXXXXXXXXXXXXXXXXXXXXXXARDACLRFGSRGSPMSSAEGWFKAIGTCGSHIITVGLFYEFGLITHVKLSSDWYMGQGKFLSVFYTNVVPMLNPLIYSLRNKDVKLALKETLNKITN

SEQ ID NO: 1385 - DNA, 943 bp, Homo sapiens
  source (1)..(943)
  CDS (201)..(743)
  modified_base (212): a, t, c, g, unknown or other
  modified_base (709): a, t, c, g, unknown or other
tttaaaggaaacatcccctgctgcttccccgtctgccctaatccctcctagggctgcctgtccctgcgggcccaccccctggtgtgaatccaaaaaaacgtgctttgccctgggcctgactaggacaggcagatgcagctggatgggctgcaggccctctgctggggggtccctgttcaggacacagcttgtaccagtatatgtggcggtcntgccctctccccagccctgcatacctcccacctgcacagcattcacggaattctcaggcccactcacaaaacacagacctcgcccacagcttccagcctttccaggtggctgctccagctggccccaggtccccaccccaacccttccatctcccatctgtgtcccaggtccatgccacacaccttctgtgccccgtccgtgtcctgggccccccttaccctccctctcttgagttactgacctccatccacagcccagctgtccttcctgccccacagataccccagatcagctatgcctccacagccccggagctcagcgactccacacgctatgacttcttctcccgggtggtgccacccgactcctaccaggcgcaggccatggtggacatcgtgagggcactgggatggaactatgtgtccacgctggcctccgagggcaactatggcgaaagtggggttgaggccttcgttcagatctccccagccatccntagagccagattagaagcgatcggcaactggtaagcnnnnnnnnnnnnnnnnnnnnnnnnnnnnnnnnnnnnnnnnnnnnnnnnnnnnnnnnnnnnnnnnnnnnnnnnnnnnnnnnnnnnnnnnnnnnnnnnnnnncccccttatagtcccactgggtgccctttgctctttcccctggatgcctcaggcccagtcagagggctatggagggagttatgtccccaaattcttac

SEQ ID NO: 1386 - protein, 180 aa, Homo sapiens
  MOD_RES (4): Variable amino acid
  MOD_RES (170): Variable amino acid
MWRXCPLPSPAYLPPAQHSRNSQAHSQNTDLAHSFQPFQVAAPAGPRSPPQPFHLPSVSQVHATHLLCPVRVLGPPYPPSLELLTSIHSPAVLPAPQIPQISYASTAPELSDSTRYDFFSRVVPPDSYQAQAMVDIVRALGWNYVSTLASEGNYGESGVEAFVQISPAIXRARLEAIGNW

SEQ ID NO: 1387 - DNA, 976 bp, Homo sapiens
  source (1)..(976)
  CDS (201)..(776)
  modified_base (772): a, t, c, g, unknown or other
  modified_base (785): a, t, c, g, unknown or other
  modified_base (792)..(793): a, t, c, g, unknown or other
  modified_base (814)..(913): a, t, c, g, unknown or other
nnnnnnnnnnnnnnnnnnnnnnnnnnnnnnnnnnnnnnnnnnnnnnnnnnnnnnnnnntaaggtcccatgcccacacccctttttgtgccccgtcccgtgtccttgggcccccccttaccctcccctctcttgaggttantgacctcccatccacagccccagctgtccttcctgcccccacagataccccagatcagctatgcctccacagccccggagctcagcgactcccacacgctatgatttcttctcccgggtggtgccacccgactcctaccaggcgcaggccatggtggaattcgtgagggcactgggatggaactatgtgtccacgctggcctccgagggcaactatggcgaaagtggggttgaggccttcgttcagatctcccgagaggctggtgagctgggggctccgaggcaccaaggagtctacatagtgtgggcccggggccctcagttggggcagaagcagaaagatggggggcccaggtccatgctgggccgaggttgcctggctggtgctccatgtgggcgggacctctttgttttggacgactcagccctgcctcaggcttggcggagggtgcaggccagacttcacccctgcagacccttcagccagcctacacagtcctctgcagcggtggccaggtgggtgtgtgggtgggtgggacggaagctgactctggcacccccaacgcccagggggggtctgtattgcccagtctatcaagatacccagggaaccaaagccaggaggggcggtcnctagagtccgagntatgtgnngctagcacgccggttcaattnnnnnnnnnnnnnnnnnnnnnnnnnnnnnnnnnnnnnnnnnnnnnnnnnnnnnnnnnnnnnnnnnnnnnnnnnnnnnnnnnnnnnnnnnnnnnnnnnnnntcccgcccttgcccatggaccaccttctcaacctcccctttcttatccactttgttattctag

SEQ ID NO: 1388 - protein, 191 aa, Homo sapiens
  MOD_RES (191): Variable amino acid
MPPQPRSSATPTRYDFFSRVVPPDSYQAQAMVEFVRALGWNYVSTLASEGNYGESGVEAFVQISREAGELGAPRHQGVYIVWARGPQLGQKQKDGGPRSMLGRGCLAGAPCGRDLFVLDDSALPQAWRRVQARLHPCRPFSQPTQSSAAVARWVCGWVGRKLTLAPPTPRGGLYCPVYQDTQGTKARRGGX

SEQ ID NO: 1389 - DNA, 940 bp, Homo sapiens
  source (1)..(940)
  CDS (201)..(740)
  modified_base (633)..(741): a, t, c, g, unknown or other
  modified_base (745): a, t, c, g, unknown or other
  modified_base (759): a, t, c, g, unknown or other
  modified_base (761): a, t, c, g, unknown or other
gctttaaatggaacatcccctgctgctcccctgtctgccctaatccctcctagggctgcctgtccctgcggaccaccccttggtgtgaatcaagaaaacgtgctttgccctgggcctgactaggacaggcagatgcagctggatgggctgcaggccctctgctggggggtccttgttcaggacacagcttgtaccagtatatgtggcggtcctgccctctccccagccctgcataccatccacctgcacagcattcacggaattctcaggcccactcacaaaacacagaccttgcccacagcttccagcctttccaggtggctgctccagctggccccaggtccccaccccaacccttccatctcccatctgtgtcccaggtccatgccacacaccttctgtgccccgtccgggtcctgggccccccttaccctccctctcttgagttactgacctccatccacagcccagctgtccttcctgccccacagataccccagatcagctatgcctccacagccccggaactcagcgactccacacgctatgactttttcttccgggtggtgccacccgactcctaccaggcgcaggccattggtggacatcgtgagggcactgggaatggactannnnnnnnnnnnnnnnnnnnnnnnnnnnnnnnnnnnnnnnnnnnnnnnnnnnnnnnnnnnnnnnnnnnnnnnnnnnnnnnnnnnnnnnnnnnnnnnnnnngttcatagttgcntaggctgcacttcngntctaaggatgacttgtcaaacatttagcaagagtgttaattcagtcaatgcagctccctgcaaacgttgcttttcttccagacaccccatctcccctttgctgggccctggggagatcacatgatgccctctggggaagcagggaaaggtggtccaaattagccctggtatatcactcc

SEQ ID NO: 1390 - protein, 179 aa, Homo sapiens
  MOD_RES (145)..(178): Variable amino acid
MWRSCPLPSPAYHPPAQHSRNSQAHSQNTDLAHSFQPFQVAAPAGPRSPPQPFHLPSVSQVHATHLLCPVRVLGPPYPPSLELLTSIHSPAVLPAPQIPQISYASTAPELSDSTRYDFFFRVVPPDSYQAQAIGGHREGTGNGLXXXXXXXXXXXXXXXXXXXXXXXXXXXXXXXXXXS

SEQ ID NO: 1391 - DNA, 904 bp, Homo sapiens
  source (1)..(904)
  CDS (201)..(704)
  modified_base (47): a, t, c, g, unknown or other
  modified_base (146): a, t, c, g, unknown or other
  modified_base (187): a, t, c, g, unknown or other
  modified_base (190): a, t, c, g, unknown or other
  modified_base (799): a, t, c, g, unknown or other
  modified_base (809): a, t, c, g, unknown or other
  modified_base (867)..(904): a, t, c, g, unknown or other
aaaggccatcgcagcaagagtaaaaatttccacatggacacgagcannnnnnnnnnnnnnnnnnnnnnnnnnnnnnnnnnnnnnnnnnnnnnnnnnnnnnnnnnnnnnnnnnnnnnnnnnnnnnnnnnnnnnnnnnnnnnnnnnnnggactagtgtggtgacaaaacactgctgcgttcgggctgtnagnagaaacccccatgttggcagtcatggcatatgaccgctatatggccatctgtaatccattgctctacagtagcaaaatgtcccaaggtgtttgtgtccacctggtcattgtcccttatgtctatggctttcttctcagtgtgatggaaaccttaaggacctacaacctctccttctgtggaacaaatgaaatcaaccatttctactgtgctgatcctcctcttatcaaactggcatgctctgacacgtacagcaaggagctgtccatgtacatagtagccggctacagcaacgtccagtctcttctgatcattctcacatcctacatgttcatccttgtcgctatcctcagaagccattctgcagagggaaggaaaaaagctttttccacatgtggttcccacctgacagttgtcacaatcttctatggaaccctcttctgcatgcatttgagacgtcccacagacgaatccgtggagcaggggaaaatggtggctgtgtttacaccacagtgatactcatgctgaactccatgatctatggcctcaggaacaaggatgtgaaagaagcgttgaaaaaaagcataggaaaacaaacattgggaaaatanaaatgctatnctatcattaacaatttgtgaagtaatgagatataatatcattcggttcagatgtcaannnnnnnnnnnnnnnnnnnnnnnnnnnnnnnnnnnnnn

SEQ ID NO: 1392 - protein, 167 aa, Homo sapiens
MLAVMAYDRYMAICNPLLYSSKMSQGVCVHLVIVPYVYGFLLSVMETLRTYNLSFCGTNEINHFYCADPPLIKLACSDTYSKELSMYIVAGYSNVQSLLIILTSYMFILVAILRSHSAEGRKKAFSTCGSHLTVVTIFYGTLFCMHLRRPTDESVEQGKMVAVFTPQ

SEQ ID NO: 1393 - DNA, 868 bp, Homo sapiens
  source (1)..(868)
  CDS (201)..(668)
  modified_base (292): a, t, c, g, unknown or other
  modified_base (314): a, t, c, g, unknown or other
  modified_base (356)..(455): a, t, c, g, unknown or other
tcaccctgttagccaggatggtttcgatctcctgacctaatgatccacccgccttggcctcccaaagggctgggactacaggggtgagccaccgcgcccggccagaaatcacatttaatcaagtctttattttaccatctggttaatttttcttttaaaaacctttgacacataaacatttgtgatgggggtaaaaggggatgctggtgtctgttttttttaaaacacctgggggcaagagttcctccctattttgtgaggggacactagcggagggtggaccaaaggaggncccttcgccccctttgggaggngggtgttgcgcagagcaatgggacaaccaaaagcacaaaccnnnnnnnnnnnnnnnnnnnnnnnnnnnnnnnnnnnnnnnnnnnnnnnnnnnnnnnnnnnnnnnnnnnnnnnnnnnnnnnnnnnnnnnnnnnnnnnnnnnngcaacttgttgcaaagccgcatacttggctctaaagaaaccctcttatttttttttttttcctgagacggagtttcgctcttgttgcccaggttggaatgcagtggcacaatctcggctcactgcaacctccacctcccaggttcaagcgattctcttgcctcagcctcccaagtatctgggattacaggcatgcaccaccatgcccagctaattttgtatttttagtaaagatggggtttctctgggttggtcaggctggttttgaactcctgacctcacacgatccacctgcctcggcctcccaaagtaaaagttttattttttatatctttatgtatgggataacccaacacattttgttaaaaaggacattttgaaaatcatttctgaagctgataaaagacatttggg

SEQ ID NO: 1394 - protein, 155 aa, Homo sapiens
  MOD_RES (31): Variable amino acid
  MOD_RES (38): Variable amino acid
  MOD_RES (52)..(85): Variable amino acid
MLVSVFFKTPGGKSSSLFCEGTLAEGGPKEXPSPPLGXGCCAEQWDNQKHKXXXXXXXXXXXXXXXXXXXXXXXXXXXXXXXXXXATCCKAAYLALKKPSYFFFFPETEFRSCCPGWNAVAQSRLTATSTSQVQAILLPQPPKYLGLQACTTMPS

SEQ ID NO: 1395 - DNA, 1024 bp, Homo sapiens
  source (1)..(1024)
  CDS (201)..(824)
  modified_base (336): a, t, c, g, unknown or other
  modified_base (361): a, t, c, g, unknown or other
  modified_base (371)..(470): a, t, c, g, unknown or other
  modified_base (481)..(482): a, t, c, g, unknown or other
  modified_base (495): a, t, c, g, unknown or other
  modified_base (498): a, t, c, g, unknown or other
  modified_base (512): a, t, c, g, unknown or other
ttttatagcatagttatgtcagaattcttaggcatcattttcttgtaactgatcataataatttttttctaaattgttttcatcaaggttgctgtatatttttgacatttatatttggcatttatgtttttggcatattgcctctatcaaaataaggagattctactttttaaaaaaatatgtagagatgagatttcactatgttgcccggtctggagtgcagtggctattcacagatgcaatcagagtgcactacagctttgaactcctggcctcaagtgtcttcctgcctcagcctcccaaggagctgggattacaggctgcgaggggatcctntagagaaagagcggaggtttcagcnaaaatttgcnnnnnnnnnnnnnnnnnnnnnnnnnnnnnnnnnnnnnnnnnnnnnnnnnnnnnnnnnnnnnnnnnnnnnnnnnnnnnnnnnnnnnnnnnnnnnnnnnnnntggctctctcnntggtgccgctctnccntcatcctcatctcntatggcgtgattgcagccgcggtgctgaggatgaagtcagcagcagggcgaaagaaagccttccacacctgctcttctcacctcacagtggtctctctcttctacggaaccatcatctacgtgtacctgaagccggccaacagctactcccaagatcaggggaagttcctgactctcttctacaccatcgtcattcccagcatcaacccccctcatctacactttgaggaacaaggatgtgaaggggaccatgaagaaacttctggggtgggagaaaggggctggggagcctcaacgaggggaacactctagtaatgtagacagtttgctggagttactctcttagatgtgtctgtggccatgtggagaactaatattcaaggagtagagtgaacgcgggtgggaaaatgctttcgagtttgaccccgtcctctgccctctggatgtgaagtggtttccttctgtttgaagttgcctgcttcaggatatctctgctgtatcttgcactttcc

SEQ ID NO: 1396 - protein, 207 aa, Homo sapiens
  MOD_RES (46): Variable amino acid
  MOD_RES (54): Variable amino acid
  MOD_RES (57)..(90): Variable amino acid
  MOD_RES (94): Variable amino acid
  MOD_RES (99)..(100): Variable amino acid
  MOD_RES (104): Variable amino acid
MLPGLECSGYSQMQSECTTALNSWPQVSSCLSLPRSWDYRLRGDPXEKERRFQXKFXXXXXXXXXXXXXXXXXXXXXXXXXXXXXXXXXXWLSXWCRSXXILIXYGVIAAAVLRMKSAAGRKKAFHTCSSHLTVVSLFYGTIIYVYLKPANSYSQDQGKFLTLFYTIVIPSINPPHLHFEEQGCEGDHEETSGVGERGWGASTRGTL

SEQ ID NO: 1397 - DNA, 898 bp, Homo sapiens
  source (1)..(898)
  CDS (201)..(698)
  modified_base (717)..(816): a, t, c, g, unknown or other
  modified_base (844): a, t, c, g, unknown or other
ctaaagatccccgactgcaccgtcctcctttgctgccctgtccctgtcctgtatggggtcacggtgcaaaagaacctgctcagcatcctggctgtccgctctgactcccccctccacacccccatgtacttcttcctctccaacctgtgctgggctgacatcggtttcacctcggccacggttcccaagatgattgtggaatgcaggcgcatagcagagtcatctctcatgcgggctgcctgacgcagatgtctttcttggtcctttttgcatgtatagaagacatgttcctgactgtgatggcctatgactgctttatagccatctgtcatcctctgcactacccagtcatcgtgaatcctcacctctgtgtcttcttcattttggtgtcctttttccttagcctgttggattcccagctgcatagctggattgtgttacaattcaccatcatcaagaatgtggaagtctctaattttgtctgtgacccctctcaacttctcaaacttgcctgttctgacagcgtcatcaatagcatattcatatatttcgataatactatgtttggttttcttcccatttcagggatcctttggtcttactataaaatcgtcccctacattctcaggatttcatcgtcagatgggaagtataaagccttcgccacctgtggctctcacctggcagttgcttgctgattttatggaacaggcattnnnnnnnnnnnnnnnnnnnnnnnnnnnnnnnnnnnnnnnnnnnnnnnnnnnnnnnnnnnnnnnnnnnnnnnnnnnnnnnnnnnnnnnnnnnnnnnnnnnnggtttagacttgcagaccctgcagttgncgactctaaagaatccccgacctgctttctttctgatcccgggctgcgttcccc

SEQ ID NO: 1398 - protein, 165 aa, Homo sapiens
MQAHSRVISHAGCLTQMSFLVLFACIEDMFLTVMAYDCFIAICHPLHYPVIVNPHLCVFFILVSFFLSLLDSQLHSWIVLQFTIIKNVEVSNFVCDPSQLLKLACSDSVINSIFIYFDNTMFGFLPISGILWSYYKIVPYILRISSSDGKYKAFATCGSHLAVAC

SEQ ID NO: 1399 - DNA, 856 bp, Homo sapiens
  source (1)..(856)
  CDS (201)..(656)
  modified_base (23)..(123): a, t, c, g, unknown or other
  modified_base (129): a, t, c, g, unknown or other
  modified_base (156): a, t, c, g, unknown or other
cgagatcacgccactgcactccnnnnnnnnnnnnnnnnnnnnnnnnnnnnnnnnnnnnnnnnnnnnnnnnnnnnnnnnnnnnnnnnnnnnnnnnnnnnnnnnnnnnnnnnnnnnnnnnnnnnnggttangtttgcaaaactgcggttcggctctangaaatccccaaatattgctgagtggattgctctgaatctgaaacatgacttgtgaatggcttctatccaaaatgcagacacaatgctgggtgttggtttacttgtttccgatttttcaaccctcttttctaggcaaaaggtgtccaaactctacagacccacagaatgtaacggatgtctctcgattcctcctcctcaaactctcagaggatccagaactgcagccggtccttgctgggctgttcctgtccatgtgcctggtcacggtgctggggaacctgctcatcatcctggccgtcagccctgactcccacctccacacttccatgtacttcttcctctccaacctgtccttgcctgacatcggtttcccctcccccacggtccccaagatggttgtggacatccaatctcacagcagtcatctcctatgcaggctgcctgactcagatgtctctctttgccatttttggaggcatggaagagacacatgctcctgaatgtgatggcctatgtccggtttgtagccatctgtcaccctctatatcattcagccatcatgaacccgtgtttctgtggcttcttacttttgttgtcttttttttttctcggtcttttagacgcccagctgcacaacatgattgccttacaaatgacctgcttcaaggatgtggaaattcctaatttctgctgtgatcct

SEQ ID NO: 1400 - protein, 151 aa, Homo sapiens
MTCEWLLSKMQTQCWVLVYLFPIFQPSFLGKRCPNSTDPQNVTDVSRFLLLKLSEDPELQPVLAGLFLSMCLVTVLGNLLIILAVSPDSHLHTSMYFFLSNLSLPDIGFPSPTVPKMVVDIQSHSSHLLCRLPDSDVSLCHFWRHGRDTCS

SEQ ID NO: 1401 - DNA, 910 bp, Homo sapiens
  source (1)..(910)
  CDS (201)..(710)
  modified_base (257): a, t, c, g, unknown or other
  modified_base (260): a, t, c, g, unknown or other
  modified_base (282): a, t, c, g, unknown or other
  modified_base (286)..(287): a, t, c, g, unknown or other
  modified_base (300)..(400): a, t, c, g, unknown or other
caaaatgggaggccttggaagaatctcacaggccctgcatctacctgggcaggtgcctgggtgcagatcggcctggctcaatgcacagacaaggtgtcctgggttcaaatccacaagctacttcttatccacacatgggagccactgcattgttctgtgtcttggtttcaccacctgtaaaatggtgataacagccgggcatggtggctcatgcctgtaatcccagcacttgggaggctgaggcaggcagagggatnctntcagagtggaggctggcagtgncagnncacgtcaagtgcnnnnnnnnnnnnnnnnnnnnnnnnnnnnnnnnnnnnnnnnnnnnnnnnnnnnnnnnnnnnnnnnnnnnnnnnnnnnnnnnnnnnnnnnnnnnnnnnnnnnnttcggacctggcagggactggtctggcgccgcatgcccctccccgcgtgacgtcgctccgcccctccgtccccgccccgcaggtggggctgcgctgccgcctggtggccgggctgctgcactactgtttcctggccgccttctgctggatgagcctcgaaggcctggagctctactttcttgtggtgcgcgtgttccaaggccagggcctgagtacgcgctggctctgcctgatcggctatggcgtgcccctgctcatcgtgggcgtctcggctgccatctacagcaagggctacggccgccccagatagtgagtgcagcgagatggggcaggaggaaggcggggtgctgggcctggggctcacaggcagtgccacacacaatgtccggccgccctccgttccgctcctggcttcctggggcactgatgggacccctcccttccctcctagctgctggttggactttgagcagggcttcctctggagcttcttgggacctgtgaccttca

SEQ ID NO: 1402 - protein, 169 aa, Homo sapiens
  MOD_RES (19)..(20): Variable amino acid
  MOD_RES (28)..(29): Variable amino acid
  MOD_RES (34)..(67): Variable amino acid
MVAHACNPSTWEAEAGRGXXSEWRLAVXXHVKCXXXXXXXXXXXXXXXXXXXXXXXXXXXXXXXXXXSDLAGTGLAPHAPPRVTSLRPSVPAPQVGLRCRLVAGLLHYCFLAAFCWMSLEGLELYFLVVRVFQGQGLSTRWLCLIGYGVPLLIVGVSAAIYSKGYGRPR

SEQ ID NO: 1403 - DNA, 1117 bp, Homo sapiens
  source (1)..(1117)
  CDS (201)..(917)
  modified_base (170): a, t, c, g, unknown or other
  modified_base (173): a, t, c, g, unknown or other
  modified_base (207)..(306): a, t, c, g, unknown or other
  modified_base (343)..(344): a, t, c, g, unknown or other
  modified_base (351)..(356): a, t, c, g, unknown or other
  modified_base (360)..(361): a, t, c, g, unknown or other
  modified_base (378): a, t, c, g, unknown or other
  modified_base (380)..(383): a, t, c, g, unknown or other
  modified_base (398)..(399): a, t, c, g, unknown or other
  modified_base (401)..(402): a, t, c, g, unknown or other
  modified_base (405): a, t, c, g, unknown or other
  modified_base (431)..(432): a, t, c, g, unknown or other
  modified_base (434): a, t, c, g, unknown or other
  modified_base (437)..(438): a, t, c, g, unknown or other
  modified_base (440)..(444): a, t, c, g, unknown or other
  modified_base (464)..(465): a, t, c, g, unknown or other
  modified_base (468): a, t, c, g, unknown or other
  modified_base (484): a, t, c, g, unknown or other
  modified_base (487)..(497): a, t, c, g, unknown or other
  modified_base (509)..(510): a, t, c, g, unknown or other
  modified_base (525)..(527): a, t, c, g, unknown or other
  modified_base (532)..(533): a, t, c, g, unknown or other
  modified_base (539)..(542): a, t, c, g, unknown or other
  modified_base (548): a, t, c, g, unknown or other
  modified_base (552): a, t, c, g, unknown or other
  modified_base (557)..(561): a, t, c, g, unknown or other
  modified_base (565): a, t, c, g, unknown or other
  modified_base (573): a, t, c, g, unknown or other
  modified_base (577): a, t, c, g, unknown or other
  modified_base (588): a, t, c, g, unknown or other
  modified_base (605)..(610): a, t, c, g, unknown or other
  modified_base (615): a, t, c, g, unknown or other
  modified_base (617): a, t, c, g, unknown or other
  modified_base (619)..(622): a, t, c, g, unknown or other
  modified_base (629): a, t, c, g, unknown or other
  modified_base (646): a, t, c, g, unknown or other
  modified_base (648): a, t, c, g, unknown or other
  modified_base (650): a, t, c, g, unknown or other
  modified_base (652)..(653): a, t, c, g, unknown or other
  modified_base (669): a, t, c, g, unknown or other
  modified_base (673)..(675): a, t, c, g, unknown or other
  modified_base (688)..(689): a, t, c, g, unknown or other
  modified_base (694)..(696): a, t, c, g, unknown or other
  modified_base (698): a, t, c, g, unknown or other
  modified_base (712): a, t, c, g, unknown or other
  modified_base (715): a, t, c, g, unknown or other
  modified_base (717): a, t, c, g, unknown or other
  modified_base (719): a, t, c, g, unknown or other
  modified_base (722): a, t, c, g, unknown or other
  modified_base (725): a, t, c, g, unknown or other
  modified_base (735): a, t, c, g, unknown or other
  modified_base (739): a, t, c, g, unknown or other
  modified_base (744): a, t, c, g, unknown or other
  modified_base (750)..(756): a, t, c, g, unknown or other
  modified_base (774)..(776): a, t, c, g, unknown or other
  modified_base (779)..(781): a, t, c, g, unknown or other
  modified_base (784)..(785): a, t, c, g, unknown or other
  modified_base (797)..(799): a, t, c, g, unknown or other
  modified_base (806)..(812): a, t, c, g, unknown or other
  modified_base (814)..(817): a, t, c, g, unknown or other
  modified_base (820)..(822): a, t, c, g, unknown or other
  modified_base (825)..(833): a, t, c, g, unknown or other
  modified_base (835)..(838): a, t, c, g, unknown or other
  modified_base (840)..(843): a, t, c, g, unknown or other
  modified_base (845): a, t, c, g, unknown or other
  modified_base (849): a, t, c, g, unknown or other
  modified_base (851)..(857): a, t, c, g, unknown or other
  modified_base (1034): a, t, c, g, unknown or other
  modified_base (1037): a, t, c, g, unknown or other
  modified_base (1052): a, t, c, g, unknown or other
  modified_base (1061): a, t, c, g, unknown or other
  modified_base (1075)..(1117): a, t, c, g, unknown or other
tgatgattttattcaattcaatccaacaaacattgattgagaccttactctgggcaaagaataatgataattaagtcacacatggcattagggaaactgctgatatttgtgttgatgattgatactaaagaattaacaaaattagaagagaaaacctaaaggaggggatnctntacgaaagaagcggcgggtcagcacaaatgtgcnnnnnnnnnnnnnnnnnnnnnnnnnnnnnnnnnnnnnnnnnnnnnnnnnnnnnnnnnnnnnnnnnnnnnnnnnnnnnnnnnnnnnnnnnnnnnnnnnnnntgggggggggggggggggggggggggggggggggggnnggggggnnnnnngggnnggggggggggggggggngnnnnggggggggggggggnngnnggngggggggggggggggggggggggggnngnggnngnnnnngggggggggggggggggggnnggngggggggggggggggnggnnnnnnnnnnngggggggggggnnggggggggggggggnnnggggnngggggnnnngggggngggnggggnnnnngggngggggggngggnggggggggggnggggggggggggggggnnnnnnggggngngnnnnggggggnggggggggggggggggngngngnngggggggggggggggngggnnnggggggggggggnnggggnnngngggggggggggggnggngngnggnggngggggggggngggnggggngggggnnnnnnngggggggaggggggcggnnnggnnnggnngggggggggggnnngggaggnnnnnnntnnnngcnnnggnnnnnnnnngngnnanggngngtgngnnnnnnngtacacacacacacacacacacataactttttatccaataattcattgatgaacacttaggttgatttcatgactttgctaatgtgaatagtgctgcaataaacatatgagtgcagatgtctttgttacataatttttttcctttcagtaggtaccaagtagtgggatgtggggatnctnctagccgacgagcgncgattcatngcacgaagttggcnnnnnnnnnnnnnnnnnnnnnnnnnnnnnnnnnnnnnnnnnnn

SEQ ID NO: 1404 - protein, 238 aa, Homo sapiens
  MOD_RES (3)..(36): Variable amino acid
  MOD_RES (48): Variable amino acid
  MOD_RES (51)..(52): Variable amino acid
  MOD_RES (54): Variable amino acid
  MOD_RES (60)..(61): Variable amino acid
  MOD_RES (66)..(69): Variable amino acid
  MOD_RES (77)..(82): Variable amino acid
  MOD_RES (88)..(90): Variable amino acid
  MOD_RES (95)..(99): Variable amino acid
  MOD_RES (103)..(104): Variable amino acid
  MOD_RES (109): Variable amino acid
  MOD_RES (111): Variable amino acid
  MOD_RES (113)..(114): Variable amino acid
  MOD_RES (116): Variable amino acid
  MOD_RES (118)..(122): Variable amino acid
  MOD_RES (125)..(126): Variable amino acid
  MOD_RES (130): Variable amino acid
  MOD_RES (135)..(137): Variable amino acid
  MOD_RES (139)..(141): Variable amino acid
  MOD_RES (143): Variable amino acid
  MOD_RES (149)..(151): Variable amino acid
  MOD_RES (157)..(159): Variable amino acid
  MOD_RES (163): Variable amino acid
  MOD_RES (165)..(166): Variable amino acid
  MOD_RES (171)..(175): Variable amino acid
  MOD_RES (179)..(180): Variable amino acid
  MOD_RES (182): Variable amino acid
  MOD_RES (184)..(186): Variable amino acid
  MOD_RES (192)..(195): Variable amino acid
  MOD_RES (199)..(200): Variable amino acid
  MOD_RES (202)..(215): Variable amino acid
  MOD_RES (217)..(219): Variable amino acid
MCXXXXXXXXXXXXXXXXXXXXXXXXXXXXXXXXXXGGGGGGGGGGGXGGXXGXGGGGGXXGGGGXXXXGGGGGGGXXXXXXGGGGGXXXGGGGXXXXXGGGXXGGGGXGXGXXGXGXXXXXGGXXGGGXGGGGXXXGXXXGXGGGGGXXXGGGGGXXXGGGXGXXGGGGXXXXXGGGXXGXGXXXGGGGRXXXXGGGXXGXXXXXXXXXXXXXXVXXXVHTHTHTHNFLSNNSLMNT

SEQ ID NO: 1405 - DNA, 1267 bp, Homo sapiens
  source (1)..(1267)
  CDS (201)..(1067)
  modified_base (39)..(40): a, t, c, g, unknown or other
  modified_base (56): a, t, c, g, unknown or other
  modified_base (92)..(191): a, t, c, g, unknown or other
  modified_base (946)..(1046): a, t, c, g, unknown or other
  modified_base (1112): a, t, c, g, unknown or other
  modified_base (1212): a, t, c, g, unknown or other
aagtagattaggggtttgaatgggttgggaaaaggaggnngggggattcttctagnagccgcacagggcagggcatttcaagaataggttcnnnnnnnnnnnnnnnnnnnnnnnnnnnnnnnnnnnnnnnnnnnnnnnnnnnnnnnnnnnnnnnnnnnnnnnnnnnnnnnnnnnnnnnnnnnnnnnnnnnntactgtaatatgattccccctgcgcatgagcgcagtaataacaacagtaatatgattctcccgccgcatgagagcagtaatcacagtaatattatcctcccgccgcatgagagcagtaataacaacagtaatatgattctcccgccgcatgggagcagtaataacaacagtaatatgattctcccgccgcatgagagcagtaataacaacagtaacatgatcccgcggccgcatgagagcagtaataacaacaacagtaatatggtactaccgctgcatgagagcagtaataacaacagtaatatgatactaccgctgcatgagagcagtaataacaacagtaatatgatactaccgccgcatgagagcagtaataacaacagtaatatgatactaccgccgcatgagagcagtaataacaacagtaatatgatactaccactacatgagagcagtaataacagtaatatgatactaccaccgcatgagagcagtaataacaacagtaatatgatactaccgccgcatgggagcagtaataacaacagtaatatgatactaccgctgcatgagagcagtaataacaacagtaatatgatactaccgctgcatgagagcagtaataacaacagtaatatgatactaccgccgcatgacagcagtaataacaacagtaatatgatactaccgccgcatgagagcaggaataacaggggttctttagagtcgccagcagggcttgtcaagactaagtgnnnnnnnnnnnnnnnnnnnnnnnnnnnnnnnnnnnnnnnnnnnnnnnnnnnnnnnnnnnnnnnnnnnnnnnnnnnnnnnnnnnnnnnnnnnnnnnnnnnntcggctgcatgggagcagtaatcacatcagtaatatgatactgcggctgcatgagagcagcaatcncagcagtaatatgctaccgccgcatgagagcaataatagcagtaatatgatactaccgccgcatgagagcagtaataacaagagtaatatgataccaccnccgcatgagagcagtaataacaacagtaatatgataccaccgccacatgagagca

SEQ ID NO: 1406 - protein, 288 aa, Homo sapiens
  MOD_RES (249)..(282): Variable amino acid
MIPPAHERSNNNSNMILPPHESSNHSNIILPPHESSNNNSNMILPPHGSSNNNSNMILPPHESSNNNSNMIPRPHESSNNNNSNMVLPLHESSNNNSNMILPLHESSNNNSNMILPPHESSNNNSNMILPPHESSNNNSNMILPLHESSNNSNMILPPHESSNNNSNMILPPHGSSNNNSNMILPLHESSNNNSNMILPLHESSNNNSNMILPPHDSSNNNSNMILPPHESRNNRGSLESPAGLVKTKXXXXXXXXXXXXXXXXXXXXXXXXXXXXXXXXXXSAAWEQ

SEQ ID NO: 1407 - DNA, 946 bp, Homo sapiens
  source (1)..(946)
  CDS (201)..(746)
  modified_base (123): a, t, c, g, unknown or other
  modified_base (338): a, t, c, g, unknown or other
  modified_base (346): a, t, c, g, unknown or other
  modified_base (453): a, t, c, g, unknown or other
  modified_base (456)..(555): a, t, c, g, unknown or other
  modified_base (584): a, t, c, g, unknown or other
  modified_base (591): a, t, c, g, unknown or other
ggcgggaacagcctaagaacagaaacttggaggtggtcagtgcagacccttctggccccaatgccctcttcacccaggggtggcctggcctggcctgactgccccgactgcccccaaccccangcagcggtggaggagagggatgtcacacagcacaaacgccggcggaggggccacaggagtggggagagcaaccagggatgaagcagagtggggtgcgcaggcctcgcgtctcctcccccagggcaggtggccaagctcagagatttcctgggtataggggggaaggggcggcgaaaacgccccttgctgccacctgctccttgttgccagagcangaacccangttggggcttggggagcaaatgaggctgggacagagcacggggcagtcagatggggtgaggcgaacaaaggcctctctctgcgagagaaatcccgactggctgcggngcnnnnnnnnnnnnnnnnnnnnnnnnnnnnnnnnnnnnnnnnnnnnnnnnnnnnnnnnnnnnnnnnnnnnnnnnnnnnnnnnnnnnnnnnnnnnnnnnnnnngtccttttacttgcagacccgcagttcgnactctanagaaccccttttctcttaagaattttcttttttttttttttttgagacaagtctcactctgtcgcccaggctggagtgcaatggcgcgatctcggctcactgcaacctctgcctcctgggttcaagcaattatcttgcctcagcctcctgagtagctgggattacaggcacccgccaccacgccaggctcattttttgtatttttagtagagacagggtttcaccatgttggccagactggtcttgaactcctgacctcaagtgatctgtctgcctcagcctctcaaagtactaggattgtaggtgtaagtcactgcagctggtcttaggacattttctttttttctttttttat

SEQ ID NO: 1408 - protein, 181 aa, Homo sapiens
  MOD_RES (46): Variable amino acid
  MOD_RES (49): Variable amino acid
  MOD_RES (85)..(119): Variable amino acid
  MOD_RES (128): Variable amino acid
  MOD_RES (131): Variable amino acid
MKQSGVRRPRVSSPRAGGQAQRFPGYRGEGAAKTPLAATCSLLPEXEPXLGLGEQMRLGQSTGQSDGVRRTKASLCERNPDWLRXXXXXXXXXXXXXXXXXXXXXXXXXXXXXXXXXXXPFTCRPAVXTLXNPFSLKNFLFFFFLRQVSLCRPGWSAMARSRLTATSASWVQAIILPQPPE

SEQ ID NO: 1409 - DNA, 925 bp, Homo sapiens
  source (1)..(925)
  CDS (201)..(725)
  modified_base (232)..(332): a, t, c, g, unknown or other
  modified_base (340): a, t, c, g, unknown or other
  modified_base (343): a, t, c, g, unknown or other
tgtgttatcacaacctgttttttaacttgcggcgccggctatgtggctgattttctacattgaagccaccgccgcagtgaccacagtcaggtgtggaatagtaccgcacctccttggtagtttttgtatgataccatgtgtcgttgtgtttcccgtgcaaaaattattagtgggacatggggcatgtctttatactctaaatgctcgcaaaacaattcgaggaaatgaacannnnnnnnnnnnnnnnnnnnnnnnnnnnnnnnnnnnnnnnnnnnnnnnnnnnnnnnnnnnnnnnnnnnnnnnnnnnnnnnnnnnnnnnnnnnnnnnnnnnnataactgnggnttgcaaagcctcgccttggagctctaaaagataccccccgtgtttctgtggctttctagttttgttgtctttttttttttctctcagtcttttagacgtccagctgcgcaacttgattgccttacaaatgacctgcttcaaggatgtggaaattcctaatttcttctgtgacccttctcaactcccccatcttgcatgttgtgacaccttcaccaataacataatcctgtatttccctgctgccatatttggttttcttcccatcttggggacccttttctcttactataaaatcgttttctccattctgagggtttcatcatctggtgggaagtataaggccttctccacctgtgtgtctcacctgtcagtggtttgctgattttatggaacaggcgttggagggtacctcagttcagatgtgtcatcttccccgagaaaggctgcagtggcctcagtgatgtacacggtggtcacccccatgctgaaccccttcatctacagcctgagaaacagggatattaaaagtgtcctgcggcggccgcacagcagcacggtctaatcttgatatcttcttatctg

SEQ ID NO: 1410 - protein, 174 aa, Homo sapiens
  MOD_RES (11)..(44): Variable amino acid
  MOD_RES (47)..(48): Variable amino acid
MLAKQFEEMNXXXXXXXXXXXXXXXXXXXXXXXXXXXXXXXXXXITXXCKASPWSSKRYPPCFCGFLVLLSFFFSLSLLDVQLRNLIALQMTCFKDVEIPNFFCDPSQLPHLACCDTFTNNIILYFPAAIFGFLPILGTLFSYYKIVFSILRVSSSGGKYKAFSTCVSHLSVVC

SEQ ID NO: 1411 - DNA, 862 bp, Homo sapiens
  source (1)..(862)
  CDS (201)..(662)
  modified_base (497)..(596): a, t, c, g, unknown or other
tattttgtgtgtgtattcacaaaatatacacacagcattaagggctggtttttatcttttatttttcaaatcctcttttcttccctaggtgtccaagtcacacagagccatggaatctcacaggtgtctgagaattcctcctcctgggactctcagaggatccagaactgcagcccgtcctcgctgggttgtcccggtccatgtatctggtcatggtgctgaggaacctgctcatcatcctggctgtcagctctgactcccacctccacacccccatgtacttcttcctctccaacctgtgctgggctgacatcggtttcacctcggccatggttcccaagatgattgtggacatgcagtctcatagcagagtcatcttttatgcgggctgcctgacaccgatgtctttcttggtcctttttgcatgtataagagacatgctcctgactgcgatggcctatgactgctttgtagccctctgtcgccctttgacttannnnnnnnnnnnnnnnnnnnnnnnnnnnnnnnnnnnnnnnnnnnnnnnnnnnnnnnnnnnnnnnnnnnnnnnnnnnnnnnnnnnnnnnnnnnnnnnnnnnntcgggagggcctcacgtaactgctctcatcccccactgggggngacaattcacagtgggcattgatggttggctcaccacttcctccacctgctggactcaagtgattctcctacctcagccccttgagtagctaggattacacgcacccaccaccacacccggctaatttttgtattttaatagagacagggtttcaccatgttggccaggctagtatcaaactcctgaccttgtgatccaaatgcctcggccccccaaagtgc

SEQ ID NO: 1412 - protein, 153 aa, Homo sapiens
  MOD_RES (99)..(133): Variable amino acid
  MOD_RES (147): Variable amino acid
MYLVMVLRNLLIILAVSSDSHLHTPMYFFLSNLCWADIGFTSAMVPKMIVDMQSHSRVIFYAGCLTPMSFLVLFACIRDMLLTAMAYDCFVALCRPLTXXXXXXXXXXXXXXXXXXXXXXXXXXXXXXXXXXXGRASRNCSHPPLGXTIHSGH

SEQ ID NO: 1413 - DNA, 997 bp, Homo sapiens
  source (1)..(997)
  CDS (201)..(797)
  modified_base (1)..(26): a, t, c, g, unknown or other
  modified_base (56): a, t, c, g, unknown or other
  modified_base (808)..(907): a, t, c, g, unknown or other
  modified_base (927): a, t, c, g, unknown or other
  modified_base (940): a, t, c, g, unknown or other
nnnnnnnnnnnnnnnnnnnnnnnnnngactgggtgcaacatcgacgtttgggctanaggataaacccacagatggtgtgcaagcattctgatctcaggactttttaagagatgagaagccgaacggtttgaaagacagcagttttgagcatggaacaggccctgttctggggaggtgggaatgtgtgaacagcggattcgatgtgtcaggagcggcagtggactggcctcctgggaaacggcctccacttcatttgcagtgcggccgccgctgtgacgtcaggtcatcggagctgcagaagcagctccttctttaacaattgtaacagaaaacccactgtgaactggtattcactgtattttctaaacgattctctttcaggaaacatctttgtggtgagcttagcggtggcagacctggtggtggccatttatccgtacccgttggtgctgatgtcgatatttaacaacgggtggaacctgggctatctgcactgccaagtcagtgggttcctgatgggcctgagcgtcatcggctccatattcaacatcaccggcatcgccatcaaccgctactgctacatctgccacagtctcaagtacgacaaactgtacagcagcaagaactccctctgctacgtgctcctcatatggctcctgacgctggcggccgtcctgcccacctccgtgcagggactctccatacgaaccgaggatctactcgtgcaccttcgcccagtcgtcagctccgcctacacattggcggggtgggtttcacttcctctccccataacatagcatcttctgtnnnnnnnnnnnnnnnnnnnnnnnnnnnnnnnnnnnnnnnnnnnnnnnnnnnnnnnnnnnnnnnnnnnnnnnnnnnnnnnnnnnnnnnnnnnnnnnnnnnncgactgaggtgcagacacgncttttgggctagnagataccccagtagctctgatggtgccggtctagagatcccactcgagaactgctta

SEQ ID NO: 1414 - protein, 198 aa, Homo sapiens
MCQERQWTGLLGNGLHFICSAAAAVTSGHRSCRSSSFFNNCNRKPTVNWYSLYFLNDSLSGNIFVVSLAVADLVVAIYPYPLVLMSIFNNGWNLGYLHCQVSGFLMGLSVIGSIFNITGIAINRYCYICHSLKYDKLYSSKNSLCYVLLIWLLTLAAVLPTSVQGLSIRTEDLLVHLRPVVSSAYTLAGWVSLPLPIT

SEQ ID NO: 1415 - DNA, 1069 bp, Homo sapiens
  source (1)..(1069)
  CDS (201)..(869)
  modified_base (321): a, t, c, g, unknown or other
  modified_base (420): a, t, c, g, unknown or other
  modified_base (542): a, t, c, g, unknown or other
  modified_base (644): a, t, c, g, unknown or other
  modified_base (753)..(852): a, t, c, g, unknown or other
  modified_base (885)..(886): a, t, c, g, unknown or other
agactcccatctccaaagcccaatgtatttcttcctcaatgtcctctcgtttcttgatatttgttactcttctgtggtcacacctaagctcttggtcaacttcctggtctctgacaagtccatctcttttgagggctgtgtggtccagctcgccttctttgtagtgcatgtgacagctgagaagcttcctgctggcctccatggcctatgaccgcttcctagccatctgtcaacccctccattatggttctatcatgaccagggggacctgtctccagctggtagctgtgtcctatgcctttggtggagccaactccgctntccagactggaaatgtctttgccctgcctttctgtgggcccaaccagctaacacactactactgtgacataccaccccttctccacctggcttgtgccngcgcagccacagcaagagtggtcctctatgtcttttctgctctggtcacccttctgcctgctgcagtcattctcacctcctactgcttggtcttggtggccattgggaggatgcgctcagtngccggagggagaaggacctcttcccttgtgcctcccactttctggccattgccttttctttggccccggggtgtttcctttgttccgcccctggttctcttnccgtcccctgggccaggagggggtgtttgttccccttgtgtttccctggctgatcccttctttcttgccccgcggccggggggggaagaagcactcaaaaacaaaaaannnnnnnnnnnnnnnnnnnnnnnnnnnnnnnnnnnnnnnnnnnnnnnnnnnnnnnnnnnnnnnnnnnnnnnnnnnnnnnnnnnnnnnnnnnnnnnnnnnnaagcgtgcaggtattagaaatgacctcgctggnntgcgactctagaagaatccccataaggtctttaaagaggtaatcaagttaaaattaggtcattatggtgggcactaatccaatattactagtgtccttataaaaaggggaagtttgaacacaaagacagacataaacatgcatacagggacaagatcatgttaagatgaaggcagagatccag

SEQ ID NO: 1416 - protein, 222 aa, Homo sapiens
  MOD_RES (41): Variable amino acid
  MOD_RES (76): Variable amino acid
  MOD_RES (114): Variable amino acid
  MOD_RES (148): Variable amino acid
  MOD_RES (185)..(218): Variable amino acid
MAYDRFLAICQPLHYGSIMTRGTCLQLVAVSYAFGGANSAXQTGNVFALPFCGPNQLTHYYCDIPPLLHLACAXAATARVVLYVFSALVTLLPAAVILTSYCLVLVAIGRMRSXAGGRRTSSLVPPTFWPLPFLWPRGVSFVPPLVLXPSPGPGGGVCSPCVSLADPFFLAPRPGGEEALKNKKXXXXXXXXXXXXXXXXXXXXXXXXXXXXXXXXXXACRY

SEQ ID NO: 1417 - DNA, 880 bp, Homo sapiens
  source (1)..(880)
  CDS (201)..(680)
  modified_base (177): a, t, c, g, unknown or other
  modified_base (369)..(468): a, t, c, g, unknown or other
  modified_base (503): a, t, c, g, unknown or other
gggcaggtcactgggattgtgtaaattctcagaaaggaaatggaccagagaagtcatccaacccaacctcttcatttgactaatgaggaaacccaggtctacaaataaaaaatttgcccaagttcacagaataactgacccggatcccagagccggaagagagtgtaggagtcattntgtccaacttcctccttttacccatgaaaacactaatgtccaaatcatctggaatgagaatgcaggctttccagctctctgggtatggttctttctgctatgtcattttagtcacttcctttctttcattgagaaacacatttaaaatcctatgggccaggttgcaaggtagggaatattttcacatgacannnnnnnnnnnnnnnnnnnnnnnnnnnnnnnnnnnnnnnnnnnnnnnnnnnnnnnnnnnnnnnnnnnnnnnnnnnnnnnnnnnnnnnnnnnnnnnnnnnncaactggagcttgcaagcctgcggttcggctctanaggacccctgtttgtttgtttgtttttagagacagggtctcactctgtcgcccaggctggagtgcagtggcacaatttctgctcactgcaagctccgcctcccgggttcatgccattctcctgcctcaggctcccgagaagctgggactacaggtgtccaccaccatgcccggctaattttctgtatttttagtagagatggggtttcaccgtgttagccaggatggtctcgatctcctgacctcatgatccgctcaccttggcctcgcaaagtgctatgatgacaggagtgagccaccgcgcccggcctacaaacagggatttttacatcatcactcctttcccacatctcccccatcactttggtcctcccctcc

SEQ ID NO: 1418 - protein, 159 aa, Homo sapiens
  MOD_RES (57)..(90): Variable amino acid
  MOD_RES (101): Variable amino acid
MKTLMSKSSGMRMQAFQLSGYGSFCYVILVTSFLSLRNTFKILWARLQGREYFHMTXXXXXXXXXXXXXXXXXXXXXXXXXXXXXXXXXXTGACKPAVRLXRTPVCLFVFRDRVSLCRPGWSAVAQFLLTASSASRVHAILLPQAPEKLGLQVSTTMPG

SEQ ID NO: 1419 - DNA, 871 bp, Homo sapiens
  source (1)..(871)
  CDS (201)..(671)
  modified_base (1)..(61): a, t, c, g, unknown or other
  modified_base (72)..(74): a, t, c, g, unknown or other
  modified_base (87): a, t, c, g, unknown or other
  modified_base (91)..(93): a, t, c, g, unknown or other
  modified_base (96): a, t, c, g, unknown or other
  modified_base (101): a, t, c, g, unknown or other
  modified_base (106): a, t, c, g, unknown or other
  modified_base (115): a, t, c, g, unknown or other
nnnnnnnnnnnnnnnnnnnnnnnnnnnnnnnnnnnnnnnnnnnnnnnnnnnnnnnnnnnnnacactaagttnnngaggcccccctcngggnnnaanaaaanccccncctcattgnaatctttctaacttacatattaacccttgcaggcaatgggcttattattgccactgtgtgggctgagcccaggctacaaattccaatgtacttcttcctttgtaacttgtctttcttagaaatctggtacaccaccacagtcatccccaaactgctaggaacctttgtagtggcaagaacagtaatctgcatgggctgctgcctgctgcaggccttcttccacttcttcgtgggcaccaccgagttcttgatcctcactatcatgtcttttgaccgctacctcaccatctgcaatccccttcaccaccccaccatcatgaccagcaaactctgcctgcagctggccctgagctcctgggtggtgggcttcaccattgtcttttgtcagacgatgctgctcatccagttgccattctgtggcaataatgttatcagtcatttctactgtgatgttgggcccagtttgaaagccgcctgcatagacaacagcattttggaactcctgggcgtcataacaaccctccttgtgatcccagggtcacttttttttatatgatttcttatttctacattctggccgcaatcctacaaaattccttcagccactggccaccaaaaaatttttttacctgtgcctcgcacctgaaaagtgtgttccctgctctaccgggctggatttggtatgggacctaaacacacaacccactcctccctttaaaagaaaaaagaggggggggtgtgcgcaaaaacattccc

SEQ ID NO: 1420 - protein, 156 aa, Homo sapiens
MYFFLCNLSFLEIWYTTTVIPKLLGTFVVARTVICMGCCLLQAFFHFFVGTTEFLILTIMSFDRYLTICNPLHHPTIMTSKLCLQLALSSWVVGFTIVFCQTMLLIQLPFCGNNVISHFYCDVGPSLKAACIDNSILELLGVITTLLVIPGSLFFI

SEQ ID NO: 1421 - DNA, 967 bp, Homo sapiens
  source (1)..(967)
  CDS (201)..(767)
  modified_base (356)..(455): a, t, c, g, unknown or other
cagggcttgtgggctggctcccacagtttttttttgggcaatgtcagctggttttaaggaagcccaacaccttacttaggctttatgagtcttactccttttttaacgggaaattagcaaaatttaagggcccttctggctgaaggctttttaaaaacagaggtggtaaggaacggctgcccaacaactggaaaaccacaatgttaaaaacctcaagccttagaccttgtttcggcgtggatattgtaaaaaaggaactcggccccacaaaaatgatagccccctggccgaagcccttttgggggaccgacctgaacaagtcccttacaagtggcatctggcccgtccggggtgannnnnnnnnnnnnnnnnnnnnnnnnnnnnnnnnnnnnnnnnnnnnnnnnnnnnnnnnnnnnnnnnnnnnnnnnnnnnnnnnnnnnnnnnnnnnnnnnnnnaaaatgagcttgcaagcctgcagtgggactctagaaagatacgccacaggcaccattttgattgttatggttcctttcttgttgatcctcttgtcttacattcgagttctgtttgccatcctgaagatgccatcaactactgggagacaaaaggccttttccacctgtgcctctcacctcacatctgtgaccctgttctatggcacagccaatatgacttatttacaacccaaatctggctactcacccgaaaccaagaaactgatctcattggcttacacgttgcttacggtaccgagctcgaattcgtaatcatggtcatagctgtttcctgtgtgaaattgttatccgttcacaattccacacaacatacgagccggaagcataaagtgtaaagcctggggtgcctaatgagtgagctaactcacattaattgcgttgcgctcactgcccgctttccagtcgggaaacctgtcgtgccagctgcattaatgaatcggccaacgcgcggg

SEQ ID NO: 1422 - protein, 188 aa, Homo sapiens
  MOD_RES (52)..(85): Variable amino acid
MLKTSSLRPCFGVDIVKKELGPTKMIAPWPKPFWGTDLNKSLTSGIWPVRGXXXXXXXXXXXXXXXXXXXXXXXXXXXXXXXXXXKMSLQACSGTLERYATGTILIVMVPFLLILLSYIRVLFAILKMPSTTGRQKAFSTCASHLTSVTLFYGTANMTYLQPKSGYSPETKKLISLAYTLLTVPSSNS

SEQ ID NO: 1423 - DNA, 967 bp, Homo sapiens
  source (1)..(967)
  CDS (201)..(767)
  modified_base (190): a, t, c, g, unknown or other
  modified_base (209): a, t, c, g, unknown or other
  modified_base (220)..(319): a, t, c, g, unknown or other
  modified_base (336): a, t, c, g, unknown or other
  modified_base (414): a, t, c, g, unknown or other
  modified_base (437): a, t, c, g, unknown or other
tgcctttgataacttggcccagaagggatttcttacattcctattggcggaaatgcagtcacatggttccaaactaacgcaagtgaggtgggaaatgtagtcttctgcagcccaggaaaggaatggtgtgaacaagcatgtcttgacacataagtatgtgataaagagtcttatcttaagggggtttccnccccaggaggatgattgtnacccaagtccnnnnnnnnnnnnnnnnnnnnnnnnnnnnnnnnnnnnnnnnnnnnnnnnnnnnnnnnnnnnnnnnnnnnnnnnnnnnnnnnnnnnnnnnnnnnnnnnnnnntcttttcttggtctttnttgcatgtatagaaggcatgctcctgactgtaatggcctatgactgctttgtaggcatctgtcgccttctgcactacncagtcatcgtgaatcctcatctntgtgtcttctttgtttgggtgtcctttttccttagcctgttggattcccagctgcacagttggattgtgttacaattcaccatcatcaagaatgtggaaatctctaattttgtctgtgacccctctcaacttctcaaacttgcctcttatgacagcgtcatcaatagcatattcatatatttcgatagtacaatgtttggttttcttcctatttcagggatcctttcatcttactataaaattgtcccctccattctaaggatgtcatcgtcagatgggaagtataaaactttctccacctatggctctcacctagcatttgtttgctgattttatggaacaggcattgacatgtacctggcttcagctatgtcaccaacccccaggaatggtgtggtggtgtcagtgatgtaagctgtggtcacccccatgctgaaccttttcatctacagcctgagaaacagggacatacaaagtgccctgcggaggctgcgcagcagaacagtcgaatctcatgatctgttccatct

SEQ ID NO: 1424 - protein, 188 aa, Homo sapiens
  MOD_RES (3): Variable amino acid
  MOD_RES (7)..(40): Variable amino acid
  MOD_RES (46): Variable amino acid
  MOD_RES (72): Variable amino acid
  MOD_RES (79): Variable amino acid
MIXTQVXXXXXXXXXXXXXXXXXXXXXXXXXXXXXXXXXXLFLVFXACIEGMLLTVMAYDCFVGICRLLHYXVIVNPHXCVFFVWVSFFLSLLDSQLHSWIVLQFTIIKNVEISNFVCDPSQLLKLASYDSVINSIFIYFDSTMFGFLPISGILSSYYKIVPSILRMSSSDGKYKTFSTYGSHLAFVC

SEQ ID NO: 1425 - DNA, 910 bp, Homo sapiens
  source (1)..(910)
  CDS (201)..(710)
  modified_base (1)..(75): a, t, c, g, unknown or other
  modified_base (97): a, t, c, g, unknown or other
  modified_base (101)..(103): a, t, c, g, unknown or other
  modified_base (105)..(106): a, t, c, g, unknown or other
  modified_base (108)..(117): a, t, c, g, unknown or other
  modified_base (161): a, t, c, g, unknown or other
  modified_base (813): a, t, c, g, unknown or other
  modified_base (833)..(910): a, t, c, g, unknown or other
nnnnnnnnnnnnnnnnnnnnnnnnnnnnnnnnnnnnnnnnnnnnnnnnnnnnnnnnnnnnnnnnnnnnnnnnnnntttttgtttcttgtttagcatnccgnnngnnannnnnnnnnnccccccctcccaccccccacgacttcttcctctccatcctgtgntgggctgacatcggtttcacctcggccacggttcccaagatgattgtggacatgcagtggtatagcagagtcatctctcatgcgggctgcctgacacagatgtctttcttggtcctttttgcatgtatagaaggcatgctcctgactgtaatggcctatgactgctttgtaggcatctgtcgccctctgcactacccagtcatcgtgaatcctcatctctgtgtcttctttgttttggtgtcctttttccttagcctgttggattcccagctgcacagttggattgtgttacaattcaccatcatcaagaatgtggaaatctctaattttgtctgtgacccctctcaacttctcaaacttgcctcttatgacagcgtcatcaatagcatattcatatatttcgatagtacaatgtttggttttcttcctatttcagggatcctttcatcttactataaaattgtcccctccattctaaggatgtcatcgtcagatgggaagtataaaactttctccacctatggctctcacctagcatttgtttgctgattttatggaacaggcattgacatgtacctggcttcagctatgtcaccaacccccagaaatggtgtggtggtgtcagtgagtagtcttatccacccccgagtgntgattacgtaacgcagtccnnnnnnnnnnnnnnnnnnnnnnnnnnnnnnnnnnnnnnnnnnnnnnnnnnnnnnnnnnnnnnnnnnnnnnnnnnnnnn

SEQ ID NO: 1426 - protein, 169 aa, Homo sapiens
MIVDMQWYSRVISHAGCLTQMSFLVLFACIEGMLLTVMAYDCFVGICRPLHYPVIVNPHLCVFFVLVSFFLSLLDSQLHSWIVLQFTIIKNVEISNFVCDPSQLLKLASYDSVINSIFIYFDSTMFGFLPISGILSSYYKIVPSILRMSSSDGKYKTFSTYGSHLAFVC

SEQ ID NO: 1427 - DNA, 946 bp, Homo sapiens
  source (1)..(946)
  CDS (201)..(746)
  modified_base (1)..(73): a, t, c, g, unknown or other
  modified_base (251): a, t, c, g, unknown or other
  modified_base (253): a, t, c, g, unknown or other
  modified_base (779)..(780): a, t, c, g, unknown or other
  modified_base (802): a, t, c, g, unknown or other
  modified_base (815): a, t, c, g, unknown or other
  modified_base (825)..(924): a, t, c, g, unknown or other
nnnnnnnnnnnnnnnnnnnnnnnnnnnnnnnnnnnnnnnnnnnnnnnnnnnnnnnnnnnnnnnnnnnnnnnnngttctcaaggtgtccaagacacacagagccacggaatctcacaggtgtctgagaattcctcttcctgggactctcagaggatccagaactgcagccggtcctcgctttgctgtccctgtccctgtccatgtatctggtcacggtgctgaggaacctgctgagcatcccggctgtcagntntgactccccgctccacacccccacgtacttcttcctctccatcctgtgctgggctgacatcggtttcacctcggccacggtttccaagacgattgtggacatgcagtcacatagcagagtcatctctcatgcgggctgcctgacacagatgtctttcttggtcctttttgcatgtatagaaggcatgctcctgactgtgatggcctatgactgctttgtaggcatctgtcgccctctgcactacccagtcatcgtgaatcctcatctctgtgtcttctttgttttggtgtcctttttccttagcctgttggattcccagctgcacagttggattgtgttacaattcaccatcatcaagaatgtggaaatctctaattttgtctgtgacccctctcaacttctcaaacttgcctgttctgacagcgtcatcaatagcatcttcataattttggtagtactatgtttggttttcttcccattcagggatccctaatgtcttactataaaatcggccccggcttttccnnccccacaatcgaggtttcgtanccaagttagcctntttaaaaacnnnnnnnnnnnnnnnnnnnnnnnnnnnnnnnnnnnnnnnnnnnnnnnnnnnnnnnnnnnnnnnnnnnnnnnnnnnnnnnnnnnnnnnnnnnnnnnnnnnnttttcgatggctttatcgggat

SEQ ID NO: 1428 - protein, 181 aa, Homo sapiens
  MOD_RES (17)..(18): Variable amino acid
MYLVTVLRNLLSIPAVXXDSPLHTPTYFFLSILCWADIGFTSATVSKTIVDMQSHSRVISHAGCLTQMSFLVLFACIEGMLLTVMAYDCFVGICRPLHYPVIVNPHLCVFFVLVSFFLSLLDSQLHSWIVLQFTIIKNVEISNFVCDPSQLLKLACSDSVINSIFIILVVLCLVFFPFRDP

SEQ ID NO: 1429 - DNA, 901 bp, Homo sapiens
  source (1)..(901)
  CDS (201)..(701)
  modified_base (1)..(87): a, t, c, g, unknown or other
  modified_base (171): a, t, c, g, unknown or other
  modified_base (183): a, t, c, g, unknown or other
  modified_base (252): a, t, c, g, unknown or other
  modified_base (407): a, t, c, g, unknown or other
  modified_base (840): a, t, c, g, unknown or other
  modified_base (852)..(901): a, t, c, g, unknown or other
nnnnnnnnnnnnnnnnnnnnnnnnnnnnnnnnnnnnnnnnnnnnnnnnnnnnnnnnnnnnnnnnnnnnnnnnnnnnnnnnnnnnnnncaccacggtccccaagatgattgtggacatccagtctcacagcagagtcatctatgcaggctgcctgactgtgatgtctctctntgccatttttgnaggcatggaagagagacatgctcctgagtgtgatggcctatgaccggtttgtagccatctgtcaccctntatatcgctcagccaccttgaacccgtgtttctgtggcttcctagatttgttgtcttttttttttttttccctcaggcttttagactcccagctgcacaacttgattgccttacaaatgacctgcttcaaggatgtggaaattcctaatttcttntgggaaccttctcaactcccccatcttgcatgttgtgacaccttcaccaggaacatcagcatgtatttccctgctgccgtatttggttttctttccatctcgggtacccttttctcttactgtaaaatggtttcctccattctgagggtttcatcatcaggtgggaagtataaaccttctccacctgagggtcccacctgtcagttgtttgctgattttatggaacaggctttggagagtacctcggttcagatgtgtcatcttccccgagaaagggtgcagtggcctcagtgatgtactcggtggtcacccccatgctgaaccccttcatctacagcctgagaaacggggatattaaaagtgtcctgcggcggccgcaaggcagcacagtctctgtgcaggttttattccacccccgagcgagggttcgtanacagcagtcctnnnnnnnnnnnnnnnnnnnnnnnnnnnnnnnnnnnnnnnnnnnnnnnnnn

SEQ ID NO: 1430 - protein, 166 aa, Homo sapiens
  MOD_RES (18): Variable amino acid
  MOD_RES (69): Variable amino acid
MLLSVMAYDRFVAICHPXYRSATLNPCFCGFLDLLSFFFFSLRLLDSQLHNLIALQMTCFKDVEIPNFXWEPSQLPHLACCDTFTRNISMYFPAAVFGFLSISGTLFSYCKMVSSILRVSSSGGKYKPSPPEGPTCQLFADFMEQALESTSVQMCHLPRERVQWPQ

SEQ ID NO: 1431 - DNA, 997 bp, Homo sapiens
  source (1)..(997)
  CDS (201)..(797)
  modified_base (6): a, t, c, g, unknown or other
  modified_base (14): a, t, c, g, unknown or other
  modified_base (19): a, t, c, g, unknown or other
  modified_base (22)..(24): a, t, c, g, unknown or other
  modified_base (42): a, t, c, g, unknown or other
  modified_base (52)..(54): a, t, c, g, unknown or other
  modified_base (64): a, t, c, g, unknown or other
  modified_base (75)..(79): a, t, c, g, unknown or other
  modified_base (81): a, t, c, g, unknown or other
  modified_base (83): a, t, c, g, unknown or other
  modified_base (93)..(193): a, t, c, g, unknown or other
  modified_base (242): a, t, c, g, unknown or other
  modified_base (902)..(997): a, t, c, g, unknown or other
atggcnaggaattnctctnccnnncacccaagtatgagcagngtgaatattnnntcacacaggnggtagaactcnnnnncncngagaaaaacnnnnnnnnnnnnnnnnnnnnnnnnnnnnnnnnnnnnnnnnnnnnnnnnnnnnnnnnnnnnnnnnnnnnnnnnnnnnnnnnnnnnnnnnnnnnnnnnnnnnntttggccatggcctgtgatcgtgctgcggcaatagggcgtccactgcantaccctgtcctggtcaccaaagcctgtgtgggttatgcagcttgggccctggcactgaaagctgtggctattgttgtacctttcccactgctggtggcaaagtttgagcacttccaagccaagaccataggccatacctattgtgcacacatggcagtggtagaactggtggtgggtaacacacaggccaccaacttatatggtctggcactttcactggccatctcaggtatggatattctgggtatcactggctcctatggactcattgcccatgctgtgctgcagctacctacccgggaggcccatgccaaggcctttggtacatgtagttctcacatctgtgtcattctggccttctacatacctggtctcttctcctacctcgcacaccgctttggtcatcacactgtcccaaagcctgtgcacatccttctctccaacatatacttgctgctgccacctgccctcaaccccctcatctatggggcccgcaccaagcagatcagagaccgactcctggaaaccttcacattcagaaaaagcccgttgtaatgtccagtggtaacaatggagcctaagagtggaggtgaggggacaatcggaggggagtatgggggtggaattccaccccacccaatcgagactgatcgaggtagnnnnnnnnnnnnnnnnnnnnnnnnnnnnnnnnnnnnnnnnnnnnnnnnnnnnnnnnnnnnnnnnnnnnnnnnnnnnnnnnnnnnnnnnnnnnnnnn

SEQ ID NO: 1432 - protein, 198 aa, Homo sapiens
  MOD_RES (14): Variable amino acid
MACDRAAAIGRPLXYPVLVTKACVGYAAWALALKAVAIVVPFPLLVAKFEHFQAKTIGHTYCAHMAVVELVVGNTQATNLYGLALSLAISGMDILGITGSYGLIAHAVLQLPTREAHAKAFGTCSSHICVILAFYIPGLFSYLAHRFGHHTVPKPVHILLSNIYLLLPPALNPLIYGARTKQIRDRLLETFTFRKSPL

SEQ ID NO: 1433 - DNA, 856 bp, Homo sapiens
  source (1)..(856)
  CDS (201)..(656)
  modified_base (662): a, t, c, g, unknown or other
  modified_base (761): a, t, c, g, unknown or other
aaggaaggaggagagggaaggaggaactaagggagggagggagggaggatacagcaggccctgctaaagcatctcccccgccttggtccccggggagcggcgctcatgagccctcccggcagccgcctctttacctgcgcccctgacccgtacacccttccctccttcccttgcagagcccgggcgaggacccctccaggatgcaggtcccgaacagcaccggcccggacaacgcgacgctgcagatgctgcggaacccggcgatcgcggtggccctgcccgtggtgtactcgctggtggcggcggtcatcatcccgggcaacctcttctctctgtgggtgctgtgccggcgcatggggcccatatccccgtcggtcatcttcatgatcaacctgagcgtcacggacctgatgctggccagcgtgttgcctttccaaatctactaccattgcaaccgccaccactgggtattcggggtgctgctttgcaacgtggtgaccgtggccttttacgcaaacatgtattccatcatcctcaccatgacctgtatcatcgtggagcgcttcctggggtcctgtacccgctcatctccaatcgctggcgccgccgtctttacccggtggccgcgtgtgcatggacctggctgctgctcctgaccgccnnnnnnnnnnnnnnnnnnnnnnnnnnnnnnnnnnnnnnnnnnnnnnnnnnnnnnnnnnnnnnnnnnnnnnnnnnnnnnnnnnnnnnnnnnnnnnnnnnnnatctctgggtatgatactcctcctctggggtggaaaaacccacccattcattccctccacagtctttgggaatgtcctgtatcacacacacacac

SEQ ID NO: 1434 - protein, 151 aa, Homo sapiens
MQVPNSTGPDNATLQMLRNPAIAVALPVVYSLVAAVIIPGNLFSLWVLCRRMGPISPSVIFMINLSVTDLMLASVLPFQIYYHCNRHHWVFGVLLCNVVTVAFYANMYSIILTMTCIIVERFLGSCTRSSPIAGAAVFTRWPRVHGPGCCS

SEQ ID NO: 1435 - DNA, 922 bp, Homo sapiens
  source (1)..(922)
  CDS (201)..(722)
  modified_base (1)..(26): a, t, c, g, unknown or other
  modified_base (62): a, t, c, g, unknown or other
  modified_base (124)..(125): a, t, c, g, unknown or other
  modified_base (127)..(128): a, t, c, g, unknown or other
  modified_base (131): a, t, c, g, unknown or other
  modified_base (133)..(134): a, t, c, g, unknown or other
  modified_base (138): a, t, c, g, unknown or other
  modified_base (142)..(145): a, t, c, g, unknown or other
  modified_base (147): a, t, c, g, unknown or other
  modified_base (151): a, t, c, g, unknown or other
  modified_base (311): a, t, c, g, unknown or other
  modified_base (322): a, t, c, g, unknown or other
  modified_base (326): a, t, c, g, unknown or other
  modified_base (345)..(349): a, t, c, g, unknown or other
  modified_base (351)..(361): a, t, c, g, unknown or other
  modified_base (364): a, t, c, g, unknown or other
  modified_base (366)..(368): a, t, c, g, unknown or other
  modified_base (370)..(380): a, t, c, g, unknown or other
  modified_base (384): a, t, c, g, unknown or other
  modified_base (386)..(388): a, t, c, g, unknown or other
  modified_base (392): a, t, c, g, unknown or other
  modified_base (394)..(396): a, t, c, g, unknown or other
  modified_base (403): a, t, c, g, unknown or other
  modified_base (413): a, t, c, g, unknown or other
  modified_base (415)..(417): a, t, c, g, unknown or other
  modified_base (422): a, t, c, g, unknown or other
  modified_base (438)..(439): a, t, c, g, unknown or other
  modified_base (441): a, t, c, g, unknown or other
  modified_base (443): a, t, c, g, unknown or other
  modified_base (445): a, t, c, g, unknown or other
  modified_base (465): a, t, c, g, unknown or other
  modified_base (469)..(471): a, t, c, g, unknown or other
  modified_base (487)..(488): a, t, c, g, unknown or other
  modified_base (490)..(491): a, t, c, g, unknown or other
  modified_base (495): a, t, c, g, unknown or other
  modified_base (497)..(498): a, t, c, g, unknown or other
  modified_base (501)..(505): a, t, c, g, unknown or other
  modified_base (519): a, t, c, g, unknown or other
  modified_base (529)..(530): a, t, c, g, unknown or other
  modified_base (540): a, t, c, g, unknown or other
  modified_base (548)..(549): a, t, c, g, unknown or other
  modified_base (564)..(568): a, t, c, g, unknown or other
  modified_base (571): a, t, c, g, unknown or other
  modified_base (573): a, t, c, g, unknown or other
  modified_base (584)..(586): a, t, c, g, unknown or other
  modified_base (592)..(594): a, t, c, g, unknown or other
  modified_base (610)..(611): a, t, c, g, unknown or other
  modified_base (614)..(619): a, t, c, g, unknown or other
  modified_base (634)..(635): a, t, c, g, unknown or other
  modified_base (646): a, t, c, g, unknown or other
  modified_base (652)..(654): a, t, c, g, unknown or other
  modified_base (667): a, t, c, g, unknown or other
  modified_base (678): a, t, c, g, unknown or other
  modified_base (700)..(704): a, t, c, g, unknown or other
  modified_base (709)..(711): a, t, c, g, unknown or other
  modified_base (729)..(829): a, t, c, g, unknown or other
  modified_base (851): a, t, c, g, unknown or other
  modified_base (853): a, t, c, g, unknown or other
  modified_base (875): a, t, c, g, unknown or other
  modified_base (911): a, t, c, g, unknown or other
  modified_base (918)..(919): a, t, c, g, unknown or other
nnnnnnnnnnnnnnnnnnnnnnnnnnggaccttggttataatgtgcgattggtggggtggantaaccctaccacaaggcagatatctaagcttcctcggaaatagctccacatactcactatgnnannatntnnattngggnnnncntttnttaattcgggccacccaaggctgggaaacctcagagttatccagaaccaatgctttacaatgtgaatagaaaacaaaggaggctgagtcagaagcatccacacagccagcaccttctccccatgcaggcagcactcagaaccacacggtggggtaggggngggtggggggngaanggggcacaggagggtgggnnnnntnnnnnnnnnnnggngnnngnnnnnnnnnnngggngnnngggngnnnggggggngggggggggngnnnggggngggggggggggggggnngngngngggggggggggggggggggngggnnngggggggggggggggnngnngggngnnggnnnnngggggggggggggngggggggggnngggggggggntttggggnnggggggggggggggnnnnnggngnggggggggggnnngggggnnngggggggggggggggnnggnnnnnnggggggggggtttgnnggggggggggngttttnnnggggggggggggnggggggggggngggggggggggggggggggggnnnnnttttnnngtggtgtttaggaaaaannnnnnnnnnnnnnnnnnnnnnnnnnnnnnnnnnnnnnnnnnnnnnnnnnnnnnnnnnnnnnnnnnnnnnnnnnnnnnnnnnnnnnnnnnnnnnnnnnnnngttttaaaaaaggactttggtnanatacgctgcgattcagggtggnggaaaaaccatccctttgcttggacaatcaatttanaaactanngtt

SEQ ID NO: 1436 - protein, 173 aa, Homo sapiens
  MOD_RES (37): Variable amino acid
  MOD_RES (41)..(42): Variable amino acid
  MOD_RES (49)..(60): Variable amino acid
  MOD_RES (62)..(66): Variable amino acid
  MOD_RES (68): Variable amino acid
  MOD_RES (71)..(74): Variable amino acid
  MOD_RES (80)..(82): Variable amino acid
  MOD_RES (89)..(91): Variable amino acid
  MOD_RES (96)..(97): Variable amino acid
  MOD_RES (99)..(102): Variable amino acid
  MOD_RES (107): Variable amino acid
  MOD_RES (110): Variable amino acid
  MOD_RES (114): Variable amino acid
  MOD_RES (116)..(117): Variable amino acid
  MOD_RES (122)..(125): Variable amino acid
  MOD_RES (128)..(129): Variable amino acid
  MOD_RES (131)..(132): Variable amino acid
  MOD_RES (137)..(140): Variable amino acid
  MOD_RES (145): Variable amino acid
  MOD_RES (149): Variable amino acid
  MOD_RES (151)..(152): Variable amino acid
  MOD_RES (156): Variable amino acid
  MOD_RES (160): Variable amino acid
  MOD_RES (167)..(168): Variable amino acid
  MOD_RES (170)..(171): Variable amino acid
MLYNVNRKQRRLSQKHPHSQHLLPMQAALRTTRWGRXGWGXXGAQEGGXXXXXXXXXXXXGXXXXXGXGGXXXXGGGGGXXXGGGGGGXXXGGGGXXGXXXXGGGGXGGXGGGXWXXGGGGXXXXGGXXGXXGGGGXXXXGGGFXGGGXFXXGGGXGGGXGGGGGGXXFXXGV

SEQ ID NO: 1437 - DNA, 961 bp, Homo sapiens
  source (1)..(961)
  CDS (201)..(761)
  modified_base (213)..(312): a, t, c, g, unknown or other
  modified_base (320)..(322): a, t, c, g, unknown or other
  modified_base (334): a, t, c, g, unknown or other
  modified_base (354): a, t, c, g, unknown or other
  modified_base (357): a, t, c, g, unknown or other
  modified_base (892): a, t, c, g, unknown or other
tatgtacttttttctcattcaatcatctcccttagatatgaaaaagcaactcttcaggttagaaactattatccccactgtgtaggggagagacagagaaagccttgccccaaatcacatagccagccacatttaaacctcctctacctgatctaatgtctgttttctaaatgactcctctctagtctccacttacactgatgaatatgactnnnnnnnnnnnnnnnnnnnnnnnnnnnnnnnnnnnnnnnnnnnnnnnnnnnnnnnnnnnnnnnnnnnnnnnnnnnnnnnnnnnnnnnnnnnnnnnnnnnngttttaannnggcactgggtanattaaaagtccgtcgggggnggnaaaaaagccacccactgcagtacctgtccattttcactcatcaatttgtggccaaagctagtgtcttcattgtggtgcagaatgctttgctgctttcacctgttcctattctctctgcccagctccattactgtaggaaaaatgtgattgagaactgcatctgtgccaacctgtctgtgtccaggctctcctgtgataatttcacccttaacagactctaccaatttgtggctggttggaccttcctgggctcggatttcatcctcatcttcctctcctacaccttcattctaagagctgtgcttagattcaaggtggagggggtggcagtgaaggccctgagcacatgtggctcccactttatcctcatcctcttcttcagcacctgctggttgtggtgttgacaaatgtggccagaaagaaggtccccatggacatcctgatcctgtttaatgtccttcatccctttagtcctcctgcattaaaccctatcatatgtggatttcaaactaaagagttaaagaaggaattttanaagttgctgcagaggggcctttgaaaacacggaagggactctccatagaagcacctattactgtttcta

SEQ ID NO: 1438 - protein, 186 aa, Homo sapiens
  MOD_RES (5)..(38): Variable amino acid
  MOD_RES (40)..(41): Variable amino acid
  MOD_RES (45): Variable amino acid
  MOD_RES (52)..(53): Variable amino acid
MNMTXXXXXXXXXXXXXXXXXXXXXXXXXXXXXXXXXXFXXALGXLKVRRGXXKSHPLQYLSIFTHQFVAKASVFIVVQNALLLSPVPILSAQLHYCRKNVIENCICANLSVSRLSCDNFTLNRLYQFVAGWTFLGSDFILIFLSYTFILRAVLRFKVEGVAVKALSTCGSHFILILFFSTCWLWC

SEQ ID NO: 1439 - DNA, 1177 bp, Homo sapiens
  source (1)..(1177)
  CDS (201)..(977)
  modified_base (20)..(119): a, t, c, g, unknown or other
  modified_base (750): a, t, c, g, unknown or other
  modified_base (809): a, t, c, g, unknown or other
  modified_base (816): a, t, c, g, unknown or other
  modified_base (829)..(928): a, t, c, g, unknown or other
agttccttttttatacacannnnnnnnnnnnnnnnnnnnnnnnnnnnnnnnnnnnnnnnnnnnnnnnnnnnnnnnnnnnnnnnnnnnnnnnnnnnnnnnnnnnnnnnnnnnnnnnnnnngtcatccccaaggtcctggccatcttctggtttgacctcagatcaatcagcttccctgcctgcttccttcaggtgttcatcatgaacagttttctgactatggagtcctgcacattcatgatcatggcctatgaccgctatgtggccatctgcaagcccctacagtactcatccatcatcactgatcaatttgtcgctagggctgccatctttgttgtggccaggaatggccttcttactatgcctatccccatactttcttctcgactcagatactgtgcaggacacatcatcaagaactgcatctgtactaacgtgtctgtgtctaaactctcttgtgatgacatcaccttgaatcagagctaccagtttgttataggttggaccctgctgggctctgacctcatccttattgttctctcttacttttttatcttgaaaactgtgctaaggattaagggtgagggagatatggccaaagctctaggtacttgtggttcccacttcatcctcatcctcttcttcaccacagtcctgctggttctggtcatcactaacctggccaggaagagaattcctccggatgtccccatcctgctcaacatcctgcaccaccttattcccccagctntgaaccccattgtttatggtgtgagaacgcaagggggattttttccaccccaggagcgnagattcngtaccgcagttcnnnnnnnnnnnnnnnnnnnnnnnnnnnnnnnnnnnnnnnnnnnnnnnnnnnnnnnnnnnnnnnnnnnnnnnnnnnnnnnnnnnnnnnnnnnnnnnnnnnntgtactgctgctatttcttgctgttttctacaggagctgcagaggctgattttatggaccctgactccactagtcccttccctccacactactcacaagagttagtgccattattaggcacctggatcctggggccctatggtccatgtcccaggagagtatgttgtgaaaggtgttcagcattgggagtagagtgagggtgaaagagttcaaaggcacttgggaagtctaattaacaaaaatggcatt

SEQ ID NO: 1440 - protein, 258 aa, Homo sapiens
  MOD_RES (184): Variable amino acid
  MOD_RES (203): Variable amino acid
  MOD_RES (206): Variable amino acid
  MOD_RES (210)..(243): Variable amino acid
MNSFLTMESCTFMIMAYDRYVAICKPLQYSSIITDQFVARAAIFVVARNGLLTMPIPILSSRLRYCAGHIIKNCICTNVSVSKLSCDDITLNQSYQFVIGWTLLGSDLILIVLSYFFILKTVLRIKGEGDMAKALGTCGSHFILILFFTTVLLVLVITNLARKRIPPDVPILLNILHHLIPPAXNPIVYGVRTQGGFFPPQEXRFXTAVXXXXXXXXXXXXXXXXXXXXXXXXXXXXXXXXXXVLLLFLAVFYRSCRG

SEQ ID NO: 1441 - DNA, 919 bp, Homo sapiens
  source (1)..(919)
  CDS (201)..(719)
  modified_base (1)..(68): a, t, c, g, unknown or other
  modified_base (736): a, t, c, g, unknown or other
  modified_base (746): a, t, c, g, unknown or other
  modified_base (779)..(879): a, t, c, g, unknown or other
nnnnnnnnnnnnnnnnnnnnnnnnnnnnnnnnnnnnnnnnnnnnnnnnnnnnnnnnnnnnnnnnnnnncagcccctgtactacctgctcagcctcctctccctgctggacatcgtgctctgcctcaccgtcatccccaaggtcctggccatcttctggtatgatcttaggtcgatcagcttccctgcctgcttcctccagatgttcatcatgaacagtttcctccccatggagtcctgcacgtttatggtcatggcctatgaccgttatgtggccatctgccacccactgcggtacccatccatcatcactaatcaatttgtggccaaagctagtgtcttcattgtggtgcggaatgcgcttcttactgcacccattcctatcctcacttccctgctccattactgtggggaaaatgtcattgagaactgcatctgtgccaacttgtctgtgtccaggctctcctgtgataatttcacccttaacagaatctaccaatttgtggctggttggaccttgctgggctcagatttattcctcatcttcctctcttacaccttcattctaagagctgtgcttagattcaaagcagagggggcggcagtgaaggccctgagcacatgtggctcccacttcatcctcattcttttcttcagcaccatactgctggttgtggtgttgacaaacgtggccagaaagaaggtccccaggacaacctgatcctgctgaacgtcctncgcattattnccaccccagagggcggatacataccgcagtgcnnnnnnnnnnnnnnnnnnnnnnnnnnnnnnnnnnnnnnnnnnnnnnnnnnnnnnnnnnnnnnnnnnnnnnnnnnnnnnnnnnnnnnnnnnnnnnnnnnnnngcctatgcacactgagcagcttctgtggatccaataagtg

SEQ ID NO: 1442 - protein, 172 aa, Homo sapiens
MFIMNSFLPMESCTFMVMAYDRYVAICHPLRYPSIITNQFVAKASVFIVVRNALLTAPIPILTSLLHYCGENVIENCICANLSVSRLSCDNFTLNRIYQFVAGWTLLGSDLFLIFLSYTFILRAVLRFKAEGAAVKALSTCGSHFILILFFSTILLVVVLTNVARKKVPRTT

SEQ ID NO: 1443 - DNA, 1345 bp, Homo sapiens
  source (1)..(1345)
  CDS (201)..(1145)
  modified_base (1)..(79): a, t, c, g, unknown or other
  modified_base (135)..(137): a, t, c, g, unknown or other
  modified_base (161): a, t, c, g, unknown or other
  modified_base (175): a, t, c, g, unknown or other
  modified_base (192)..(194): a, t, c, g, unknown or other
  modified_base (248): a, t, c, g, unknown or other
  modified_base (300)..(302): a, t, c, g, unknown or other
  modified_base (404)..(405): a, t, c, g, unknown or other
  modified_base (454)..(456): a, t, c, g, unknown or other
  modified_base (505)..(506): a, t, c, g, unknown or other
  modified_base (554)..(555): a, t, c, g, unknown or other
  modified_base (604)..(606): a, t, c, g, unknown or other
  modified_base (656)..(657): a, t, c, g, unknown or other
  modified_base (694): a, t, c, g, unknown or other
  modified_base (704): a, t, c, g, unknown or other
  modified_base (750): a, t, c, g, unknown or other
  modified_base (796)..(895): a, t, c, g, unknown or other
  modified_base (903): a, t, c, g, unknown or other
  modified_base (908)..(909): a, t, c, g, unknown or other
  modified_base (911): a, t, c, g, unknown or other
  modified_base (915)..(916): a, t, c, g, unknown or other
  modified_base (922): a, t, c, g, unknown or other
  modified_base (926)..(927): a, t, c, g, unknown or other
  modified_base (932): a, t, c, g, unknown or other
  modified_base (941)..(945): a, t, c, g, unknown or other
  modified_base (962): a, t, c, g, unknown or other
  modified_base (965): a, t, c, g, unknown or other
  modified_base (968)..(969): a, t, c, g, unknown or other
  modified_base (973)..(974): a, t, c, g, unknown or other
  modified_base (983): a, t, c, g, unknown or other
  modified_base (985)..(987): a, t, c, g, unknown or other
  modified_base (995)..(997): a, t, c, g, unknown or other
  modified_base (1004)..(1005): a, t, c, g, unknown or other
  modified_base (1026): a, t, c, g, unknown or other
  modified_base (1036): a, t, c, g, unknown or other
  modified_base (1039)..(1041): a, t, c, g, unknown or other
  modified_base (1043): a, t, c, g, unknown or other
  modified_base (1050): a, t, c, g, unknown or other
  modified_base (1055): a, t, c, g, unknown or other
  modified_base (1057)..(1058): a, t, c, g, unknown or other
  modified_base (1068): a, t, c, g, unknown or other
  modified_base (1077): a, t, c, g, unknown or other
  modified_base (1084)..(1085): a, t, c, g, unknown or other
  modified_base (1088): a, t, c, g, unknown or other
  modified_base (1094): a, t, c, g, unknown or other
  modified_base (1116): a, t, c, g, unknown or other
  modified_base (1120)..(1121): a, t, c, g, unknown or other
  modified_base (1154): a, t, c, g, unknown or other
  modified_base (1162): a, t, c, g, unknown or other
  modified_base (1173)..(1174): a, t, c, g, unknown or other
  modified_base (1199): a, t, c, g, unknown or other
  modified_base (1211): a, t, c, g, unknown or other
  modified_base (1225)..(1226): a, t, c, g, unknown or other
  modified_base (1276)..(1277): a, t, c, g, unknown or other
  modified_base (1327)..(1328): a, t, c, g, unknown or other
nnnnnnnnnnnnnnnnnnnnnnnnnnnnnnnnnnnnnnnnnnnnnnnnnnnnnnnnnnnnnnnnnnnnnnnnnnnnnnnatacagcaatgaagatgtgccctgtgacacaatggatgtaatcatattcctgattnnnatttcgttacaggccctgtttccntgagctctcacctntgatacaagccttaaannngagtaaatgagacagaataacaatattacagaatttgtcctcctgggctttttncaggatcctggtgtgcaaaaagcattatttgtcatgtttttactcacatatnnngtgacagtggtggggaacctgctcattgtggtggatattattgccagcctccccttgggttccccaatgtatttcttccttgcctgcctgtcatttatagtnnctgcatattccactaccatttctcccaagttaattgtaggcttattctnnnataaaaagactatttccttccaaggttgcatgggccagctatttatagnncatttctttggtggggctgaggtcttccttctggtggtgatggcctgnnatcgctatgtggccatctgtaagccactgcactatttgaccatcatgannngacaggtttgcttccttctgttggtggtggccatgattggaggttttgtnnattctgcgtttcaaattgttgtgtacagtctcccttntgggtccctngtcattgttctttcagttgtgacagcacccatatggggtttttctnccccaccaagccgggctcatccaccaatccccccccaacacactcnnnnnnnnnnnnnnnnnnnnnnnnnnnnnnnnnnnnnnnnnnnnnnnnnnnnnnnnnnnnnnnnnnnnnnnnnnnnnnnnnnnnnnnnnnnnnnnnnnnncgacagtnatatnncncttnnattttncatnncaatnctcagtatnnnnnatgggccccccgcgatngtnatnnattnnatggttctntnnnctttctannnagatatnnagcgctcccgggcagccctcncatcctgttnccnnntnttctgtntcatnanntattgtattncagctaatngcatagnnctnggcatnaaaaaaatgctcataacaattntttnncataataaatacatagatacatagttataacanctaaatanaatattttatnnacatatcctaacctacacttgtagncagaaaaaatgnagaattagatcatnncaaaaaagctgctattgcaaagtggggaaaatgtgataaattcatctttnnagcgagaagtggctgggctgatattttattcttgattggcaatcctactnnaatggttgtttttttct

SEQ ID NO: 1444 - protein, 314 aa, Homo sapiens
  MOD_RES (16): Variable amino acid
  MOD_RES (34): Variable amino acid
  MOD_RES (68)..(69): Variable amino acid
  MOD_RES (85)..(86): Variable amino acid
  MOD_RES (102): Variable amino acid
  MOD_RES (118)..(119): Variable amino acid
  MOD_RES (135)..(136): Variable amino acid
  MOD_RES (152)..(153): Variable amino acid
  MOD_RES (165): Variable amino acid
  MOD_RES (168): Variable amino acid
  MOD_RES (184): Variable amino acid
  MOD_RES (199)..(232): Variable amino acid
  MOD_RES (235)..(237): Variable amino acid
  MOD_RES (239): Variable amino acid
  MOD_RES (241)..(244): Variable amino acid
  MOD_RES (247)..(249): Variable amino acid
  MOD_RES (254)..(258): Variable amino acid
  MOD_RES (261)..(263): Variable amino acid
  MOD_RES (265)..(266): Variable amino acid
  MOD_RES (268)..(269): Variable amino acid
  MOD_RES (276): Variable amino acid
  MOD_RES (279)..(281): Variable amino acid
  MOD_RES (284)..(286): Variable amino acid
  MOD_RES (290): Variable amino acid
  MOD_RES (293): Variable amino acid
  MOD_RES (295)..(296): Variable amino acid
  MOD_RES (298): Variable amino acid
  MOD_RES (306)..(307): Variable amino acid
MRQNNNITEFVLLGFXQDPGVQKALFVMFLLTYXVTVVGNLLIVVDIIASLPLGSPMYFFLACLSFIXXAYSTTISPKLIVGLFXXKKTISFQGCMGQLFIXHFFGGAEVFLLVVMAXXRYVAICKPLHYLTIMXXQVCFLLLVVAMIGGFXXSAFQIVVYSLPXGSXVIVLSVVTAPIWGFSXPPSRAHPPIPPQHTXXXXXXXXXXXXXXXXXXXXXXXXXXXXXXXXXXDSXXXLXFXXXXLSXXXGPPAXXXXXMVXXXFXXDXXRSRAALXSCXXXFCXXXYCIXANXIXXGXKKMLITIXXHNKYIDT

SEQ ID NO: 1445 - DNA, 1141 bp, Homo sapiens
  source (1)..(1141)
  CDS (201)..(941)
  modified_base (1)..(20): a, t, c, g, unknown or other
  modified_base (29): a, t, c, g, unknown or other
  modified_base (40): a, t, c, g, unknown or other
  modified_base (708)..(807): a, t, c, g, unknown or other
  modified_base (817): a, t, c, g, unknown or other
  modified_base (856): a, t, c, g, unknown or other
nnnnnnnnnnnnnnnnnnnngacttggtntatgattctcnctgcgtgtggtggaaaaacctgatctctattgtccaccacatgtgtccccaaaacacttagcatcttctggtttggtccccaaacagtttccctggctgtctcacccaattattctttctgcactatagctttgtgttggactcagctatactgctggccatggcatttgaccgctatatggccatttgctcacccttgagatacactactattctgactcccaaaaccattgtcaaaattgctgtgggaatatgtttccgaagtttctgtgtttttgtcccatgtgttttccttgtgaatcgtttacccttctgcaggacacatatcatttctcacacatactgtgagcacataggtgttgcccagcttgcctgtgctgatatctccatcaatatctggtgtggattttgtgttcccatcatgacggtgatgacagacgtgatcctcattgctgtctcctacaccctcatcctctgtgctgtcttttgcctcccctcccaagatgcccgtcagaaggccctttgctcctgtggttcccatgtctgtgttatcctcatattctatataccagcattcttctccattcttgcccattgctttgggcataatgtacctcatacctttcatattatgttagccaacctttatgtaataattgcacctgctnnnnnnnnnnnnnnnnnnnnnnnnnnnnnnnnnnnnnnnnnnnnnnnnnnnnnnnnnnnnnnnnnnnnnnnnnnnnnnnnnnnnnnnnnnnnnnnnnnnnggacttgggntataaaacttcctgcgtggggtggaaatacccgtggcanaaaatattcaagagtggatgcactgaacgagttctcaccactagaccagccatacaaaaatgctgaaaacagttcttcaagttgaaatgacaggactataattagcaacataaaaatgtatgaaagcatgaaactcactggtaaaggtaagtataaagtcaacatcataataatggtgtaatggtaatgtgtaactcacttttaatcttagtataaaagttaaaaaaacaaattttaaaaatatctatatgataatttgctaagggatacacagtgtattaagtt

SEQ ID NO: 1446 - protein, 246 aa, Homo sapiens
  MOD_RES (170)..(203): Variable amino acid
  MOD_RES (206): Variable amino acid
  MOD_RES (219): Variable amino acid
MAFDRYMAICSPLRYTTILTPKTIVKIAVGICFRSFCVFVPCVFLVNRLPFCRTHIISHTYCEHIGVAQLACADISINIWCGFCVPIMTVMTDVILIAVSYTLILCAVFCLPSQDARQKALCSCGSHVCVILIFYIPAFFSILAHCFGHNVPHTFHIMLANLYVIIAPAXXXXXXXXXXXXXXXXXXXXXXXXXXXXXXXXXXTWXIKLPAWGGNTRGXKYSRVDALNEFSPLDQPYKNAENSSSS

SEQ ID NO: 1447 - DNA, 856 bp, Homo sapiens
  source (1)..(856)
  CDS (201)..(656)
  modified_base (525): a, t, c, g, unknown or other
  modified_base (527): a, t, c, g, unknown or other
  modified_base (534): a, t, c, g, unknown or other
  modified_base (546)..(645): a, t, c, g, unknown or other
aaaaagatatagttaagtcatttctgattatagagattctaattatagatatttgtggtatagagatgattattataatgtcagttaaataattttcgcagaacactcagcagaccaagtgtcacagaaatatctccattttaaaattcagattttaaaggacactgttgtttttccattaaagatactggagacagagcatgatgggacaaaatcaaaccagcatctcagacttcctgctcatgggcctgcccatccaaccagagcagcaaaacctgtgctatgccctgttcttggccatgtatcttaccaccctcctggggaacctcctcatcattgtcctcattcgactggactcccatctccacacgcctatgtatttgtttctcagcaacctgtccttctatgacctctgcttctctctccgtgaccattcccaagttgttacagaacatgcagaaccaggacccatccatcccctatgcggactgcctgacccaaggaatttccaccacaggcaggagngnatattanaccaaagtcctnnnnnnnnnnnnnnnnnnnnnnnnnnnnnnnnnnnnnnnnnnnnnnnnnnnnnnnnnnnnnnnnnnnnnnnnnnnnnnnnnnnnnnnnnnnnnnnnnnnngagaagcatgatttatagtcctttgggtatatacccagtaatgggatggctgggtcaaatactatgtctagttctagatccctgaggaatcgtcacactgacttccacaatgggttgaactagattacagtcccaccaacagtgtaaaagtgttcctatttctccacatcctctccagcacctattgcttcctgactttttaatgattgcc

SEQ ID NO: 1448 - protein, 151 aa, Homo sapiens
  MOD_RES (109): Variable amino acid
  MOD_RES (112): Variable amino acid
  MOD_RES (116)..(149): Variable amino acid
MMGQNQTSISDFLLMGLPIQPEQQNLCYALFLAMYLTTLLGNLLIIVLIRLDSHLHTPMYLFLSNLSFYDLCFSLRDHSQVVTEHAEPGPIHPLCGLPDPRNFHHRQEXILXQSPXXXXXXXXXXXXXXXXXXXXXXXXXXXXXXXXXXEA

SEQ ID NO: 1449 - DNA, 883 bp, Homo sapiens
  source (1)..(883)
  CDS (201)..(683)
  modified_base (155): a, t, c, g, unknown or other
  modified_base (225): a, t, c, g, unknown or other
  modified_base (470): a, t, c, g, unknown or other
  modified_base (665): a, t, c, g, unknown or other
  modified_base (694)..(793): a, t, c, g, unknown or other
  modified_base (804): a, t, c, g, unknown or other
ttattctctgtggatcataagaccataagctccataatcatcacaaatacagtggaaaaagtgcttgctctgggccagaccatgttctaaatgcttttatgtaataactacacataaatctcccagataactctatgagataggtagtgttatgnctgacatccaagtttcagagacaaaaaaaggctcgggaaggttaaatgacttgcccaagcacagcaatgntgggatattattcccccccacccccaccgcccaatatattcgtgggtcacattggcatctcctgggcagggtcccactccgggcctctctcttggttccccggtggcctctgcacttccaacttaggcgcctccttccctccactgcagagccccacgatgtcggccaacgccacactgaagccactctgccccatcctggagcagatgagccgtctccagagccacagcaacaccagcatccgntacatcgaccacgcgacagtgctgctgcacgggctggcctcgctgctgggcctggtggagaatggagtcatcctcttcgtggtgggctgccgcatgcgccagaccgtggtcaccactgggtgtgcactggcgctgtccgacctgttggctctgttccctgccttaaacactactctggcaggggccgggtttccnccccccatccgatcttagtatcaagttcnnnnnnnnnnnnnnnnnnnnnnnnnnnnnnnnnnnnnnnnnnnnnnnnnnnnnnnnnnnnnnnnnnnnnnnnnnnnnnnnnnnnnnnnnnnnnnnnnnnncgtgcattacntgattttgtcctcattccaaccgtatgaggtaaataccgtcctcactctcattttgcagatgaggctcagaaaggttaa

SEQ ID NO: 1450 - protein, 160 aa, Homo sapiens
  MOD_RES (9): Variable amino acid
  MOD_RES (90): Variable amino acid
  MOD_RES (155): Variable amino acid
MTCPSTAMXGYYSPPPPPPNIFVGHIGISWAGSHSGPLSWFPGGLCTSNLGASFPPLQSPTMSANATLKPLCPILEQMSRLQSHSNTSIXYIDHATVLLHGLASLLGLVENGVILFVVGCRMRQTVVTTGCALALSDLLALFPALNTTLAGAGFXPPIRS

SEQ ID NO: 1451 - DNA, 964 bp, Homo sapiens
  source (1)..(964)
  CDS (201)..(764)
  modified_base (407)..(455): a, t, c, g, unknown or other
  modified_base (457)..(470): a, t, c, g, unknown or other
  modified_base (472)..(487): a, t, c, g, unknown or other
  modified_base (489)..(490): a, t, c, g, unknown or other
  modified_base (492)..(493): a, t, c, g, unknown or other
  modified_base (496)..(497): a, t, c, g, unknown or other
  modified_base (499)..(510): a, t, c, g, unknown or other
  modified_base (513): a, t, c, g, unknown or other
  modified_base (515)..(518): a, t, c, g, unknown or other
  modified_base (529)..(532): a, t, c, g, unknown or other
  modified_base (542)..(544): a, t, c, g, unknown or other
  modified_base (550)..(559): a, t, c, g, unknown or other
  modified_base (564)..(565): a, t, c, g, unknown or other
  modified_base (578)..(579): a, t, c, g, unknown or other
  modified_base (581)..(582): a, t, c, g, unknown or other
  modified_base (596)..(598): a, t, c, g, unknown or other
  modified_base (600)..(602): a, t, c, g, unknown or other
  modified_base (610)..(709): a, t, c, g, unknown or other
  modified_base (741): a, t, c, g, unknown or other
cttccttgtccccatctcaccttcttcctcggcttctgcctctcacctccctctctttcttctccaagcatcctccctacgcgtctgcacccgctcctccctcgcaccctcccgcgcctaagcggacctcctcgggagccagctcggtccagcctcccagcgcagtcacgtcccagagcctgttcagctgagccggcagcatgtggaacgcgacgcccagcgaagagccggggttcaacctcacactggccgacctggactgggatgcttcccccgggcacgactcgctgggcgacgagctgctgcagctcttccccgcgccgctgctggcgggcgtcacagccacctgcgtggcactcttcgtggtgggtatcgctggcaacctgctcaccatgctgggggggggnnnnnnnnnnnnnnnnnnnnnnnnnnnnnnnnnnnnnnnnnnnnnnnnngnnnnnnnnnnnnnngnnnnnnnnnnnnnnnngnncnnggnncnnnnnnnnnnnnggngnnnnggggggggggnnnngggggggggnnngggggnnnnnnnnnnggggnnggggggggggggnngnngggggggggggggnnngnnngggggggnnnnnnnnnnnnnnnnnnnnnnnnnnnnnnnnnnnnnnnnnnnnnnnnnnnnnnnnnnnnnnnnnnnnnnnnnnnnnnnnnnnnnnnnnnnnnnnnnnnnggacctggttacagaatctgccctcggtggtnggaaaaagcgtaggcagttatagtgcctgagtgttgagactgggctctgaaatacatatagaaatttaatacaagacaagagtcaccttaaattattaaggaaaaggcaaactttttaataaatgatgctgaaacaactgagtaaccatttggaaaaggataaaattggatccatatatcatttcatgttccaagataaattgcaaatggattcagaaatata

SEQ ID NO: 1452 - protein, 187 aa, Homo sapiens
  MOD_RES (69)..(106): Variable amino acid
  MOD_RES (110)..(111): Variable amino acid
  MOD_RES (114)..(115): Variable amino acid
  MOD_RES (117)..(120): Variable amino acid
  MOD_RES (122): Variable amino acid
  MOD_RES (126)..(128): Variable amino acid
  MOD_RES (132)..(134): Variable amino acid
  MOD_RES (137)..(170): Variable amino acid
  MOD_RES (181): Variable amino acid
MWNATPSEEPGFNLTLADLDWDASPGHDSLGDELLQLFPAPLLAGVTATCVALFVVGIAGNLLTMLGGXXXXXXXXXXXXXXXXXXXXXXXXXXXXXXXXXXXXXXGGGXXGGXXGXXXXGXGGGXXXGGGXXXGGXXXXXXXXXXXXXXXXXXXXXXXXXXXXXXXXXXDLVTESALGGXKKRRQL

SEQ ID NO: 1453 - DNA, 883 bp, Homo sapiens
  source (1)..(883)
  CDS (201)..(683)
  modified_base (381): a, t, c, g, unknown or other
  modified_base (383): a, t, c, g, unknown or other
  modified_base (387): a, t, c, g, unknown or other
  modified_base (390): a, t, c, g, unknown or other
  modified_base (403): a, t, c, g, unknown or other
  modified_base (422)..(521): a, t, c, g, unknown or other
  modified_base (543): a, t, c, g, unknown or other
  modified_base (562): a, t, c, g, unknown or other
ttagcctcaagggcaggtatgatgtgagaagaaaaaaaaaaaatctcaggaagaaactcatcatttctaccctgcacaaagacagtgatgtatttgctatactggatctgagatgttgattctatttctttttgtatttttctagctctgagcttcatccaatttgcaacaaatctattttaaggcaagaagttgattatatgactcaggctaggggtcagagatcctctctggcagaagacaatgagtccagctacagcagaggatttgacatgacgtacactgagtttgactatgacttatgcaatgaagtggttgacgtgacctgctcccctaagccagatgcattcaaaccatggaagatatcatggggggacggtntntttnccncccccaatcgaanttttaccaaccaagttgcnnnnnnnnnnnnnnnnnnnnnnnnnnnnnnnnnnnnnnnnnnnnnnnnnnnnnnnnnnnnnnnnnnnnnnnnnnnnnnnnnnnnnnnnnnnnnnnnnnnnaaaatatattcatttacattcnactctctttaccagaaaanagttaactgctcaatggcatttattgaccacttgtatgatccccagccctgtggcagggactacggggtatacagaaatgtaaacgttccttcccctgctttcaatgaacaaacagtctaattaaggaagggtagtaactgacctggaacaaataaagacatcattgcattgagaatttggagacatgaggcatcggtgaaggttggaaaaggtagttgtggacacagcatggacaaagcggaggtggtgggagggagcatgatgtcgggaaggaattggcttagtcctcagagagggtattggtggggagcagtgggagc

SEQ ID NO: 1454 - protein, 160 aa, Homo sapiens
  MOD_RES (61): Variable amino acid
  MOD_RES (63)..(64): Variable amino acid
  MOD_RES (68): Variable amino acid
  MOD_RES (74)..(107): Variable amino acid
  MOD_RES (115): Variable amino acid
  MOD_RES (121): Variable amino acid
MTQARGQRSSLAEDNESSYSRGFDMTYTEFDYDLCNEVVDVTCSPKPDAFKPWKISWGDGXFXXPNRXFTNQVXXXXXXXXXXXXXXXXXXXXXXXXXXXXXXXXXXKIYSFTFXSLYQKXVNCSMAFIDHLYDPQPCGRDYGVYRNVNVPSPAFNEQTV

SEQ ID NO: 1455 - DNA, 862 bp, Homo sapiens
  source (1)..(862)
  CDS (201)..(662)
  modified_base (535)..(634): a, t, c, g, unknown or other
  modified_base (658): a, t, c, g, unknown or other
  modified_base (663): a, t, c, g, unknown or other
  modified_base (667): a, t, c, g, unknown or other
  modified_base (681)..(682): a, t, c, g, unknown or other
tcctaattcatatatgcttcagtttccttgtacaaaaaataaatggggctactcattttaaaattcattatgttatttaaaaatctaaattaatattttaatgtttcagcacaaagtctgacacatgggtaaatgttacatgtgtaggagatgataatcacttttattattatcatttcagattttctctaacaacaaccatgtcattagctgaaggaaatcagagttctggagccgtatttaccctcttgggcttctcagaatatgcagacctccaggttcctctgttcctggtcttcctgaccatctacacaatcactgtattgggaaacctgggcatgatcatgatcatcaggatcaaccccaaactccacacccgcatgtactttttcctcagccacttgtcctttgttgatttctgttattccaccacagttacacccaaactgctggagaacttggttgtggaagacagaaccatctccttcacaggatgcatcatgcaattcttcctggcgtgtatatgtgcagtggnnnnnnnnnnnnnnnnnnnnnnnnnnnnnnnnnnnnnnnnnnnnnnnnnnnnnnnnnnnnnnnnnnnnnnnnnnnnnnnnnnnnnnnnnnnnnnnnnnnngggttcgtattcccccgcagatangtaanaaangctaattcgttggnngtgaggcttgtctctattcctattgtgttttttttttatttttcctaaaactccaattatgtaagtattgaatcttctttgactgttgacatttcacttattttttgtctacccttttcctttctttccttatttttcattttcttgattgttttcctaattatttttggtatactttat

SEQ ID NO: 1456 - protein, 153 aa, Homo sapiens
  MOD_RES (112)..(145): Variable amino acid
  MOD_RES (153): Variable amino acid
MSLAEGNQSSGAVFTLLGFSEYADLQVPLFLVFLTIYTITVLGNLGMIMIIRINPKLHTRMYFFLSHLSFVDFCYSTTVTPKLLENLVVEDRTISFTGCIMQFFLACICAVXXXXXXXXXXXXXXXXXXXXXXXXXXXXXXXXXXGSYSPADX

SEQ ID NO: 1457 - DNA, 1051 bp, Homo sapiens
  source (1)..(1051)
  CDS (201)..(851)
  modified_base (312): a, t, c, g, unknown or other
gatgttccttgtgaattgcttgcatccagcattaagggctggattttatcttttacttttccaatcctttttccttctcaaggtgtccaagacacacagagccacggaatctcacaggtgtctgagaattcctcctcctgggactctcagaggatccagaactgcagccggtcctcgctttgctgtccctgtccctgtccatgtatctggtcacagtgctgaggaacctgctcagcatcctggcttcagctctgactcccccctccacacccccatgtacttcttcgtctccaagctgtgctgggctgacanccggtttcacctcggccacggttcccaagatgattgtggacatgcagtcgcatagcagagtcatctctcatgcgggctgcctgacacagatgtctttcttggtcctttttgcatgtatagaaggcatgctgctgagtgcgatggcctatgactgctttgtagccatctgtcgccctctgcactacccagtcatcgtgaatcttcacctctgtgtcttcttcattttggtgtcctttttccttagcctgttggattcccagctgcacagttggattgtgttacaattcaccatcatcaagaatgtggaaatctctaattttgtctgtgacccctctcaatttctcaaacttgcctgttctgacagcgtcatcaatagcatattcatatatttcgatagtactatgtttggttttcttcccatttcagggatccttttgtcttactataaaatcgtcccctccattctaaggatgtcatcgtcagatgggaagtataaagccttcgccacctgcggctctcacctagcagttgtttgctgatttgatggaacaggcattggcgtgtacctgacttcagctgtggcaccaccccccaggaatggtgtggtggcgtcagcgatgtacgctgtggtcaccccatgctgaaccctttcatctacagcctgagaaacagggacattcaaagcgccctgcggaggctgctcagcagaacagtcgaatctcatgatctgttccatcct

SEQ ID NO: 1458 - protein, 216 aa, Homo sapiens
  MOD_RES (38): Variable amino acid
MYLVTVLRNLLSILASALTPPSTPPCTSSSPSCAGLTXGFTSATVPKMIVDMQSHSRVISHAGCLTQMSFLVLFACIEGMLLSAMAYDCFVAICRPLHYPVIVNLHLCVFFILVSFFLSLLDSQLHSWIVLQFTIIKNVEISNFVCDPSQFLKLACSDSVINSIFIYFDSTMFGFLPISGILLSYYKIVPSILRMSSSDGKYKAFATCGSHLAVVC

SEQ ID NO: 1459 - DNA, 871 bp, Homo sapiens
  source (1)..(871)
  CDS (201)..(671)
ctaagcctaggtgggaaggtgactgcatccacctttaaacacggggcttgcaacttagctcacgcccgaccaataagagagcttactaaaatgctaattaggcaaaaacaggaggtaaagaaatagccaatcatctatggcctgagagcacagtgggagggaaaatgatctggatataaacccaggcattcgagccagcaatggctaccctctatggatcccctccctttgtatgggagctctgtcttcactctattaaatcttgcaacagtaaatatatatatatatatacatgtccgaactatacagacccacagaatctaacagatgcttcaaaattcctcctcctagaactctcagaggatccaaaactgcagctggccctcgctgggctgttcctgttcatgtacctagtcatggtgctggagaatctgctcattatcctggccgtcagctctgacttccacctccacacccccatgtacttcttcctctccaacctgtccttggctgacatcggtttcacctccaacacggtcccccagatgattgtggacatccaatctcacagcagagtcatctcctatgcaggctgcctgactcagatgtctctctttgctgtttttggaggcatggaagaaagacatgctcctgagtgtgagggcctatgaccggtttgtagccatctgtcaccctctatattattcagccatcatgaacccatgtttctgtggcttcctagttttgtgtttttttttttctcagtcttttagactcccagctgcacaatttgattgccttacaaatgacctgcatcaaggatgtggaaattcctaatttcttctgtgacccttctcaactcccacacctt

SEQ ID NO: 1460 - protein, 156 aa, Homo sapiens
MATLYGSPPFVWELCLHSIKSCNSKYIYIYTCPNYTDPQNLTDASKFLLLELSEDPKLQLALAGLFLFMYLVMVLENLLIILAVSSDFHLHTPMYFFLSNLSLADIGFTSNTVPQMIVDIQSHSRVISYAGCLTQMSLFAVFGGMEERHAPECEGL

SEQ ID NO: 1461 - DNA, 892 bp, Homo sapiens
  source (1)..(892)
  CDS (201)..(692)
acgctggaatgaatgaagtggagggcgtttgaaagagtctacactctttcctggcgttcaaggcctccctcccagctgcagggagtctcatggaaattcttggcccaggggagagctttgggaaaaccagccgggcagcaaaatgcagagggattgttctcgggaaggggctgcaggtgggttagggccaggcccaggaaatggccaagggacttggaccagggaggggagcagcggcggaggtggaaggactgccccgggcgcggtttggggtgggagggcgctcgccggcagaggatccagcgcggacgctccctgcagcgccaccctgcggccccttcgagtttcggtgcggcagcggcgagtgcaccccgcggggctggcgctgcgaccaggaggaagactgcgccgacggcagcgacgagcgcggctgcggagggccctgcgcgccgcaccacgcgccctgcgcccgcggccctcactgcgtgtcccccgagcagctgtgcgacggcgtgcggcagtgtcccgacggctcggacgagggccccgacgcctgcggtgaggctcccgcgcccccggccatgcgcatgcgcggcccccctggccaagccggcgggcccacctcttcccgagcgccatccccaccttcgcctcctgaggcacaggtgggcgcggcagctagagtgatttaggtttgggggcatccgaggctgggccacgtttgcgttcctttgatctttttcgtgaaactttatttgaaaagtttttaccctcccacctaggcccaggagagcgaagaaaggggctttgtctttccccacacttggccaagaagggataagagggtgggcagaggctctgcggggatgaggagtgtgtctgtttggaggga

SEQ ID NO: 1462 - protein, 163 aa, Homo sapiens
MAKGLGPGRGAAAEVEGLPRARFGVGGRSPAEDPARTLPAAPPCGPFEFRCGSGECTPRGWRCDQEEDCADGSDERGCGGPCAPHHAPCARGPHCVSPEQLCDGVRQCPDGSDEGPDACGEAPAPPAMRMRGPPGQAGGPTSSRAPSPPSPPEAQVGAAARVI

SEQ ID NO: 1463 - DNA, 877 bp, Homo sapiens
  source (1)..(877)
  CDS (201)..(677)
ctgtattttctagcaattatgaatttgttatatatgatgatctggttcttggaacattcttgaatctattgtctctaaggcaggtgtgtacagcaagaagtgaataacacagaaatcaatgatgaaagcactagaagacaattgagtttatcagaactgcaaaatattgctgagtgtggattgctctgaaatctgaaaacatgacttgtgaattgcttctattcaaaatgcagacacaatcaatgccgggtgttggtttacttgtttcccattttgcaaccctcttttctaggcaaaaggtatccaaactatgcagagccacagaatctaacagatgtctctctattccttctcctagaactctcaggggatccagaactgcagctggtcctcgctgggctgttcctgtccatctgcctggtcatggtgctggggaactgctcatcatcctggccatcagccctgactcccacctccacacccccgtgtacttcttcctctccaacctgtccttgcctgacatcagtttcacctccaccacagtccccaagatgattgtggacatccaatctcacagcagagtcatctcctatgcaggctgcctgactcagatgtctctctttgtcatttttggaggcatggaagagaggcatgctcctgagtgtgatggcctatgactggtttgtagccatctgtcaccctctatatcattcagccatcatgaacccgtgtttctgtggctttcctagttttgttgtcttgttttttctcagtcttttagatgcccagctgcacaacttgattgccttacaagtgacctgcttcaaggatgtggaaattcctaatttcttctgtgacccttctcaactcccccatc

SEQ ID NO: 1464 - protein, 158 aa, Homo sapiens
MTCELLLFKMQTQSMPGVGLLVSHFATLFSRQKVSKLCRATESNRCLSIPSPRTLRGSRTAAGPRWAVPVHLPGHGAGELLIILAISPDSHLHTPVYFFLSNLSLPDISFTSTTVPKMIVDIQSHSRVISYAGCLTQMSLFVIFGGMEERHAPECDGL

SEQ ID NO: 1465 - DNA, 1423 bp, Homo sapiens
  source (1)..(1423)
  CDS (201)..(1223)
  modified_base (1039)..(1138): a, t, c, g, unknown or other
gaacctgttggagactaaagggacatgtgtatggagatgtaaccaagaaccggcacacgtagccatccttatgaactgacatgggaagagtggttggaggacagagaatgaacagtgcaaagactctgaggccgtgttcatctgctggaggagatctgtagaacataaaccagggaaacagagaggagttaggtcagcacatgaggtcactccctttatcccacgggttaactgagatggttttaaagacctcggttgtcaggggggttgatttgcatttggatagactttcctttgactataggagattgaacctacaggccacagttctcacttcatcttctcctccctcagcactccatagggttcctccctggtccttaaacacagtacctgcgaatcctgggcccatgccacccttctgggaagcgccaccctgggccaatcagagccgagcacgcgagctggagttcgtgctgctgggttttgcacacgtgccctcactacgcccgatgcttgcagcgctcttcctggcagccttcctgctcacaatgtcagggaactcgctcatcgtcttgctcaccagcctggacttcggcctccgcacgcccatgtacttcttcctgcgccaactggcgctggtagagatctgcttctcactggacgtggcaccccgcctgctggtgaccctgctgcagcctggacgtggggtgtcccccacgagctgtgccctgcagctgctccttgtgctgtcctgtgtcacatctgagtgcttccttctcatggtcatggcctgggatcgctttctggccatctgcaggccactgcgctatggcgccatcatgagcccgcagctgtgctacctgctagctactacctgctggctggcgggaatccctgtggcactcgtcttcaccatctggctctttaacttccccttctgtgggccacgtggcatccgacacttcttttgtgacatagcacctctgctgagcctggtgtgtgcagacaccagagttttcgaggccaatgtgtttgnnnnnnnnnnnnnnnnnnnnnnnnnnnnnnnnnnnnnnnnnnnnnnnnnnnnnnnnnnnnnnnnnnnnnnnnnnnnnnnnnnnnnnnnnnnnnnnnnnnntctttcatcttgcttcgcccatagtcgccatatgttgcaagtgagctgccagcgcaacatcgcaagcgcggcgaccaataggtgatgcttactgcgattaatcagcttcatcatcactgcactcccaaagtggctacgacatcactcgctgtttcgcgggtactgcctttgctggatatagcccggcgagcactgacgcggtgcagattgaagccgtgctgttcgtaaagttcaattacgcgcggtgcggtagaattgctgatcaccacttttgccccccgctgg

SEQ ID NO: 1466 - protein, 340 aa, Homo sapiens
  MOD_RES (280)..(313): Variable amino acid
MRSLPLSHGLTEMVLKTSVVRGVDLHLDRLSFDYRRLNLQATVLTSSSPPSALHRVPPWSLNTVPANPGPMPPFWEAPPWANQSRARELEFVLLGFAHVPSLRPMLAALFLAAFLLTMSGNSLIVLLTSLDFGLRTPMYFFLRQLALVEICFSLDVAPRLLVTLLQPGRGVSPTSCALQLLLVLSCVTSECFLLMVMAWDRFLAICRPLRYGAIMSPQLCYLLATTCWLAGIPVALVFTIWLFNFPFCGPRGIRHFFCDIAPLLSLVCADTRVFEANVFXXXXXXXXXXXXXXXXXXXXXXXXXXXXXXXXXXLSSCFAHSRHMLQVSCQRNIASAATNR

SEQ ID NO: 1467 - DNA, 916 bp, Homo sapiens
  source (1)..(916)
  CDS (201)..(716)
tggcagtcagccctgacttccacctccacacccccatgtacttcttcctctccaacctgtccttgcctgacatcggtttcacctccacacggtccccaagatgattgtggacatccagtctcacagcagagtcatctcctatgcaggctgcctgactcagatgtctctctttgccatttttggaggcatggaagagagacatgctcctgagcgtgatggcctacgaccagtttgtagccatctgtcaccctcccatatcgttcagccatcttgaacccgtgtttctgtggcttccaagatttgttgtccctgtttttttttctttttttttttttttcctcaggcttttagactcccagctgcataacttgattgccttacaaatgacctgcttcaaggatgtggaaatttctaatgtcttctgggaaccttctcaactcccccatcttgcatgttgtgacaccttcaccaggaacatcaacctgtatttccctgctgccgtattgggttttcttcccatctcggggacgcttttctcttactgtaaaattgtttcctccattctgagggtttcatcatcaggtgggaagtataaaccttctccacctgtgggtctcacctgtctgctgtttgctgattttatggaacaggcgttggagggtatctcggttcagatgtgtcatcttccccgagaaagagtgcagtggcctcagtgatgtatacggtggtcacccccatgctgaaccccttcatctacagcctgagaaacagggatatgaaaagtgtcctgcggcggccgcacagcagcacggtctaatctcaatatcttcttatctgttccattccttttgtagggtgggttaaaaaaggcagcaaggtcaaataagaatgacatcacagggtgaacacccactgc

SEQ ID NO: 1468 - protein, 171 aa, Homo sapiens
MLLSVMAYDQFVAICHPPISFSHLEPVFLWLPRFVVPVFFSFFFFFLRLLDSQLHNLIALQMTCFKDVEISNVFWEPSQLPHLACCDTFTRNINLYFPAAVLGFLPISGTLFSYCKIVSSILRVSSSGGKYKPSPPVGLTCLLFADFMEQALEGISVQMCHLPRERVQWPQ

SEQ ID NO: 1469 - DNA, 886 bp, Homo sapiens
  source (1)..(886)
  CDS (201)..(686)
aacagaaaaccatctctttcataggttgcctcctgcagatgtacttcttccactcactcggggtcacagaagccctagtcctcacagtgatggccattgacaggtgtgtagccatctgcaacccccttcgctatgcaatcactatgtccccttgactgtgcatccagctctccactggctcttgcatttttggcttcctcatgttactgccagagattgtgtgcatttccactcttccattctgtggcgccaaccaaattcatcaactcttttgtgactttgaacctgtgctgcagttagcctgcacagatacgtacataattctggttgaagatgtgatccgtgctatttccattctgacctctgtctctgtcatcacccttttctatttaagaatcatcacggtgatcctgaggattccctctggtgagagtcgtcagaaggctttcttcacatgtgcagcccacattgctattttcttgctgttttttggcagtgtgtcactcatgtatctgcgcttctctgtcacattcccaccattactggacaaggccattgcactgatgtttgctgtccttgccctacttttcaacccagtaatctatagtctgaggaacaaagatatgaaaaacgccaccaagaaaatcctctgttctcaaaagatgttcaatgcctctgggagctaatggagttcacacacacctcttcaaagaaatctcatcatctccttaagtttaaaatgctaacaaatcagtttttttaaattaccatgcactttttctttttttaacgaaattatttaaagacattttggcatgtattttcaaagtgaagtatctctttaatgatttttaatatgaataacaacagtactaagttttgtgtc

SEQ ID NO: 1470 - protein, 161 aa, Homo sapiens [sequence omitted]

SEQ ID NO: 1471 - DNA, 1078 bp, Homo sapiens
  source (1)..(1078)
  CDS (201)..(878)
  modified_base (541)..(640): a, t, c, g, unknown or other
ctgggcgaggccgaggaggctggcctccgcagccggacacggcccagcagccctgtgtgcaccaggtacagaggtgggacggcctgggtcggggtcagggtgaccaggtctggggtgctcctgagctggggccgaggtggccatctgcggttctgtgtggccccaggttctcctcaaacggcctgctctgggcactggccatgaaaatggccgtggaggagatcaacaacaagtcggatctgctgcccgggctgcgcctgggctacgacctctttgatacgtgctcggagcctgtggtggccatgaagcccagcctcatgttcctggccaaggcaggcagccgcgacatcgccgcctactgcaactacacgcagtaccagccccgtgtgctggctgtcatcgggccccactcgtcagagctcgccatggtcaccggcaagttcttcagcttcttcctcatgccccagtggggcgccccccaccatcacccacccccaaccaacccctgccccgtgggagccccttgtgtcaggagaatgcnnnnnnnnnnnnnnnnnnnnnnnnnnnnnnnnnnnnnnnnnnnnnnnnnnnnnnnnnnnnnnnnnnnnnnnnnnnnnnnnnnnnnnnnnnnnnnnnnnnngcggggcgcaggcgggcgggcgggtagcgccccgcgtccgagccccgggccgggccctgagcgcgcgggctccgcgccgccgccgcgccatggcggagaccaagattatctaccacatggacgaggaggagacgccgtacctggtcaagctgcccgtggcccccgagcgcgtcacgctggccgacttcaagaacgtgctcagcaaccggcccgtgcacgcctacaaattcttctttaagtccatggaccaggacttcgggtcagtcggccgcgaggcctgcgcgagcctggcgcgggctcgggggtcgcacctgcccgcgcggggacggggcgggggtcctgagccgttcgcgcccccggggacctgcgaccgcgacgcgcctccgctagatgcggcgcgggtggcggcctcggcccgtgtgcggcgcgcgcccacct

SEQ ID NO: 1472 - protein, 225 aa, Homo sapiens
  MOD_RES (114)..(147): Variable amino acid
MKMAVEEINNKSDLLPGLRLGYDLFDTCSEPVVAMKPSLMFLAKAGSRDIAAYCNYTQYQPRVLAVIGPHSSELAMVTGKFFSFFLMPQWGAPHHHPPPTNPCPVGAPCVRRMXXXXXXXXXXXXXXXXXXXXXXXXXXXXXXXXXXRGAGGRAGSAPRPSPGPGPERAGSAPPPRHGGDQDYLPHGRGGDAVPGQAARGPRARHAGRLQERAQQPARARLQILL

SEQ ID NO: 1473 - DNA, 853 bp, Homo sapiens
  source (1)..(853)
  CDS (201)..(653)
  modified_base (1)..(123): a, t, c, g, unknown or other
nnnnnnnnnnnnnnnnnnnnnnnnnnnnnnnnnnnnnnnnnnnnnnnnnnnnnnnnnnnnnnnnnnnnnnnnnnnnnnnnnnnnnnnnnnnnnnnnnnnnnnnnnnnnnnnnnnnnnnnnnnnccaatgctaccttggcagccagtgcctggctaactgccctcctcctgcccatcccagcagtagtaaggacctcccagatggcatataacagcattgcctacatctaccactgcttctgtgatcatctggctgtggtccaggcctcctgctctgacaccaccccccagaccctcatgggcttctgcatcgccatggtggtgtccttcctcccccttctcctggtgcttctctcctatgtccacatcctggcctcagtgcttcgcatcagttccctagaaggacgggcaaaagccttctccacctgcagctcccaccttctggtcgtgggcacctactactcatctattgccatagcctacgtggcctacagggctgacctgccccttgacttccatatcatgggcaatgtggtatatgccattctcacaccaattctcaaccccctcatttacacgctgagaaacagggatgtaaaggcagccatcaccaaaatcatgtctcaagacccaggctgtgacaggagcatttgacctttaaatgcagctaactctgcttccaggacaccaaataacagtgcttagcacagagaaaggactcaatacatgataatgaaataatgttaatttttattggaatcttaagttgttgtataaaattttactacttagtaattcaagaaacctttactaaaataaaaaaaaaatcttcatggcaaaaaattcttaaaagc

SEQ ID NO: 1474 - protein, 150 aa, Homo sapiens
MAYNSIAYIYHCFCDHLAVVQASCSDTTPQTLMGFCIAMVVSFLPLLLVLLSYVHILASVLRISSLEGRAKAFSTCSSHLLVVGTYYSSIAIAYVAYRADLPLDFHIMGNVVYAILTPILNPLIYTLRNRDVKAAITKIMSQDPGCDRSI

SEQ ID NO: 1475 - DNA, 853 bp, Homo sapiens
  source (1)..(853)
  CDS (201)..(653)
ctgctttatccaatttcactttttcattgcactggtgattacagattattatatgctcacagtgatggcttatgaccgctacatggccatctgcaagcccttgttatatggaagcaaaatgaccaggtgtgtctgcctctgtctcgctgctgctccctatatttatggctttgcaaatggtctaagcacagaccaccctgatgcttcgtctgtccttctgtggacccaatgacatcaaccacttttactgtgcggacccacccctcttagtcctcgcctgctcagatacttatgtcaaagagaccgccatgttggtggtggctggttccaacctcatttgctctctcaccgtcatcctcatttcctacactttcatcttcactgccattctgcgtatccacactgctgaggggaggcgcaaggccttctccacctgcgggtctcatgtgaccgctgtcactgtcttctatgggacactgttctgcatgtacctgaggcccccttctgagacatctatacaacaggggaaaattgtagctgttttttatatctttgtgagtccgatgttaaacccattgatctacagcctgaggaataaagacgttaaaagaagtataaggaaagttattcaaaagaaactgtttgctaagtaaggtagatattttggtcataggtgttggaatctgttcttattatctgaccaattaatgaacatttaaaattaacaaatcaatctgtcattgagtgttttttgtcctttgtaatttgcatatgggacttaaaagtgtatgtcaaattattagctagagcttacactgccacctcagtaaattgaaaatgaaagcatagaaat

SEQ ID NO: 1476 - protein, 150 aa, Homo sapiens [sequence omitted]

SEQ ID NO: 1477 - DNA, 1009 bp, Homo sapiens
  source (1)..(1009)
  CDS (201)..(809)
tagattctaggcttcaaacacccatgtactttttcctaaggcatctggctttcattgatcttggttattcaacagcagtgggacccaaaatgctagtaaactttgttgtagatcaacatataatctcctataattagtgtgctacccaactcactttcttcagtatatttatcagtagtgaaattttcattctgtcagcaatggcctatgaacgctatgtggccatttgtaaccctctgctctatatgatcatcatgtcacaaagggcatgtcaaattctagtggcaataccttatctctacagtgtctttttgactttgctgacagtcacaaaaatgtttacctcatcattttgtggctataacatcatcaagcatttctactgtgatagtctgccattgatatctttgctctgttcagacacagaagacattaaattgataattttaatcttttcagcttttaatttgatttcatctcttctgatagtccttgtgtcttacattctgatccttgtcgccgtcctcaggatgaattctgcagaaggcaggtacaaggccttctccacctgtggaactcacctgacagtgataactgtattttatggcaccttcttctttatgtatgttcaccccaaatccagtcattcacttgatattgacaaaatggcctctttattttatactttgataacacctatgttgaatccaatgatctacagtttgaggaataaagagataaaaaatgctctacgtagaacctggaaaatatgtgcaaatcatctatttaaaattcattgtaggttatgataacaataaattatgcaataacaaatagatactcaaactaatattgctttacatttgtattgttgcctccatgtgatgagcaagaatcagtgtgtgataagcacagaaatagataattttattaattacctttaaataaaaatctatcactaacagatgactaattcctactcatactttaactattaatcaatattcag

SEQ ID NO: 1478 - protein, 202 aa, Homo sapiens [sequence omitted]

SEQ ID NO: 1479 - DNA, 1243 bp, Homo sapiens
  source (1)..(1243)
  CDS (201)..(1043)
  modified_base (218)..(317): a, t, c, g, unknown or other
  modified_base (381): a, t, c, g, unknown or other
  modified_base (618): a, t, c, g, unknown or other
  modified_base (731): a, t, c, g, unknown or other
  modified_base (805): a, t, c, g, unknown or other
  modified_base (831): a, t, c, g, unknown or other
  modified_base (896)..(897): a, t, c, g, unknown or other
  modified_base (900): a, t, c, g, unknown or other
aatcagcagggcgtggtggcgtgcacctgtagtcccagctactcaggaggctgaggcaggagaatcgcttgaacctgggaggcggagattgcagtgagccgagatcaggtcactgcactccagcctgggcgacggagcgagactccgtctcaaaacaaacaaacaaaaaacaccaataaagctcgcttttagaatcacaaatggtacctactagtgcnnnnnnnnnnnnnnnnnnnnnnnnnnnnnnnnnnnnnnnnnnnnnnnnnnnnnnnnnnnnnnnnnnnnnnnnnnnnnnnnnnnnnnnnnnnnnnnnnnnnatggtttttttgagtatggagagtaggggaaagaagggggggagagaggggaggggagaggagngagcgggagcaggaacaggcacgacagaggggaagcgaggcacgaaaaaaggagcagggcgacaggagcaagaggagggaagcgagcagacgcacacaagaaggaaggagagagagagaggagaggggagggagagaaaaggggaggaggaggaggagagcggcgggcgagagggaggggaggagcaaagagaagcgagagagaggagagacaggcaacagagcgaggggccggcgngaggagggagcggccaacgcggcaggggccagcggacccagcaaggagaaagaaggggagaaagagggcgggggggccggcgagcggccggggggggggggggggggggaaanaaaaggaaagaaaacggaggaggacagccgggggaggggcagggagggacaacaaaaaccagggcagggggcgntggggccggccgcaaaccacccaagngagggcaggagggtcagggcatgagcgcaccacgaccagagcctgagggaggggcaagaagtctnngangcgcggggggcggggcgggcacggggcgcggagacagagtctcactctgtcacccaggctggagtgcagtggcacgatctcggctcactgcaacttccgcctcctgggttcaagcgattctcctgcctcagcctcctgagtagctgggactacaggcgtgcaccaccacaccaggctaatattttgtattttagtagaggcagggtttcaccgtgttgcccaggcttgtcttgaattcctgagctcaggtaatccgcctgccttggcctcccaaagtgttaggattacaggcgtgagccaccacgctggctaagttgtgccaatatttctaagagaacgggtg

SEQ ID NO: 1480 - protein, 280 aa, Homo sapiens
  MOD_RES (6)..(39): Variable amino acid
  MOD_RES (61): Variable amino acid
  MOD_RES (140): Variable amino acid
  MOD_RES (177): Variable amino acid
  MOD_RES (202): Variable amino acid
  MOD_RES (211): Variable amino acid
  MOD_RES (232)..(234): Variable amino acid
MVPTSXXXXXXXXXXXXXXXXXXXXXXXXXXXXXXXXXXMVFLSMESRGKKGGREGRGEEXAGAGTGTTEGKRGTKKGAGRQEQEEGSEQTHTRRKERERGEGRERKGEEEEESGGREGGEEQREARERRDRQQSEGPAXGGSGQRGRGQRTQQGERRGERGRGGRRAAGGGGGGGXKRKENGGGQPGEGQGGTTKTRAGGXGAGRKPPKXGQEGQGMSAPRPEPEGGARSXXXAGGGAGTGRGDRVSLCHPGWSAVARSRLTATSASWVQAILLPQPPE

SEQ ID NO: 1481 - DNA, 5452 bp, Homo sapiens
  source
  (1)..(5452)
  CDS (201)..(5252)
  modified_base (1)..(140): a, t, c, g, unknown or other
  modified_base (145): a, t, c, g, unknown or other
  modified_base (147)..(148): a, t, c, g, unknown or other
  modified_base (162): a, t, c, g, unknown or other
  modified_base (165): a, t, c, g, unknown or other
  modified_base (168): a, t, c, g, unknown or other
  modified_base (172): a, t, c, g, unknown or other
  modified_base (189): a, t, c, g, unknown or other
  modified_base (191)..(193): a, t, c, g, unknown or other
  modified_base (196): a, t, c, g, unknown or other
  modified_base (199): a, t, c, g, unknown or other
  modified_base (214): a, t, c, g, unknown or other
  modified_base (218): a, t, c, g, unknown or other
  modified_base (221): a, t, c, g, unknown or other
  modified_base (225)..(226): a, t, c, g, unknown or other
  modified_base (229): a, t, c, g, unknown or other
  modified_base (232): a, t, c, g, unknown or other
  modified_base (235)..(236): a, t, c, g, unknown or other
  modified_base (246): a, t, c, g, unknown or other
  modified_base (248)..(252): a, t, c, g, unknown or other
  modified_base (256)..(257): a, t, c, g, unknown or other
  modified_base (261)..(263): a, t, c, g, unknown or other
  modified_base (265)..(266): a, t, c, g, unknown or other
  modified_base (271)..(273): a, t, c, g, unknown or other
  modified_base (276)..(277): a, t, c, g, unknown or other
  modified_base (283)..(285): a, t, c, g, unknown or other
  modified_base (296): a, t, c, g, unknown or other
  modified_base (298)..(300): a, t, c, g, unknown or other
  modified_base (302): a, t, c, g, unknown or other
  modified_base (307): a, t, c, g, unknown or other
  modified_base (314)..(315): a, t, c, g, unknown or other
  modified_base (334): a, t, c, g, unknown or other
  modified_base (339): a, t, c, g, unknown or other
  modified_base (343): a, t, c, g, unknown or other
  modified_base (345)..(348): a, t, c, g, unknown or other
  modified_base (351)..(352): a, t, c, g, unknown or other
  modified_base (357): a, t, c, g, unknown or other
  modified_base (359): a, t, c, g, unknown or other
  modified_base (362): a, t, c, g, unknown or other
  modified_base (365): a, t, c, g, unknown or other
  modified_base (367)..(368): a, t, c, g, unknown or other
  modified_base (370)..(373): a, t, c, g, unknown or other
  modified_base (376)..(378): a, t, c, g, unknown or other
  modified_base (380)..(381): a, t, c, g, unknown or other
  modified_base (386)..(390): a, t, c, g, unknown or other
  modified_base (392)..(397): a, t, c, g, unknown or other
  modified_base (401)..(403): a, t, c, g, unknown or other
  modified_base (413)..(415): a, t, c, g, unknown or other
  modified_base (420)..(421): a, t, c, g, unknown or other
  modified_base (424)..(429): a, t, c, g, unknown or other
  modified_base (433): a, t, c, g, unknown or other
  modified_base (436)..(437): a, t, c, g, unknown or other
  modified_base (449): a, t, c, g, unknown or other
  modified_base (451)..(452): a, t, c, g, unknown or other
  modified_base (458)..(459): a, t, c, g, unknown or other
  modified_base (461): a, t, c, g, unknown or other
  modified_base (463)..(465): a, t, c, g, unknown or other
  modified_base (468)..(469): a, t, c, g, unknown or other
  modified_base (471)..(475): a, t, c, g, unknown or other
  modified_base (480)..(484): a, t, c, g, unknown or other
  modified_base (487): a, t, c, g, unknown or other
  modified_base (493): a, t, c, g, unknown or other
  modified_base (498)..(501): a, t, c, g, unknown or other
  modified_base (503)..(504): a, t, c, g, unknown or other
  modified_base (512): a, t, c, g, unknown or other
  modified_base (517): a, t, c, g, unknown or other
  modified_base (521)..(524): a, t, c, g, unknown or other
  modified_base (528)..(531): a, t, c, g, unknown or other
  modified_base (535)..(538): a, t, c, g, unknown or other
  modified_base (542): a, t, c, g, unknown or other
  modified_base (545)..(547): a, t, c, g, unknown or other
  modified_base (549)..(551): a, t, c, g, unknown or other
  modified_base (553)..(556): a, t, c, g, unknown or other
  modified_base (559)..(564): a, t, c, g, unknown or other
  modified_base (569): a, t, c, g, unknown or other
  modified_base (571)..(572): a, t, c, g, unknown or other
  modified_base (580): a, t, c, g, unknown or other
  modified_base (584): a, t, c, g, unknown or other
  modified_base (586): a, t, c, g, unknown or other
  modified_base (590)..(591): a, t, c, g, unknown or other
  modified_base (593)..(594): a, t, c, g, unknown or other
  modified_base (598)..(600): a, t, c, g, unknown or other
  modified_base (603)..(604): a, t, c, g, unknown or other
  modified_base (606)..(610): a, t, c, g, unknown or other
  modified_base (612): a, t, c, g, unknown or other
  modified_base (616)..(618): a, t, c, g, unknown or other
  modified_base (621)..(622): a, t, c, g, unknown or other
  modified_base (625)..(626): a, t, c, g, unknown or other
  modified_base (639): a, t, c, g, unknown or other
  modified_base (641): a, t, c, g, unknown or other
  modified_base (646)..(647): a, t, c, g, unknown or other
  modified_base (649): a, t, c, g, unknown or other
  modified_base (660)..(664): a, t, c, g, unknown or other
  modified_base (666): a, t, c, g, unknown or other
  modified_base (698)..(699): a, t, c, g, unknown or other
  modified_base (701): a, t, c, g, unknown or other
  modified_base (712): a, t, c, g, unknown or other
  modified_base (718): a, t, c, g, unknown or other
  modified_base (721): a, t, c, g, unknown or other
  modified_base (734): a, t, c, g, unknown or other
  modified_base (749)..(751): a, t, c, g, unknown or other
  modified_base (755)..(756): a, t, c, g, unknown or other
  modified_base (758): a, t, c, g, unknown or other
  modified_base (760)..(763): a, t, c, g, unknown or other
  modified_base (766): a, t, c, g, unknown or other
  modified_base (774)..(775): a, t, c, g, unknown or other
  modified_base (787): a, t, c, g, unknown or other
  modified_base (792)..(793): a, t, c, g, unknown or other
  modified_base (795): a, t, c, g, unknown or other
  modified_base (799)..(802): a, t, c, g, unknown or other
  modified_base (808)..(810): a, t, c, g, unknown or other
  modified_base (817): a, t, c, g, unknown or other
  modified_base (825)..(826): a, t, c, g, unknown or other
  modified_base (832): a, t, c, g, unknown or other
  modified_base (846): a, t, c, g, unknown or other
  modified_base (860)..(861): a, t, c, g, unknown or other
  modified_base (865): a, t, c, g, unknown or other
  modified_base (878)..(883): a, t, c, g, unknown or other
  modified_base (905)..(906): a, t, c, g, unknown or other
  modified_base (916)..(917): a, t, c, g, unknown or other
  modified_base (944)..(946): a, t, c, g, unknown or other
  modified_base (967): a, t, c, g, unknown or other
  modified_base (982)..(984): a, t, c, g, unknown or other
  modified_base (1006)..(1007): a, t, c, g, unknown or other
  modified_base (1011)..(1017): a, t, c, g, unknown or other
  modified_base (1033): a, t, c, g, unknown or other
  modified_base (1085): a, t, c, g, unknown or other
  modified_base (1119)..(1122): a, t, c, g, unknown or other
  modified_base (1166): a, t, c, g, unknown or other
  modified_base (1183)..(1184): a, t, c, g, unknown or other
  modified_base (1200)..(1201): a, t, c, g, unknown or other
  modified_base (1203)..(1204): a, t, c, g, unknown or other
  modified_base (1216)..(1218): a, t, c, g, unknown or other
  modified_base (1226): a, t, c, g, unknown or other
  modified_base (1228): a, t, c, g, unknown or other
  modified_base (1234)..(1333): a, t, c, g, unknown or other
  modified_base (1336): a, t, c, g, unknown or other
  modified_base (1339): a, t, c, g, unknown or other
  modified_base (1351)..(1353): a, t, c, g, unknown or other
  modified_base (1355): a, t, c, g, unknown or other
  modified_base (1371): a, t, c, g, unknown or other
  modified_base (1374): a, t, c, g, unknown or other
  modified_base (1377): a, t, c, g, unknown or other
  modified_base (1379): a, t, c, g, unknown or other
  modified_base (1388): a, t, c, g, unknown or other
  modified_base (1400)..(1401): a, t, c, g, unknown or other
  modified_base (1404): a, t, c, g, unknown or other
  modified_base (1407)..(1408): a, t, c, g, unknown or other
  modified_base (1410)..(1412): a, t, c, g, unknown or other
  modified_base (1414): a, t, c, g, unknown or other
  modified_base (1424): a, t, c, g, unknown or other
  modified_base (1429): a, t, c, g, unknown or other
  modified_base (1432): a, t, c, g, unknown or other
  modified_base (1434): a, t, c, g, unknown or other
  modified_base (1440)..(1443): a, t, c, g, unknown or other
  modified_base (1445): a, t, c, g, unknown or other
  modified_base (1451)..(1452): a, t, c, g, unknown or other
  modified_base (1454): a, t, c, g, unknown or other
  modified_base (1458): a, t, c, g, unknown or other
  modified_base (1464)..(1467): a, t, c, g, unknown or other
  modified_base (1470): a, t, c, g, unknown or other
  modified_base (1480): a, t, c, g, unknown or other
  modified_base (1488): a, t, c, g, unknown or other
  modified_base (1492)..(1493): a, t, c, g, unknown or other
  modified_base (1495): a, t, c, g, unknown or other
  modified_base (1501): a, t, c, g, unknown or other
  modified_base (1515): a, t, c, g, unknown or other
  modified_base (1522): a, t, c, g, unknown or other
  modified_base (1524)..(1527): a, t, c, g, unknown or other
  modified_base (1533)..(1534): a, t, c, g, unknown or other
  modified_base (1546)..(1547): a, t, c, g, unknown or other
  modified_base (1563): a, t, c, g, unknown or other
  modified_base (1565)..(1568): a, t, c, g, unknown or other
  modified_base (1570): a, t, c, g, unknown or other
  modified_base (1575): a, t, c, g, unknown or other
  modified_base (1587)..(1588): a, t, c, g, unknown or other
  modified_base (1604): a, t, c, g, unknown or other
  modified_base (1606)..(1609): a, t, c, g, unknown or other
  modified_base (1611): a, t, c, g, unknown or other
  modified_base (1615)..(1617): a, t, c, g, unknown or other
  modified_base (1643): a, t, c, g, unknown or other
  modified_base (1646)..(1647): a, t, c, g, unknown or other
  modified_base (1654)..(1655): a, t, c, g, unknown or other
  modified_base (1663)..(1664): a, t, c, g, unknown or other
  modified_base (1667)..(1668): a, t, c, g, unknown or other
  modified_base (1684)..(1685): a, t, c, g, unknown or other
  modified_base (1689): a, t, c, g, unknown or other
  modified_base (1691): a, t, c, g, unknown or other
  modified_base (1695)..(1696): a, t, c, g, unknown or other
  modified_base (1708)..(1709): a, t, c, g, unknown or other
  modified_base (1724): a, t, c, g, unknown or other
  modified_base (1727): a, t, c, g, unknown or other
  modified_base (1729)..(1730): a, t, c, g, unknown or other
  modified_base (1732): a, t, c, g, unknown or other
  modified_base (1736)..(1737): a, t, c, g, unknown or other
  modified_base (1739): a, t, c, g, unknown or other
  modified_base (1746): a, t, c, g, unknown or other
  modified_base (1749)..(1753): a, t, c, g, unknown or other
  modified_base (1755)..(1765): a, t, c, g, unknown or other
  modified_base (1767): a, t, c, g, unknown or other
  modified_base (1776)..(1781): a, t, c, g, unknown or other
  modified_base (1785): a, t, c, g, unknown or other
  modified_base (1788)..(1789): a, t, c, g, unknown or other
  modified_base (1791)..(1792): a, t, c, g, unknown or other
  modified_base (1794): a, t, c, g, unknown or other
  modified_base (1800): a, t, c, g, unknown or other
  modified_base (1804)..(1805): a, t, c, g, unknown or other
  modified_base (1821)..(1823): a, t, c, g, unknown or other
  modified_base (1825)..(1829): a, t, c, g, unknown or other
  modified_base (1837)..(1839): a, t, c, g, unknown or other
  modified_base (1843)..(1844): a, t, c, g, unknown or other
  modified_base (1846): a, t, c, g, unknown or other
  modified_base (1851)..(1853): a, t, c, g, unknown or other
  modified_base (1857)..(1858): a, t, c, g, unknown or other
  modified_base (1862): a, t, c, g, unknown or other
  modified_base (1880)..(1881): a, t, c, g, unknown or other
  modified_base (1884)..(1885): a, t, c, g, unknown or other
  modified_base (1886)..(1889): a, t, c, g, unknown or other
  modified_base (1893)..(1894): a, t, c, g, unknown or other
  modified_base (1896): a, t, c, g, unknown or other
  modified_base (1912): a, t, c, g, unknown or other
  modified_base (1917)..(1920): a, t, c, g, unknown or other
  modified_base (1927): a, t, c, g, unknown or other
  modified_base (1942): a, t, c, g, unknown or other
  modified_base (1947): a, t, c, g, unknown or other
  modified_base (1953)..(1956): a, t, c, g, unknown or other
  modified_base (1959): a, t, c, g, unknown or other
  modified_base (1964)..(1965): a, t, c, g, unknown or other
  modified_base (1977): a, t, c, g, unknown or other
  modified_base (1989)..(1990): a, t, c, g, unknown or other
  modified_base (1994)..(1995): a, t, c, g, unknown or other
  modified_base (2002)..(2004): a, t, c, g, unknown or other
  modified_base (2019): a, t, c, g, unknown or other
  modified_base (2031): a, t, c, g, unknown or other
  modified_base (2037): a, t, c, g, unknown or other
  modified_base (2042): a, t, c, g, unknown or other
  modified_base (2044): a, t, c, g, unknown or other
  modified_base (2049): a, t, c, g, unknown or other
  modified_base (2071)..(2072): a, t, c, g, unknown or other
  modified_base (2076): a, t, c, g, unknown or other
  modified_base (2090)..(2091): a, t, c, g, unknown or other
  modified_base (2093): a, t, c, g, unknown or other
  modified_base (2099)..(2101): a, t, c, g, unknown or other
  modified_base (2115): a, t, c, g, unknown or other
  modified_base (2121): a, t, c, g, unknown or other
  modified_base (2133)..(2134): a, t, c, g, unknown or other
  modified_base (2142)..(2143): a, t, c, g, unknown or other
  modified_base (2152): a, t, c, g, unknown or other
  modified_base (2167)..(2168): a, t, c, g, unknown or other
  modified_base (2189)..(2190): a, t, c, g, unknown or other
  modified_base (2200)..(2201): a, t, c, g, unknown or other
  modified_base (2205)..(2206): a, t, c, g, unknown or other
  modified_base (2208): a, t, c, g, unknown or other
  modified_base (2228)..(2229): a, t, c, g, unknown or other
  modified_base (2244): a, t, c, g, unknown or other
  modified_base (2247): a, t, c, g, unknown or other
  modified_base (2253): a, t, c, g, unknown or other
  modified_base (2255): a, t, c, g, unknown or other
  modified_base (2259): a, t, c, g, unknown or other
  modified_base (2263)..(2264): a, t, c, g, unknown or other
  modified_base (2271): a, t, c, g, unknown or other
  modified_base (2278)..(2280): a, t, c, g, unknown or other
  modified_base (2305)..(2308): a, t, c, g, unknown or other
  modified_base (2322): a, t, c, g, unknown or other
  modified_base (2327): a, t, c, g, unknown or other
  modified_base (2361): a, t, c, g, unknown or other
  modified_base (2369)..(2370): a, t, c, g, unknown or other
  modified_base (2390): a, t, c, g, unknown or other
  modified_base (2392): a, t, c, g, unknown or other
  modified_base (2430)..(2529): a, t, c, g, unknown or other
  modified_base (2535)..(2537): a, t, c, g, unknown or other
  modified_base (2550)..(2551): a, t, c, g, unknown or other
  modified_base (2553): a, t, c, g, unknown or other
  modified_base (2556)..(2559): a, t, c, g, unknown or other
  modified_base (2561)..(2566): a, t, c, g, unknown or other
  modified_base (2570)..(2572): a, t, c, g, unknown or other
  modified_base (2575): a, t, c, g, unknown or other
  modified_base (2580)..(2581): a, t, c, g, unknown or other
  modified_base (2600): a, t, c, g, unknown or other
  modified_base (2609): a, t, c, g, unknown or other
  modified_base (2611)..(2613): a, t, c, g, unknown or other
  modified_base (2618)..(2624): a, t, c, g, unknown or other
  modified_base (2627): a, t, c, g, unknown or other
  modified_base (2637)..(2639): a, t, c, g, unknown or other
  modified_base (2642): a, t, c, g, unknown or other
  modified_base (2646)..(2647): a, t, c, g, unknown or other
  modified_base (2650): a, t, c, g, unknown or other
  modified_base (2652)..(2658): a, t, c, g, unknown or other
  modified_base (2661)..(2668): a, t, c, g, unknown or other
  modified_base (2670): a, t, c, g, unknown or other
  modified_base (2673): a, t, c, g, unknown or other
  modified_base (2678)..(2679): a, t, c, g, unknown or other
  modified_base (2685)..(2688): a, t, c, g, unknown or other
  modified_base (2694)..(2695): a, t, c, g, unknown or other
  modified_base (2697)..(2702): a, t, c, g, unknown or other
  modified_base (2706)..(2711): a, t, c, g, unknown or other
  modified_base (2717)..(2720): a, t, c, g, unknown or other
  modified_base (2726)..(2729): a, t, c, g, unknown or other
  modified_base (2732): a, t, c, g, unknown or other
  modified_base (2737): a, t, c, g, unknown or other
  modified_base (2746)..(2747): a, t, c, g, unknown or other
  modified_base (2752)..(2780): a, t, c, g, unknown or other
  modified_base (2782)..(2784): a, t, c, g, unknown or other
  modified_base (2786): a, t, c, g, unknown or other
  modified_base (2788)..(2790): a, t, c, g, unknown or other
  modified_base (2792)..(2795): a, t, c, g, unknown or other
  modified_base (2798)..(2799): a, t, c, g, unknown or other
  modified_base (2802)..(2803): a, t, c, g, unknown or other
  modified_base (2809)..(2822): a, t, c, g, unknown or other
  modified_base (2840)..(2847): a, t, c, g, unknown or other
  modified_base (2850)..(2859): a, t, c, g, unknown or other
  modified_base (2862)..(2863): a, t, c, g, unknown or other
  modified_base (2866)..(2867): a, t, c, g, unknown or other
  modified_base (2872)..(2873): a, t, c, g, unknown or other
  modified_base (2878)..(2879): a, t, c, g, unknown or other
  modified_base (2887)..(2890): a, t, c, g, unknown or other
  modified_base (2899): a, t, c, g, unknown or other
  modified_base (2904)..(2905): a, t, c, g, unknown or other
  modified_base (2911): a, t, c, g, unknown or other
  modified_base (2917)..(2918): a, t, c, g, unknown or other
  modified_base (2920): a, t, c, g, unknown or other
  modified_base (2926)..(2929): a, t, c, g, unknown or other
  modified_base (2934)..(2935): a, t, c, g, unknown or other
  modified_base (2942)..(2946): a, t, c, g, unknown or other
  modified_base (2955): a, t, c, g, unknown or other
  modified_base (2957): a, t, c, g, unknown or other
  modified_base (2959)..(2960): a, t, c, g, unknown or other
  modified_base (2963): a, t, c, g, unknown or other
  modified_base (2978)..(2979): a, t, c, g, unknown or other
  modified_base (2987)..(2990): a, t, c, g, unknown or other
  modified_base (2992)..(2995): a, t, c, g, unknown or other
  modified_base (2998)..(2999): a, t, c, g, unknown or other
  modified_base (3002): a, t, c, g, unknown or other
  modified_base (3016)..(3018): a, t, c, g, unknown or other
  modified_base (3022): a, t, c, g, unknown or other
  modified_base (3027)..(3028): a, t, c, g, unknown or other
  modified_base (3030): a, t, c, g, unknown or other
  modified_base (3032)..(3034): a, t, c, g, unknown or other
  modified_base (3045)..(3046): a, t, c, g, unknown or other
  modified_base (3059)..(3061): a, t, c, g, unknown or other
  modified_base (3063)..(3064): a, t, c, g, unknown or other
  modified_base (3073): a, t, c, g, unknown or other
  modified_base (3075): a, t, c, g, unknown or other
  modified_base (3078)..(3079): a, t, c, g, unknown or other
  modified_base (3084)..(3085): a, t, c, g, unknown or other
  modified_base (3090)..(3093): a, t, c, g, unknown or other
  modified_base (3101)..(3103): a, t, c, g, unknown or other
  modified_base (3115): a, t, c, g, unknown or other
  modified_base (3118): a, t, c, g, unknown or other
  modified_base (3124)..(3127): a, t, c, g, unknown or other
  modified_base (3129): a, t, c, g, unknown or other
  modified_base (3132)..(3133): a, t, c, g, unknown or other
  modified_base (3136)..(3139): a, t, c, g, unknown or other
  modified_base (3143)..(3144): a, t, c, g, unknown or other
  modified_base (3146)..(3147): a, t, c, g, unknown or other
  modified_base (3156): a, t, c, g, unknown or other
  modified_base (3162): a, t, c, g, unknown or other
  modified_base (3170): a, t, c, g, unknown or other
  modified_base (3177)..(3179): a, t, c, g, unknown or other
  modified_base (3184): a, t, c, g, unknown or other
  modified_base (3195)..(3962): a, t, c, g, unknown or other
  modified_base (3968)..(3972): a, t, c, g, unknown or other
  modified_base (3988)..(3992): a, t, c, g, unknown or other
  modified_base (3994)..(3996): a, t, c, g, unknown or other
  modified_base (3999): a, t, c, g, unknown or other
  modified_base (4001): a, t, c, g, unknown or other
  modified_base (4016)..(4017): a, t, c, g, unknown or other
  modified_base (4022): a, t, c, g, unknown or other
  modified_base (4024)..(4025): a, t, c, g, unknown or other
  modified_base (4028): a, t, c, g, unknown or other
  modified_base (4031)..(4033): a, t, c, g, unknown or other
  modified_base (4036): a, t, c, g, unknown or other
  modified_base (4038): a, t, c, g, unknown or other
  modified_base (4040)..(4041): a, t, c, g, unknown or other
  modified_base (4044)..(4045): a, t, c, g, unknown or other
  modified_base (4049): a, t, c, g, unknown or other
  modified_base (4056): a, t, c, g, unknown or other
  modified_base (4058): a, t, c, g, unknown or other
  modified_base (4064): a, t, c, g, unknown or other
  modified_base (4068)..(4069): a, t, c, g, unknown or other
  modified_base (4071)..(4075): a, t, c, g, unknown or other
  modified_base (4079): a, t, c, g, unknown or other
  modified_base (4082)..(4084): a, t, c, g, unknown or other
  modified_base (4087)..(4091): a, t, c, g, unknown or other
  modified_base (4094)..(4095): a, t, c, g, unknown or other
  modified_base (4103): a, t, c, g, unknown or other
  modified_base (4105): a, t, c, g, unknown or other
  modified_base (4107)..(4109): a, t, c, g, unknown or other
  modified_base (4111)..(4113): a, t, c, g, unknown or other
  modified_base (4117): a, t, c, g, unknown or other
  modified_base (4121)..(4125): a, t, c, g, unknown or other
  modified_base (4128)..(4134): a, t, c, g, unknown or other
  modified_base (4137): a, t, c, g, unknown or other
  modified_base (4141)..(4142): a, t, c, g, unknown or other
  modified_base (4153)..(4156): a, t, c, g, unknown or other
  modified_base (4158)..(4159): a, t, c, g, unknown or other
  modified_base (4162): a, t, c, g, unknown or other
  modified_base (4164): a, t, c, g, unknown or other
  modified_base (4175)..(4182): a, t, c, g, unknown or other
  modified_base (4188)..(4193): a, t, c, g, unknown or other
  modified_base (4198)..(4203): a, t, c, g, unknown or other
  modified_base (4205)..(4210): a, t, c, g, unknown or other
  modified_base (4213)..(4220): a, t, c, g, unknown or other
  modified_base (4227)..(4228): a, t, c, g, unknown or other
  modified_base (4231)..(4232): a, t, c, g, unknown or other
  modified_base (4238): a, t, c, g, unknown or other
  modified_base (4241)..(4244): a, t, c, g, unknown or other
  modified_base (4257)..(4260): a, t, c, g, unknown or other
  modified_base (4265)..(4268): a, t, c, g, unknown or other
  modified_base (4275)..(4276): a, t, c, g, unknown or other
  modified_base (4280): a, t, c, g, unknown or other
  modified_base (4289)..(4290): a, t, c, g, unknown or other
  modified_base (4296): a, t, c, g, unknown or other
  modified_base (4299): a, t, c, g, unknown or other
  modified_base (4310): a, t, c, g, unknown or other
  modified_base (4315)..(4316): a, t, c, g, unknown or other
  modified_base (4322): a, t, c, g, unknown or other
  modified_base (4324)..(4327): a, t, c, g, unknown or other
  modified_base (4330)..(4332): a, t, c, g, unknown or other
  modified_base (4335)..(4340): a, t, c, g, unknown or other
  modified_base (4344): a, t, c, g, unknown or other
  modified_base (4347): a, t, c, g, unknown or other
  modified_base (4356): a, t, c, g, unknown or other
  modified_base (4361)..(4372): a, t, c, g, unknown or other
  modified_base (4380)..(4382): a, t, c, g, unknown or other
  modified_base (4386): a, t, c, g, unknown or other
  modified_base (4388)..(4389): a, t, c, g, unknown or other
  modified_base (4393)..(4396): a, t, c, g, unknown or other
  modified_base (4398): a, t, c, g, unknown or other
  modified_base (4404)..(4405): a, t, c, g, unknown or other
  modified_base (4407)..(4408): a, t, c, g, unknown or other
  modified_base (4424): a, t, c, g, unknown or other
  modified_base (4427)..(4432): a, t, c, g, unknown or other
  modified_base (4435): a, t, c, g, unknown or other
  modified_base (4439)..(4442): a, t, c, g, unknown or other
  modified_base (4458)..(4461): a, t, c, g, unknown or other
  modified_base (4463)..(4464): a, t, c, g, unknown or other
  modified_base (4466)..(4468): a, t, c, g, unknown or other
  modified_base (4472): a, t, c, g, unknown or other
  modified_base (4477): a, t, c, g, unknown or other
  modified_base (4488): a, t, c, g, unknown or other
  modified_base (4495): a, t, c, g, unknown or other
  modified_base (4497)..(4498): a, t, c, g, unknown or other
  modified_base (4501)..(4502): a, t, c, g, unknown or other
  modified_base (4504)..(4506): a, t, c, g, unknown or other
  modified_base (4510)..(4511): a, t, c, g, unknown or other
  modified_base (4517)..(4521): a, t, c, g, unknown or other
  modified_base (4538): a, t, c, g, unknown or other
  modified_base (4542): a, t, c, g, unknown or other
  modified_base (4544)..(4548): a, t, c, g, unknown or other
  modified_base (4550)..(4551): a, t, c, g, unknown or other
  modified_base (4560): a, t, c, g, unknown or other
  modified_base (4562)..(4564): a, t, c, g, unknown or other
  modified_base (4574): a, t, c, g, unknown or other
  modified_base (4578)..(4579): a, t, c, g, unknown or other
  modified_base (4580)..(4582): a, t, c, g, unknown or other
  modified_base (4590)..(4592): a, t, c, g, unknown or other
  modified_base (4594): a, t, c, g, unknown or other
  modified_base (4610)..(4612): a, t, c, g, unknown or other
  modified_base (4629)..(4631): a, t, c, g, unknown or other
  modified_base (4636)..(4637): a, t, c, g, unknown or other
  modified_base (4641)..(4642): a, t, c, g, unknown or other
  modified_base (4655)..(4656): a, t, c, g, unknown or other
  modified_base (4659)..(4660): a, t, c, g, unknown or other
  modified_base (4673): a, t, c, g, unknown or other
  modified_base (4677): a, t, c, g, unknown or other
  modified_base (4684): a, t, c, g, unknown or other
  modified_base (4686): a, t, c, g, unknown or other
  modified_base (4689)..(4691): a, t, c, g, unknown or other
  modified_base (4702)..(4703): a, t, c, g, unknown or other
  modified_base (4710)..(4711): a, t, c, g, unknown or other
  modified_base (4718): a, t, c, g, unknown or other
  modified_base (4723): a, t, c, g, unknown or other
  modified_base (4727)..(4729): a, t, c, g, unknown or other
  modified_base (4732)..(4734): a, t, c, g, unknown or other
  modified_base (4737)..(4739): a, t, c, g, unknown or other
  modified_base (4754): a, t, c, g, unknown or other
  modified_base (4759)..(4760): a, t, c, g, unknown or other
  modified_base (4772): a, t, c, g, unknown or other
  modified_base (4774)..(4777): a, t, c, g, unknown or other
  modified_base (4793)..(4795): a, t, c, g, unknown or other
  modified_base (4801)..(4803): a, t, c, g, unknown or other
  modified_base (4805): a, t, c, g, unknown or other
  modified_base (4819): a, t, c, g, unknown or other
  modified_base (4821): a, t, c, g, unknown or other
  modified_base (4833)..(4836): a, t, c, g, unknown or other
  modified_base (4838): a, t, c, g, unknown or other
  modified_base (4851)..(4852): a, t, c, g, unknown or other
  modified_base (4859)..(5211): a, t, c, g, unknown or other
  modified_base (5217)..(5222): a, t, c, g, unknown or other
  modified_base (5232): a, t, c, g, unknown or other
  modified_base (5239)..(5241): a, t, c, g, unknown or other
  modified_base (5244)..(5245): a, t, c, g, unknown or other
  modified_base (5248): a, t, c, g, unknown or other
  modified_base (5265): a, t, c, g, unknown or other
  modified_base (5272)..(5273): a, t, c, g, unknown or other
  modified_base (5275): a, t, c, g, unknown or other
  modified_base (5278)..(5281): a, t, c, g, unknown or other
  modified_base (5285): a, t, c, g, unknown or other
  modified_base (5287)..(5288): a, t, c, g, unknown or other
  modified_base (5303): a, t, c, g, unknown or other
  modified_base (5305): a, t, c, g, unknown or other
  modified_base (5307): a, t, c, g, unknown or other
  modified_base (5312): a, t, c, g, unknown or other
  modified_base (5315)..(5318): a, t, c, g, unknown or other
  modified_base (5322): a, t, c, g, unknown or other
  modified_base (5324)..(5325): a, t, c, g, unknown or other
  modified_base (5331)..(5332): a, t, c, g, unknown or other
  modified_base (5335): a, t, c, g, unknown or other
  modified_base (5338): a, t, c, g, unknown or other
  modified_base (5341)..(5353): a, t, c, g, unknown or other
  modified_base (5358)..(5363): a, t, c, g, unknown or other
  modified_base (5365)..(5369): a, t, c, g, unknown or other
  modified_base (5371): a, t, c, g, unknown or other
  modified_base (5375)..(5376): a, t, c, g, unknown or other
  modified_base (5380)..(5383): a, t, c, g, unknown or other
  modified_base (5395)..(5399): a, t, c, g, unknown or other
  modified_base (5404)..(5406): a, t, c, g, unknown or other
  modified_base (5416)..(5427): a, t, c, g, unknown or other
  modified_base (5429)..(5434): a, t, c, g, unknown or other
  modified_base (5438)..(5452): a, t, c, g, unknown or other
nnnnnnnnnnnnnnnnnnnnnnnnnnnnnnnnnnnnnnnnnnnnnnnnnnnnnnnnnnnnnnnnnnnnnnnnnnnnnnnnnnnnnnnnnnnnnnnnnnnnnnnnnnnnnnnnnnnnnnnnnnnnnnnnnnnnnnnnnnnnggggnanngcgggggggggggnggnttntaanatatgaggcccgtttgnannnccnaantatgtatgccattgnaccnccnaagnngtnggnaannggccgaaagngnnnnnagannatannnannagaannnagnnggggannnaagggagaggnannnangaaangggggannaaaaaaagagagggagggnaaaanagangnnnnggnnggagngnaanggngnnannnnagnnnannggaannnnngnnnnnnaggnnnaagggaaaannnggggnnagnnnnnngagnagnngggaaaaaaggngnnggggannangnnnggnnannnnngggannnnnagnagaganagggnnnngnnaggggggnagggngggnnnngaannnnggannnnaggngannngnnngnnnnagnnnnnnaaagngnngggaaaanaggnangagnnanngagnnnggnnannnnngnaaannnaannagnnaagaagaggggangnaggannanggggaaagggnnnnngngagaaaaggaaaagaggagaaaggggagggannanagggaggggangggaanggngaaagaagggaanagggggaaaaaaggnnngggnnangnnnnaanggaagagnnagagaagaggangaggnnangggnnnnggaaannnaaaaaanaaaaaaanngggggnaaagaaaagaaaanggggggggggaaanngggnggagaaagggggnnnnnnaagggaaagggaaaaggggggnnggagggggannaaaagggggggggaagggggggaaaannngaaaagggggaggaaaggaanaaaaaaggggaggannnggggggaagggagaaaaaaaanngggnnnnnnngggggaaagggggggnaaaaggggaaagaggggaagggggaaaaaaaggggggggggagggggggggnaagaaaaaaaaaggggggaagggaaaaaaagggnnnnaaaaaaaaaaagaagggagggggaaaaaggaagaaggggggganaaggggaaaagggaaannggagaggggaaaaggnnannggggggaaaaannnaaaagggngngggggnnnnnnnnnnnnnnnnnnnnnnnnnnnnnnnnnnnnnnnnnnnnnnnnnnnnnnnnnnnnnnnnnnnnnnnnnnnnnnnnnnnnnnnnnnnnnnnnnnnnganaancgaggggggggnnngntttttaaaactgaagnccnttngnaggtctaanctgatgctttgnnacnccnngnnntngggaaagggncgggnggngngggggnnnngngttggnngnggangggggnnnnggngagagggggngcgggggngggnngnggaagnagggggggaggganaaagggnannnngggggnngaggaaggaggnngggagggagggagggnannnngngggangaggaagggggnngggagagagaggaggnannnngngggnnnaggaaggagggggggagagagggggnaannagagggnngaggaagnnggnngggagggagagagggnnaaangngggnngaggaaggaggnngggagggagagaggngananngngggnngnaggaaanaannnnngnnnnnnnnnnngngaaaaaaannnnnnaagnaanngnngnaaaaanaggnnaaggggagaaaaaaannnannnnnaaaagggnnnaaannanaaaannnaagnngaanggagaaaggaaaaggagnngannnnnnaaannanagaagaaaaaaagggnggggnnnnaaaaagnaaggggggggggggnaaaangggagnnnnagngaaanngggggggagggngggaagaagggnnaagnnaaggagnnnaaggaggaagggagnaaagaagggggnaagaanggaananaaggnggggggaaagggggggagaaannaaanaaaaaagaaggagnngnaaaggnnnaaaaaaaagggaanaaaggnaggaaaaaaggnnaagggaannagggggganaaaaaaaaaaaaggnnggggaaaaaaaggggggaagnnaaaaaagaanngggnnanaaaaagggaggggggggggnnggaaaaaggaaaaanganggggananaaanaggnngggaaangggaaannnaaaggggggggggaaaaaaagaaannnnaaaggaggaggggnaaaanaaaagggggggagaggaaaaaaaaaaaaaggggnaaaaaagnnaaaagagggggaggaaaggnanaaaaaggggggaaaaaagggaaaaaaaaaggggaagannnnnnnnnnnnnnnnnnnnnnnnnnnnnnnnnnnnnnnnnnnnnnnnnnnnnnnnnnnnnnnnnnnnnnnnnnnnnnnnnnnnnnnnnnnnnnnnnnnnaggggnnnccgccgcgggggnngnggnnnngnnnnnngggnnnggnggtgnnccacgagggcgcaccgatnaccccacgnannnccctnnnnnnnttngggggggggnnnggnaggnnttngnnnnnnnggnnnnnnnngnggnggggnngtgggnnnnggtggnngnnnnnngggnnnnnngggggnnnngggggnnnnggnggggnggggggggnnggggnnnnnnnnnnnnnnnnnnnnnnnnnnnnngnnngngnnngnnnnggnnggnngggggnnnnnnnnnnnnnngggggggggggggggggnnnnnnnnggnnnnnnnnnnggnnggnnggggnnggggnngggggggnnnnggggggggnggggnngggggngggggnngngggggnnnnggggnnggggggnnnnnggggggggngngnnggnggggggggggggggnngggggggnnnngnnnnggnnggngggggggggggggnnngggnggggnngngnnnggggggggggnnggggggggggggnnngnnggggggggngnggnnggggnnggggnnnngggggggnnngggggggggggnggngggggnnnngnggnnggnnnngggnngnnggggggggngggggngggggggnggggggnnnggggnggggggggggnnnnnnnnnnnnnnnnnnnnnnnnnnnnnnnnnnnnnnnnnnnnnnnnnnnnnnnnnnnnnnnnnnnnnnnnnnnnnnnnnnnnnnnnnnnnnnnnnnnnnnnnnnnnnnnnnnnnnnnnnnnnnnnnnnnnnnnnnnnnnnnnnnnnnnnnnnnnnnnnnnnnnnnnnnnnnnnnnnnnnnnnnnnnnnnnnnnnnnnnnnnnnnnnnnnnnnnnnnnnnnnnnnnnnnnnnnnnnnnnnnnnnnnnnnnnnnnnnnnnnnnnnnnnnnnnnnnnnnnnnnnnnnnnnnnnnnnnnnnnnnnnnnnnnnnnnnnnnnnnnnnnnnnnnnnnnnnnnnnnnnnnnnnnnnnnnnnnnnnnnnnnnnnnnnnnnnnnnnnnnnnnnnnnnnnnnnnnnnnnnnnnnnnnnnnnnnnnnnnnnnnnnnnnnnnnnnnnnnnnnnnnnnnnnnnnnnnnnnnnnnnnnnnnnnnnnnnnnnnnnnnnnnnnnnnnnnnnnnnnnnnnnnnnnnnnnnnnnnnnnnnnnnnnnnnnnnnnnnnnnnnnnnnnnnnnnnnnnnnnnnnnnnnnnnnnnnnnnnnnnnnnnnnnnnnnnnnnnnnnnnnnnnnnnnnnnnnnnnnnnnnnnnnnnnnnnnnnnnnnnnnnnnnnnnnnnnnnnnnnnnnnnnnnnnnnnnnnnnnnnnnnnnnnnnnnnnnnnnnnnnnnnnnnnnnnnnnnnnnnnnnnnnnnnnnnnnnnnnnnnnnnnnnnnnnnnnnnnnnnnnnnnnnnaggggnnnnntgagggggggagggannnnngnnnttntnaaaaaaattgaaagnnccccntnncgngannntcntnannaanngatngcaattngnaacccnccgnngnnnnntttnggnnnaannnnnccnngggggggngngnnngnnngggngggnnnnnggnnnnnnnggngggnnggggggggggnnnngnnggngnggggggggggnnnnnnnngggggnnnnnnggggnnnnnngnnnnnnggnnnnnnnnggggggnnggnngggggnggnnnnggggggggggggnnnnggggnnnnggggggnngggnggggggggnngggggnggnggggggggggnggggnngggggngnnnnggnnnggnnnnnngggnggnggggggggnggggnnnnnnnnnnnngggggggnnngggngnngggnnnngngggggnngnngggggggggggggggnggnnnnnnggngggnnnngggggggggggggggnnnngnngnnngggnggggnggggggggggnggggggngnnggnngnnngggnngggggnnnnnggggggggggggggggngggngnnnnngnnggggggggngnnngggggggggngggnnnnngggggggnnngngggggggggggggggnnnggggggggggggaaaannnggggnngggnnggggggggggggnnggnnggggggggggggngggnggggggngnggnnnggggggggggnnggggggnnggggggnggggngggnnnggnnnggnnnggggggggggggggnggggnngggggggggggngnnnngggggggggggggggnnngggggnnngngggggggggggggngngggggggggggnnnngnggggggggggggnnggggggnnnnnnnnnnnnnnnnnnnnnnnnnnnnnnnnnnnnnnnnnnnnnnnnnnnnnnnnnnnnnnnnnnnnnnnnnnnnnnnnnnnnnnnnnnnnnnnnnnnnnnnnnnnnnnnnnnnnnnnnnnnnnnnnnnnnnnnnnnnnnnnnnnnnnnnnnnnnnnnnnnnnnnnnnnnnnnnnnnnnnnnnnnnnnnnnnnnnnnnnnnnnnnnnnnnnnnnnnnnnnnnnnnnnnnnnnnnnnnnnnnnnnnnnnnnnnnnnnnnnnnnnnnnnnnnnnnnnnnnnnnnnnnnnnnnnnnnnnnnnnnnnnnnnnnnnnnnnnnnnnnnnnnnnnnnnnnnnnnnnnnnnnnnnnnnnnaggggnnnnnncgaggggggngagggannnggnnttnttaaacaaattgaaggnccccttnngnagnnnnctcnannttttgatggccattngnanccgcnggnnnntttngnnaaaggnnccnggnggnnnnnnnnnnnnnggttnnnnnngnnnnngngggnngggnnnngggggggggggnnnnnggggnnngggggggggnnnnnnnnnnnngnnnnnngggnnnnnnnnnnnnnnn

SEQ ID NO: 1482 - protein, 1683 aa, Homo sapiens
  MOD_RES (5)..(7): Variable amino acid
  MOD_RES (9)..(12): Variable amino acid
  MOD_RES (16)..(19): Variable amino acid
  MOD_RES (21)..(22): Variable amino acid
  MOD_RES (24)..(26): Variable amino acid
  MOD_RES (28)..(29): Variable amino acid
  MOD_RES (32)..(34): Variable amino acid
  MOD_RES (36): Variable amino acid
  MOD_RES (38)..(39): Variable amino acid
  MOD_RES (45): Variable amino acid
  MOD_RES (47)..(51): Variable amino acid
  MOD_RES (53)..(68): Variable amino acid
  MOD_RES (71)..(72): Variable amino acid
  MOD_RES (74)..(79): Variable amino acid
  MOD_RES (83)..(84): Variable amino acid
  MOD_RES (86)..(92): Variable amino acid
  MOD_RES (94)..(96): Variable amino acid
  MOD_RES (98): Variable amino acid
  MOD_RES (100)..(102): Variable amino acid
  MOD_RES (104): Variable amino acid
  MOD_RES (106)..(108): Variable amino acid
  MOD_RES (110)..(124): Variable amino acid
  MOD_RES (127)..(142): Variable amino acid
  MOD_RES (147): Variable amino acid
  MOD_RES (149)..(150): Variable amino acid
  MOD_RES (154)..(156): Variable amino acid
  MOD_RES (166)..(167): Variable amino acid
  MOD_RES (171): Variable amino acid
  MOD_RES (173)..(174): Variable amino acid
  MOD_RES (178): Variable amino acid
  MOD_RES (183)..(189): Variable amino acid
  MOD_RES (192): Variable amino acid
  MOD_RES (196): Variable amino acid
  MOD_RES (198)..(201): Variable amino acid
  MOD_RES (203)..(204): Variable amino acid
  MOD_RES (206): Variable amino acid
  MOD_RES (209): Variable amino acid
  MOD_RES (211): Variable amino acid
  MOD_RES (216): Variable amino acid
  MOD_RES (220)..(222): Variable amino acid
  MOD_RES (226)..(228): Variable amino acid
  MOD_RES (235)..(236): Variable amino acid
  MOD_RES (239): Variable amino acid
  MOD_RES (248)..(249): Variable amino acid
  MOD_RES (256): Variable amino acid
  MOD_RES (261)..(262): Variable amino acid
  MOD_RES (269): Variable amino acid
  MOD_RES (271)..(273): Variable amino acid
  MOD_RES (278): Variable amino acid
  MOD_RES (295): Variable amino acid
  MOD_RES (307)..(308): Variable amino acid
  MOD_RES (322): Variable amino acid
  MOD_RES (328): Variable amino acid
  MOD_RES (334)..(335): Variable amino acid
  MOD_RES (339)..(340): Variable amino acid
  MOD_RES (342)..(343): Variable amino acid
  MOD_RES (345)..(380): Variable amino acid
  MOD_RES (384)..(385): Variable amino acid
  MOD_RES (391)..(393): Variable amino acid
  MOD_RES (396): Variable amino acid
  MOD_RES (400)..(405): Variable amino acid
  MOD_RES (408): Variable amino acid
  MOD_RES (410)..(412): Variable amino acid
  MOD_RES (414)..(415): Variable amino acid
  MOD_RES (417)..(418): Variable amino acid
  MOD_RES (420): Variable amino acid
  MOD_RES (422)..(424): Variable amino acid
  MOD_RES (427): Variable amino acid
  MOD_RES (430)..(432): Variable amino acid
  MOD_RES (434): Variable amino acid
  MOD_RES (439): Variable amino acid
  MOD_RES (441)..(443): Variable amino acid
  MOD_RES (445): Variable amino acid
  MOD_RES (449): Variable amino acid
  MOD_RES (455)..(457): Variable amino acid
  MOD_RES (459): Variable amino acid
  MOD_RES (463): Variable amino acid
  MOD_RES (468)..(473): Variable amino acid
  MOD_RES (481)..(483): Variable amino acid
  MOD_RES (485): Variable amino acid
  MOD_RES (488)..(490): Variable amino acid
  MOD_RES (495): Variable amino acid
  MOD_RES (497): Variable amino acid
  MOD_RES (499): Variable amino acid
  MOD_RES (503): Variable amino acid
  MOD_RES (508)..(513): Variable amino acid
  MOD_RES (516)..(523): Variable amino acid
  MOD_RES (526)..(527): Variable amino acid
  MOD_RES (529)..(532): Variable amino acid
  MOD_RES (534)..(535): Variable amino acid
  MOD_RES (541)..(543): Variable amino acid
  MOD_RES (546)..(549): Variable amino acid
  MOD_RES (551): Variable amino acid
  MOD_RES (553)..(554): Variable amino acid
  MOD_RES (560)..(563): Variable amino acid
  MOD_RES (565)..(566): Variable amino acid
  MOD_RES (571): Variable amino acid
  MOD_RES (573)..(574): Variable amino acid
  MOD_RES (576): Variable amino acid
  MOD_RES (581): Variable amino acid
  MOD_RES (583): Variable amino acid
  MOD_RES (585)..(589): Variable amino acid
  MOD_RES (593): Variable amino acid
  MOD_RES (597)..(599): Variable amino acid
  MOD_RES (601)..(602): Variable amino acid
  MOD_RES (607): Variable amino acid
  MOD_RES (611): Variable amino acid
  MOD_RES (613)..(615): Variable amino acid
  MOD_RES (617): Variable amino acid
  MOD_RES (624): Variable amino acid
  MOD_RES (626): Variable amino acid
  MOD_RES (630)..(631): Variable amino acid
  MOD_RES (633)..(634): Variable amino acid
  MOD_RES (639): Variable amino acid
  MOD_RES (641): Variable amino acid
  MOD_RES (645): Variable amino acid
  MOD_RES (648): Variable amino acid
  MOD_RES (651): Variable amino acid
  MOD_RES (656): Variable amino acid
  MOD_RES (663)..(664): Variable amino acid
  MOD_RES (667): Variable amino acid
  MOD_RES (669)..(670): Variable amino acid
  MOD_RES (676)..(677): Variable amino acid
  MOD_RES (682)..(683): Variable amino acid
  MOD_RES (685): Variable amino acid
  MOD_RES (687)..(688): Variable amino acid
  MOD_RES (691): Variable amino acid
  MOD_RES (693)..(694): Variable amino acid
  MOD_RES (702)..(703): Variable amino acid
  MOD_RES (708)..(709): Variable amino acid
  MOD_RES (721): Variable amino acid
  MOD_RES (723)..(724): Variable amino acid
  MOD_RES (730)..(731): Variable amino acid
  MOD_RES (744)..(777): Variable amino acid
  MOD_RES (779): Variable amino acid
  MOD_RES (784).(792): Variable amino acid
  MOD_RES (794): Variable amino acid
  MOD_RES (800): Variable amino acid
  MOD_RES (803)..(809): Variable amino acid
  MOD_RES (813)..(814): Variable amino acid
  MOD_RES (816)..(827): Variable amino acid
  MOD_RES (829)..(830): Variable amino acid
  MOD_RES (832)..(834): Variable amino acid
  MOD_RES (836)..(837): Variable amino acid
  MOD_RES (839)..(840): Variable amino acid
  MOD_RES (842)..(844): Variable amino acid
  MOD_RES (846): Variable amino acid
  MOD_RES (849): Variable amino acid
  MOD_RES (851)..(868): Variable amino acid
  MOD_RES (870)..(874): Variable amino acid
  MOD_RES (880)..(889): Variable amino acid
  MOD_RES (891): Variable amino acid
  MOD_RES (893): Variable amino acid
  MOD_RES (896)..(897): Variable amino acid
  MOD_RES (900): Variable amino acid
  MOD_RES (902): Variable amino acid
  MOD_RES (904): Variable amino acid
  MOD_RES (906)..(907): Variable amino acid
  MOD_RES (909)..(910): Variable amino acid
  MOD_RES (912): Variable amino acid
  MOD_RES (914)..(916): Variable amino acid
  MOD_RES (919)..(921): Variable amino acid
  MOD_RES (926)..(927): Variable amino acid
  MOD_RES (929)..(934): Variable amino acid
  MOD_RES (939)..(941): Variable amino acid
  MOD_RES (943)..(945): Variable amino acid
  MOD_RES (949): Variable amino acid
  MOD_RES (953)..(955): Variable amino acid
  MOD_RES (958)..(960): Variable amino acid
  MOD_RES (962): Variable amino acid
  MOD_RES (964)..(965): Variable amino acid
  MOD_RES (967)..(968): Variable amino acid
  MOD_RES (972)..(973): Variable amino acid
  MOD_RES (975)..(983): Variable amino acid
  MOD_RES (986): Variable amino acid
  MOD_RES (988): Variable amino acid
  MOD_RES (990): Variable amino acid
  MOD_RES (993): Variable amino acid
  MOD_RES (995): Variable amino acid
  MOD_RES (999)..(1254): Variable amino acid
  MOD_RES (1256)..(1258): Variable amino acid
  MOD_RES (1263)..(1267): Variable amino acid
  MOD_RES (1272)..(1283): Variable amino acid
  MOD_RES (1286): Variable amino acid
  MOD_RES (1288): Variable amino acid
  MOD_RES (1290)..(1314): Variable amino acid
  MOD_RES (1318)..(1322): Variable amino acid
  MOD_RES (1325)..(1328): Variable amino acid
  MOD_RES (1330)..(1331): Variable amino acid
  MOD_RES (1333)..(1340): Variable amino acid
  MOD_RES (1343)..(1344): Variable amino acid
  MOD_RES (1346)..(1348): Variable amino acid
  MOD_RES (1353)..(1356): Variable amino acid
  MOD_RES (1359)..(1360): Variable amino acid
  MOD_RES (1363)..(1364): Variable amino acid
  MOD_RES (1366)..(1367): Variable amino acid
  MOD_RES (1370): Variable amino acid
  MOD_RES (1372): Variable amino acid
  MOD_RES (1374)..(1380): Variable amino acid
  MOD_RES (1382)..(1383): Variable amino acid
  MOD_RES (1386)..(1391): Variable amino acid
  MOD_RES (1394): Variable amino acid
  MOD_RES (1396)..(1400): Variable amino acid
  MOD_RES (1402)..(1403): Variable amino acid
  MOD_RES (1408)..(1414): Variable amino acid
  MOD_RES (1420)..(1424): Variable amino acid
  MOD_RES (1426): Variable amino acid
  MOD_RES (1430): Variable amino acid
  MOD_RES (1432)..(1437): Variable amino acid
  MOD_RES (1439)..(1441): Variable amino acid
  MOD_RES (1446): Variable amino acid
  MOD_RES (1448)..(1451): Variable amino acid
  MOD_RES (1454)..(1455): Variable amino acid
  MOD_RES (1458): Variable amino acid
  MOD_RES (1460)..(1461): Variable amino acid
  MOD_RES (1464)..(1465): Variable amino acid
  MOD_RES (1470)..(1471): Variable amino acid
  MOD_RES (1477): Variable amino acid
  MOD_RES (1479): Variable amino acid
  MOD_RES (1481): Variable amino acid
  MOD_RES (1485)..(1487): Variable amino acid
  MOD_RES (1491): Variable amino acid
  MOD_RES (1493): Variable amino acid
  MOD_RES (1495)..(1497): Variable amino acid
  MOD_RES (1501): Variable amino acid
  MOD_RES (1504): Variable amino acid
  MOD_RES (1506): Variable amino acid
  MOD_RES (1508)..(1513): Variable amino acid
  MOD_RES (1518): Variable amino acid
  MOD_RES (1520): Variable amino acid
  MOD_RES (1524)..(1526): Variable amino acid
  MOD_RES (1531)..(1532): Variable amino acid
  MOD_RES (1534)..(1535): Variable amino acid
  MOD_RES (1540)..(1541): Variable amino acid
  MOD_RES (1545)..(1546): Variable amino acid
  MOD_RES (1551): Variable amino acid
  MOD_RES (1553)..(1671): Variable amino acid
  MOD_RES (1673)..(1674): Variable amino acid
  MOD_RES (1678): Variable amino acid
  MOD_RES (1680)..(1683): Variable amino acid
MYAIXXXKXXXXGRKXXXXIXXRXXXGXXGRXXXEXGXXKKRGRXKXXXXXEXXXXXXXXXXXXXXXXREXXGXXXXXXGKKXXGXXXXXXXGXXXEXGXXXGXRXXXEXXXXXXXXXXXXXXXGKXXXXXXXXXXXXXXXXKKRGXRXXGKGXXXEKEKRRKGRXXREGXGXXKEGXRGKKXXXXXXXEEXEKRXRXXXXEXXKXKKXGXKKRKXGGGXXXEKGXXXREREKGXXRGXKRGGEGGEXXKRGRKGXKKGRXXGEGRKKXGXXXGKGGXKGERGEGGKKGGGEGGXKKKKGGKGKKGXXKKKEGRGKKEEGGXKGKREXGEGKRXXGGKXXKXXGXXXXXXXXXXXXXXXXXXXXXXXXXXXXXXXXXXXXEGGXXFLKLKXXXRSXLMLXXXXXXGKXRXXXGXXVXXGXGXXXEGXRGXXXEXGGEGXRXXXGXRKEXGREGGXXXGXGRGXGERGXXXXXXEGGGERGXXXRXEEXXXEGERXKXGXRKEXGRERXXXXXXRKXXXXXXXXKKXXKXXXXKXXKGRKKXXXKRXXXXKXKXXGERKRXXXXKXXKKKRXGXXKXRGGGXKXEXXXXXGGGXEEGXXXGXXGGREXRRGXEXXXRXGERGGEXKXKRRXXKXXKKREXRXEKRXREXGGXKKKKXGEKKGGXXKRXGXXKGRGGXXKKEKXXGXKXXGKXEXXRGGGKKEXXKEEGXXKRGGEEKKKKGXKXXKRGRKXXKRGEKREKKRGRXXXXXXXXXXXXXXXXXXXXXXXXXXXXXXXXXXGXPPRGXXXXXXXXXVXHEGAPXTPXXXXXXXGGGXXRXXXXXXXXXXXXGXXWXXXGXXGXXGXXXGXGGXGXXXXXXXXXXXXXXXXXXGXXXXXGGGGGXXXXXXXXXXGXGXGGXXGGXGXGXGXXGXXGXGXXXGGXXXGGGGXXGXXXXXXGGGGXXXGXXXGGGXGGGXXXGGXXXGXGXXGXXGGGXXGXXXXXXXXXGGXGXGXGGXGXGGGXXXXXXXXXXXXXXXXXXXXXXXXXXXXXXXXXXXXXXXXXXXXXXXXXXXXXXXXXXXXXXXXXXXXXXXXXXXXXXXXXXXXXXXXXXXXXXXXXXXXXXXXXXXXXXXXXXXXXXXXXXXXXXXXXXXXXXXXXXXXXXXXXXXXXXXXXXXXXXXXXXXXXXXXXXXXXXXXXXXXXXXXXXXXXXXXXXXXXXXXXXXXXXXXXXXXXXXXXXXXXXXXXXXXXXXXXXXXXXXXXXXXXXXXXXXXXXXXRXXXRGGGXXXXXKKIEXXXXXXXXXXXXAIXNXPXXXXXXXXXXGXXXXXXXXXXXXXXGGGXXXXXGGXXXXGXXGXXXXXXXXGGXXGXXXGGGGXXXXGGXXGGXXGXXGGXGXGXXXXXXXGXXGGXXXXXXGGXGXXXXXGXXGGGGXXXXXXXGGGGGXXXXXGXGGGXGXXXXXXGXXXGGGGXGXXXXGGXXGGXGXXGGXXGGGGXXGGGGKXGXGXGGGXXXGGGXGXGXXXGGGXGGXGXGXXXXXXGGGGXGXGGGXXXGGGGXXGXXGGGGXXGGGXXGGGGXGXXXXXXXXXXXXXXXXXXXXXXXXXXXXXXXXXXXXXXXXXXXXXXXXXXXXXXXXXXXXXXXXXXXXXXXXXXXXXXXXXXXXXXXXXXXXXXXXXXXXXXXXXXXXXXXXXXXXXXXGXXRGGXGXXXX

SEQ ID NO: 1483 - DNA, 3133 bp, Homo sapiens
  source
  (1)..(3133)
  CDS (201)..(2933)
  modified_base (1)..(118): a, t, c, g, unknown or other
  modified_base (124)..(129): a, t, c, g, unknown or other
  modified_base (139): a, t, c, g, unknown or other
  modified_base (146)..(148): a, t, c, g, unknown or other
  modified_base (151)..(152): a, t, c, g, unknown or other
  modified_base (155): a, t, c, g, unknown or other
  modified_base (172): a, t, c, g, unknown or other
  modified_base (179)..(180): a, t, c, g, unknown or other
  modified_base (182): a, t, c, g, unknown or other
  modified_base (185)..(188): a, t, c, g, unknown or other
  modified_base (192): a, t, c, g, unknown or other
  modified_base (194)..(195): a, t, c, g, unknown or other
  modified_base (210): a, t, c, g, unknown or other
  modified_base (212): a, t, c, g, unknown or other
  modified_base (214): a, t, c, g, unknown or other
  modified_base (219): a, t, c, g, unknown or other
  modified_base (222)..(225): a, t, c, g, unknown or other
  modified_base (229): a, t, c, g, unknown or other
  modified_base (231)..(232): a, t, c, g, unknown or other
  modified_base (238)..(239): a, t, c, g, unknown or other
  modified_base (242): a, t, c, g, unknown or other
  modified_base (245): a, t, c, g, unknown or other
  modified_base (248)..(260): a, t, c, g, unknown or other
  modified_base (265)..(270): a, t, c, g, unknown or other
  modified_base (272)..(276): a, t, c, g, unknown or other
  modified_base (278): a, t, c, g, unknown or other
  modified_base (282)..(283): a, t, c, g, unknown or other
  modified_base (287)..(290): a, t, c, g, unknown or other
  modified_base (302)..(306): a, t, c, g, unknown or other
  modified_base (311)..(313): a, t, c, g, unknown or other
  modified_base (323)..(334): a, t, c, g, unknown or other
  modified_base (336)..(341): a, t, c, g, unknown or other
  modified_base (345)..(363): a, t, c, g, unknown or other
  modified_base (365)..(368): a, t, c, g, unknown or other
  modified_base (370): a, t, c, g, unknown or other
  modified_base (374)..(375): a, t, c, g, unknown or other
  modified_base (379)..(385): a, t, c, g, unknown or other
  modified_base (387)..(388): a, t, c, g, unknown or other
  modified_base (390)..(393): a, t, c, g, unknown or other
  modified_base (395): a, t, c, g, unknown or other
  modified_base (397): a, t, c, g, unknown or other
  modified_base (400)..(402): a, t, c, g, unknown or other
  modified_base (409): a, t, c, g, unknown or other
  modified_base (411): a, t, c, g, unknown or other
  modified_base (423)..(424): a, t, c, g, unknown or other
  modified_base (432): a, t, c, g, unknown or other
  modified_base (445)..(448): a, t, c, g, unknown or other
  modified_base (450)..(452): a, t, c, g, unknown or other
  modified_base (455): a, t, c, g, unknown or other
  modified_base (460): a, t, c, g, unknown or other
  modified_base (462)..(463): a, t, c, g, unknown or other
  modified_base (473): a, t, c, g, unknown or other
  modified_base (478): a, t, c, g, unknown or other
  modified_base (483)..(484): a, t, c, g, unknown or other
  modified_base (489)..(492): a, t, c, g, unknown or other
  modified_base (496)..(497): a, t, c, g, unknown or other
  modified_base (501): a, t, c, g, unknown or other
  modified_base (505)..(506): a, t, c, g, unknown or other
  modified_base (520)..(523): a, t, c, g, unknown or other
  modified_base (533): a, t, c, g, unknown or other
  modified_base (536): a, t, c, g, unknown or other
  modified_base (542): a, t, c, g, unknown or other
  modified_base (548)..(552): a, t, c, g, unknown or other
  modified_base (564)..(567): a, t, c, g, unknown or other
  modified_base (572): a, t, c, g, unknown or other
  modified_base (576)..(578): a, t, c, g, unknown or other
  modified_base (591)..(592): a, t, c, g, unknown or other
  modified_base (594)..(595): a, t, c, g, unknown or other
  modified_base (602)..(603): a, t, c, g, unknown or other
  modified_base (615): a, t, c, g, unknown or other
  modified_base (617): a, t, c, g, unknown or other
  modified_base (620)..(622): a, t, c, g, unknown or other
  modified_base (635)..(636): a, t, c, g, unknown or other
  modified_base (643): a, t, c, g, unknown or other
  modified_base (648)..(652): a, t, c, g, unknown or other
  modified_base (655): a, t, c, g, unknown or other
  modified_base (668)..(669): a, t, c, g, unknown or other
  modified_base (678)..(681): a, t, c, g, unknown or other
  modified_base (697)..(698): a, t, c, g, unknown or other
  modified_base (704): a, t, c, g, unknown or other
  modified_base (706): a, t, c, g, unknown or other
  modified_base (709): a, t, c, g, unknown or other
  modified_base (723)..(724): a, t, c, g, unknown or other
  modified_base (727)..(731): a, t, c, g, unknown or other
  modified_base (736): a, t, c, g, unknown or other
  modified_base (743)..(744): a, t, c, g, unknown or other
  modified_base (746): a, t, c, g, unknown or other
  modified_base (760)..(762): a, t, c, g, unknown or other
  modified_base (765): a, t, c, g, unknown or other
  modified_base (775)..(777): a, t, c, g, unknown or other
  modified_base (784): a, t, c, g, unknown or other
  modified_base (786): a, t, c, g, unknown or other
  modified_base (793): a, t, c, g, unknown or other
  modified_base (808)..(813): a, t, c, g, unknown or other
  modified_base (829)..(832): a, t, c, g, unknown or other
  modified_base (843)..(844): a, t, c, g, unknown or other
  modified_base (846): a, t, c, g, unknown or other
  modified_base (854)..(855): a, t, c, g, unknown or other
  modified_base (863)..(867): a, t, c, g, unknown or other
  modified_base (879): a, t, c, g, unknown or other
  modified_base (883): a, t, c, g, unknown or other
  modified_base (885): a, t, c, g, unknown or other
  modified_base (897)..(900): a, t, c, g, unknown or other
  modified_base (916): a, t, c, g, unknown or other
  modified_base (918): a, t, c, g, unknown or other
  modified_base (920): a, t, c, g, unknown or other
  modified_base (925): a, t, c, g, unknown or other
  modified_base (927)..(928): a, t, c, g, unknown or other
  modified_base (942)..(943): a, t, c, g, unknown or other
  modified_base (947)..(949): a, t, c, g, unknown or other
  modified_base (955): a, t, c, g, unknown or other
  modified_base (962): a, t, c, g, unknown or other
  modified_base (969): a, t, c, g, unknown or other
  modified_base (978): a, t, c, g, unknown or other
  modified_base (980)..(982): a, t, c, g, unknown or other
  modified_base (984): a, t, c, g, unknown or other
  modified_base (986): a, t, c, g, unknown or other
  modified_base (1004)..(1460): a, t, c, g, unknown or other
  modified_base (1466)..(1472): a, t, c, g, unknown or other
  modified_base (1481): a, t, c, g, unknown or other
  modified_base (1488)..(1492): a, t, c, g, unknown or other
  modified_base (1495)..(1497): a, t, c, g, unknown or other
  modified_base (1500): a, t, c, g, unknown or other
  modified_base (1517)..(1518): a, t, c, g, unknown or other
  modified_base (1523): a, t, c, g, unknown or other
  modified_base (1525)..(1526): a, t, c, g, unknown or other
  modified_base (1528)..(1529): a, t, c, g, unknown or other
  modified_base (1532)..(1534): a, t, c, g, unknown or other
  modified_base (1538)..(1539): a, t, c, g, unknown or other
  modified_base (1541)..(1542): a, t, c, g, unknown or other
  modified_base (1550): a, t, c, g, unknown or other
  modified_base (1555): a, t, c, g, unknown or other
  modified_base (1557): a, t, c, g, unknown or other
  modified_base (1559)..(1560): a, t, c, g, unknown or other
  modified_base (1562): a, t, c, g, unknown or other
  modified_base (1564)..(1565): a, t, c, g, unknown or other
  modified_base (1569)..(1576): a, t, c, g, unknown or other
  modified_base (1582)..(1583): a, t, c, g, unknown or other
  modified_base (1587)..(1590): a, t, c, g, unknown or other
  modified_base (1594): a, t, c, g, unknown or other
  modified_base (1603)..(1614): a, t, c, g, unknown or other
  modified_base (1617): a, t, c, g, unknown or other
  modified_base (1619)..(1653): a, t, c, g, unknown or other
  modified_base (1661)..(1667): a, t, c, g, unknown or other
  modified_base (1671): a, t, c, g, unknown or other
  modified_base (1673)..(1676): a, t, c, g, unknown or other
  modified_base (1689)..(1704): a, t, c, g, unknown or other
  modified_base (1706)..(1708): a, t, c, g, unknown or other
  modified_base (1713)..(1799): a, t, c, g, unknown or other
  modified_base (1806)..(1825): a, t, c, g, unknown or other
  modified_base (1827): a, t, c, g, unknown or other
  modified_base (1831)..(1833): a, t, c, g, unknown or other
  modified_base (1848): a, t, c, g, unknown or other
  modified_base (1856): a, t, c, g, unknown or other
  modified_base (1865): a, t, c, g, unknown or other
  modified_base (1869): a, t, c, g, unknown or other
  modified_base (1872)..(1873): a, t, c, g, unknown or other
  modified_base (1890)..(1892): a, t, c, g, unknown or other
  modified_base (1894): a, t, c, g, unknown or other
  modified_base (1904): a, t, c, g, unknown or other
  modified_base (1915): a, t, c, g, unknown or other
  modified_base (1921): a, t, c, g, unknown or other
  modified_base (1923): a, t, c, g, unknown or other
  modified_base (1935): a, t, c, g, unknown or other
  modified_base (1937)..(1939): a, t, c, g, unknown or other
  modified_base (1943)..(2881): a, t, c, g, unknown or other
  modified_base (2896): a, t, c, g, unknown or other
  modified_base (2904)..(2907): a, t, c, g, unknown or other
  modified_base (2909): a, t, c, g, unknown or other
  modified_base (2912): a, t, c, g, unknown or other
  modified_base (2916): a, t, c, g, unknown or other
  modified_base (2926): a, t, c, g, unknown or other
  modified_base (2929): a, t, c, g, unknown or other
  modified_base (2934): a, t, c, g, unknown or other
  modified_base (2943): a, t, c, g, unknown or other
  modified_base (2951): a, t, c, g, unknown or other
  modified_base (2953)..(2954): a, t, c, g, unknown or other
  modified_base (2956)..(2959): a, t, c, g, unknown or other
  modified_base (2963): a, t, c, g, unknown or other
  modified_base (2966)..(2967): a, t, c, g, unknown or other
  modified_base (2969)..(2970): a, t, c, g, unknown or other
  modified_base (2977): a, t, c, g, unknown or other
  modified_base (2982)..(2984): a, t, c, g, unknown or other
  modified_base (2996)..(2998): a, t, c, g, unknown or other
  modified_base (3001)..(3002): a, t, c, g, unknown or other
  modified_base (3005)..(3006): a, t, c, g, unknown or other
  modified_base (3010)..(3011): a, t, c, g, unknown or other
  modified_base (3018): a, t, c, g, unknown or other
  modified_base (3027): a, t, c, g, unknown or other
  modified_base (3033): a, t, c, g, unknown or other
  modified_base (3042): a, t, c, g, unknown or other
  modified_base (3100): a, t, c, g, unknown or other
  modified_base (3105): a, t, c, g, unknown or other
  modified_base (3109): a, t, c, g, unknown or other
  modified_base (3111): a, t, c, g, unknown or other
  modified_base (3124): a, t, c, g, unknown or other
  modified_base (3128): a, t, c, g, unknown or other
nnnnnnnnnnnnnnnnnnnnnnnnnnnnnnnnnnnnnnnnnnnnnnnnnnnnnnnnnnnnnnnnnnnnnnnnnnnnnnnnnnnnnnnnnnnnnnnnnnnnnnnnnnnnnnnnnnnnnnaggggnnnnnncgaggggggngagggannnggnnttnttaaacaaattgaaggnccccttnngnagnnnnctcnannttttgatggccattngnanccgcnggnnnntttngnnaaaggnnccnggnggnnnnnnnnnnnnnggttnnnnnngnnnnngngggnngggnnnngggggggggggnnnnnggggnnngggggggggnnnnnnnnnnnngnnnnnngggnnnnnnnnnnnnnnnnnnngnnnngngggnngggnnnnnnngnngnnnngngnggnnnggggggngngggggggggggnngggggggnggggggggggggnnnngnnnggnggggngnngggggggggnggggnggggnnggggnnnngggnngggngggnngggggggggggggnnnngggggggggnggngggggngggggnnnnngggggggggggnnnnggggngggnnnggggggggggggnngnnggggggnngggggggggggngnggnnnggggggggggggnnggggggnggggnnnnnggnggggggggggggnnggggggggnnnngggggggggggggggnngggggngnggngggggggggggggnnggnnnnnggggnggggggnngngggggggggggggnnnggngggggggggnnnggggggngnggggggnggggggggggggggnnnnnngggggggggggggggnnnnggggggggggnngngggggggnngggggggnnnnngggggggggggngggngngggggggggggnnnngggggggggggggggngngnggggngnngggggggggggggnngggnnngggggnggggggnggggggnggggggggngnnngngngggggggggggggggggnnnnnnnnnnnnnnnnnnnnnnnnnnnnnnnnnnnnnnnnnnnnnnnnnnnnnnnnnnnnnnnnnnnnnnnnnnnnnnnnnnnnnnnnnnnnnnnnnnnnnnnnnnnnnnnnnnnnnnnnnnnnnnnnnnnnnnnnnnnnnnnnnnnnnnnnnnnnnnnnnnnnnnnnnnnnnnnnnnnnnnnnnnnnnnnnnnnnnnnnnnnnnnnnnnnnnnnnnnnnnnnnnnnnnnnnnnnnnnnnnnnnnnnnnnnnnnnnnnnnnnnnnnnnnnnnnnnnnnnnnnnnnnnnnnnnnnnnnnnnnnnnnnnnnnnnnnnnnnnnnnnnnnnnnnnnnnnnnnnnnnnnnnnnnnnnnnnnnnnnnnnnnnnnnnnnnnnnnnnnnnnnnnnnnnnnnnnnnnnnnnnnnnnnnnnnnnnnnnnnnnnnnnnnnnnnnnnnnnnnnnnnnnnnnnnnnnnnnaggggnnnnnnncacgggggngccgggnnnnnggnnnttnttaaaaaaaccgtaagnnccccntnngnnagnnntctnnannccccgatngccantngnnancnnccgnnnnnnnntttggnnaaannnncccnggggggggnnnnnnnnnnnnggntnnnnnnnnnnnnnnnnnnnnnnnnnnnnnnnnnnngggggggnnnnnnngggngnnnnggggggggggggnnnnnnnnnnnnnnnngnnnggggnnnnnnnnnnnnnnnnnnnnnnnnnnnnnnnnnnnnnnnnnnnnnnnnnnnnnnnnnnnnnnnnnnnnnnnnnnnnnnnnnnnnnnnggggggnnnnnnnnnnnnnnnnnnnngngggnnnggggggggggggggngggggggnggggggggngggnggnnggggggggggggggggnnngngggggggggnggggggggggngggggngngggggggggggngnnngggnnnnnnnnnnnnnnnnnnnnnnnnnnnnnnnnnnnnnnnnnnnnnnnnnnnnnnnnnnnnnnnnnnnnnnnnnnnnnnnnnnnnnnnnnnnnnnnnnnnnnnnnnnnnnnnnnnnnnnnnnnnnnnnnnnnnnnnnnnnnnnnnnnnnnnnnnnnnnnnnnnnnnnnnnnnnnnnnnnnnnnnnnnnnnnnnnnnnnnnnnnnnnnnnnnnnnnnnnnnnnnnnnnnnnnnnnnnnnnnnnnnnnnnnnnnnnnnnnnnnnnnnnnnnnnnnnnnnnnnnnnnnnnnnnnnnnnnnnnnnnnnnnnnnnnnnnnnnnnnnnnnnnnnnnnnnnnnnnnnnnnnnnnnnnnnnnnnnnnnnnnnnnnnnnnnnnnnnnnnnnnnnnnnnnnnnnnnnnnnnnnnnnnnnnnnnnnnnnnnnnnnnnnnnnnnnnnnnnnnnnnnnnnnnnnnnnnnnnnnnnnnnnnnnnnnnnnnnnnnnnnnnnnnnnnnnnnnnnnnnnnnnnnnnnnnnnnnnnnnnnnnnnnnnnnnnnnnnnnnnnnnnnnnnnnnnnnnnnnnnnnnnnnnnnnnnnnnnnnnnnnnnnnnnnnnnnnnnnnnnnnnnnnnnnnnnnnnnnnnnnnnnnnnnnnnnnnnnnnnnnnnnnnnnnnnnnnnnnnnnnnnnnnnnnnnnnnnnnnnnnnnnnnnnnnnnnnnnnnnnnnnnnnnnnnnnnnnnnnnnnnnnnnnnnnnnnnnnnnnnnnnnnnnnnnnnnnnnnnnnnnnnnnnnnnnnnnnnnnnnnnnnnnnnnnnnnnnnnnnnnnnnnnnnnnnnnnnnnnnnnnnnnnnnnnnnnnnnnnnnnnnnnnnnnnnnnnnnnnnnnnnnnnnnnnnnnnnnnnnnnnnnnnnnnnnnnnnnnnnnnnnnnnnnnnnnnnnnnnnnnnnnnnnnnnnnnnnnnnnggggaaaggagaggngggggggnnnntnttnaagnaccttgaggnccnttagnattttgacnaccccttngnnannnnccgnganncnntagaggngaggnnngcgggggggggnnnagnnggnngggnngaaaaangtttggggngagagnaggaagagngagaaggggggggggaaggagaggaggggggaggggggaggaaaaaagaggggtttanggganaagngnggggaagggaggnaggngaggg

SEQ ID NO: 1484 - protein, 910 aa, Homo sapiens
  MOD_RES (4)..(5): Variable amino acid
  MOD_RES (7)..(11): Variable amino acid
  MOD_RES (13)..(20): Variable amino acid
  MOD_RES (22)..(26): Variable amino acid
  MOD_RES (28)..(30): Variable amino acid
  MOD_RES (34)..(38): Variable amino acid
  MOD_RES (41)..(47): Variable amino acid
  MOD_RES (49)..(68): Variable amino acid
  MOD_RES (70)..(71): Variable amino acid
  MOD_RES (75): Variable amino acid
  MOD_RES (78): Variable amino acid
  MOD_RES (82)..(85): Variable amino acid
  MOD_RES (87)..(88): Variable amino acid
  MOD_RES (91): Variable amino acid
  MOD_RES (93): Variable amino acid
  MOD_RES (95): Variable amino acid
  MOD_RES (97)..(99): Variable amino acid
  MOD_RES (101)..(102): Variable amino acid
  MOD_RES (107)..(108): Variable amino acid
  MOD_RES (111)..(112): Variable amino acid
  MOD_RES (114): Variable amino acid
  MOD_RES (116)..(118): Variable amino acid
  MOD_RES (122)..(124): Variable amino acid
  MOD_RES (126): Variable amino acid
  MOD_RES (131)..(132): Variable amino acid
  MOD_RES (134)..(135): Variable amino acid
  MOD_RES (139)..(141): Variable amino acid
  MOD_RES (145)..(146): Variable amino acid
  MOD_RES (148): Variable amino acid
  MOD_RES (150)..(152): Variable amino acid
  MOD_RES (156)..(157): Variable amino acid
  MOD_RES (160)..(161): Variable amino acid
  MOD_RES (166): Variable amino acid
  MOD_RES (168): Variable amino acid
  MOD_RES (169)..(170): Variable amino acid
  MOD_RES (175)..(177): Variable amino acid
  MOD_RES (79): Variable amino acid
  MOD_RES (181)..(182): Variable amino acid
  MOD_RES (187)..(189): Variable amino acid
  MOD_RES (192)..(193): Variable amino acid
  MOD_RES (195)..(196): Variable amino acid
  MOD_RES (198): Variable amino acid
  MOD_RES (203)..(205): Variable amino acid
  MOD_RES (210)..(211): Variable amino acid
  MOD_RES (215)..(216): Variable amino acid
  MOD_RES (218)..(219): Variable amino acid
  MOD_RES (221)..(223): Variable amino acid
  MOD_RES (227)..(229): Variable amino acid
  MOD_RES (233)..(234): Variable amino acid
  MOD_RES (239)..(240): Variable amino acid
  MOD_RES (242)..(243): Variable amino acid
  MOD_RES (248)..(250): Variable amino acid
  MOD_RES (252): Variable amino acid
  MOD_RES (254): Variable amino acid
  MOD_RES (257): Variable amino acid
  MOD_RES (260)..(262): Variable amino acid
  MOD_RES (268)..(420): Variable amino acid
  MOD_RES (422)..(424): Variable amino acid
  MOD_RES (427): Variable amino acid
  MOD_RES (430)..(434): Variable amino acid
  MOD_RES (439)..(448): Variable amino acid
  MOD_RES (450): Variable amino acid
  MOD_RES (452)..(455): Variable amino acid
  MOD_RES (457)..(459): Variable amino acid
  MOD_RES (461): Variable amino acid
  MOD_RES (463)..(465): Variable amino acid
  MOD_RES (468)..(485): Variable amino acid
  MOD_RES (487)..(489): Variable amino acid
  MOD_RES (491)..(492): Variable amino acid
  MOD_RES (497)..(503): Variable amino acid
  MOD_RES (505)..(533): Variable amino acid
  MOD_RES (536)..(545): Variable amino acid
  MOD_RES (550): Variable amino acid
  MOD_RES (552): Variable amino acid
  MOD_RES (555): Variable amino acid
  MOD_RES (557)..(558): Variable amino acid
  MOD_RES (564)..(565): Variable amino acid
  MOD_RES (568): Variable amino acid
  MOD_RES (572): Variable amino acid
  MOD_RES (574)..(575): Variable amino acid
  MOD_RES (579)..(894): Variable amino acid
  MOD_RES (899): Variable amino acid
  MOD_RES (902)..(904): Variable amino acid
  MOD_RES (906): Variable amino acid
  MOD_RES (909)..(910): Variable amino acid
MAIXXRXXXXXKXXXXXXXXGXXXXXGXXXGGGXXXXXGGXXXXXXXGXXXXXXXXXXXXXXXXXXXXGXXGGGXGGXGGGXXXXGXXGGXGXGXGXXXGXXGGGGXXGGXXGXGXXXGGGXXXGXGGGGXXGXXGGGXXXGGGXXGXGXXXGGGXXGGXXGGGGXGXXXGGGGXXXGXGXXGGGGXXXGGXXGXXGXGGGGXXXGGGGXXGGGXXGXXGXXXGGGXXXGGGXXGGGGXXGXXGGGGXXXGXGXGGXGGXXXGGGGGXXXXXXXXXXXXXXXXXXXXXXXXXXXXXXXXXXXXXXXXXXXXXXXXXXXXXXXXXXXXXXXXXXXXXXXXXXXXXXXXXXXXXXXXXXXXXXXXXXXXXXXXXXXXXXXXXXXXXXXXXXXXXXXXXXXXXXXXXXXXXXXXXXXXXXXXXRXXXHGXAGXXXXXKKTVXXXXXXXXXXPXAXXXXPXXXLXKXXXGGXXXXXXXXXXXXXXXXXXGXXXGXXGGGGXXXXXXXGXXXXXXXXXXXXXXXXXXXXXXXXXXXXXGGXXXXXXXXXXGGGGXGXGGXGXXGGGGGXXGGXGGGXGXXGGGXXXXXXXXXXXXXXXXXXXXXXXXXXXXXXXXXXXXXXXXXXXXXXXXXXXXXXXXXXXXXXXXXXXXXXXXXXXXXXXXXXXXXXXXXXXXXXXXXXXXXXXXXXXXXXXXXXXXXXXXXXXXXXXXXXXXXXXXXXXXXXXXXXXXXXXXXXXXXXXXXXXXXXXXXXXXXXXXXXXXXXXXXXXXXXXXXXXXXXXXXXXXXXXXXXXXXXXXXXXXXXXXXXXXXXXXXXXXXXXXXXXXXXXXXXXXXXXXXXXXXXXXXXXXXXXXXXXXXXXXXXXXXXXXXXXXXXXXXXXXXXXXXXXXXXXXXXXXGKGEXGGXXXKXLEXX

SEQ ID NO: 1485 - DNA, 859 bp, Homo sapiens
  source (1)..(859)
  CDS (201)..(659)
gggaacacaattcatggagatcttgctccgttttgaaagaaaaatttgagcttcggattcctacattaattttcaaactagagttgatttaaactttgatcgacaatgtctatttgggggatataaaactagtttttgtgacctatttttgttttgtttgtttgtttgagacacagtcttactctattacccaggctggaatgcagtcgcgtgatcttggctcactgcaacctccacctcccaagttcaagcgattcttctgcctcagcctcccaagtagctgggattataggcacctgccaccaggcccagctaatattttggttgtgtgtgtgtgttttgagagggagtcttgctctgtcgccaggctggagtgcaatagcgagatctcagctcactgcaatctctcgcctcccaggttcaagcgattctcctgcctcagcctcccaagtagctgggattacaggcacccgccaccatgcctggctagtttctttctttctttttttgagacggagtttcactcttgttgcccaggctggagtgcaatggcacaatcttggctcactgcaacctctgcctcccaggttcaagcgattctcctgcctcagcctcctgagtacctgggattacaggcatgtaccaccacacccagctaatttgtattttttagtagagacagggtttctccatgttggtcaggctggtttcaaacccctgacctcaggtgatccacccacctcagcctcccaaagtgctgggattacaggcgtgagccaccaggcccggactaattttttttggtgtagacggggtttctccatgttggccaggctggtttcaaactcctgactcaagt

SEQ ID NO: 1486 - protein, 152 aa, Homo sapiens [sequence omitted]

SEQ ID NO: 1487 - DNA, 916 bp, Homo sapiens
  source (1)..(916)
  CDS (201)..(716)
  modified_base (205)..(304): a, t, c, g, unknown or other
cagtactcaaaaaatcaaaaaaaaagaaaagacattttatatttcactttcaattaaggaccttgattgatacaatcagatttttaatgtcagtttaaatttaactagaaaaccctatgaaaagtaagggcagtgatcccagggatttaggaatataaatgtattttaaactatttagcagacaaaactaaaaggatcttatgtnnnnnnnnnnnnnnnnnnnnnnnnnnnnnnnnnnnnnnnnnnnnnnnnnnnnnnnnnnnnnnnnnnnnnnnnnnnnnnnnnnnnnnnnnnnnnnnnnnnnatcccacccccacggcccccccccacaccccctcgcccccacccacccgcagccccccggccccggggctctccggccccccttcttcctcgttttcccctctattggcaccgcatgttcacagcccgccattcccgtccctgcaccccacatgcatctcctacaaggcagctacaaggcctatttctccttcagcacccacctcactgtagtgactttgcactatgcaccctttgcttatacctatctacgcccaagatccctgcgatctccgacagaggacaaggttctggctgtcttctacaccatcctcactccaatgctcaaccccatcatctacagcctgagaaacaaggaggtgatgggggccctgacacgagtgattcagaaaatcttttcagtgaaaatatagacatacgttctgccttagagtcaaagcgctaggttcatatcaactcagcagtgtacggcggttaaggaaaatattattacatgcccagtatgtcaaacggaaattaatctaaaagatttgtattttaatttagtctggcatttcaattgcatattctaagacacctattttggttttgtatttgtttctttttatcaaaa

SEQ ID NO: 1488 - protein, 171 aa, Homo sapiens
  MOD_RES (2)..(35): Variable amino acid
MXXXXXXXXXXXXXXXXXXXXXXXXXXXXXXXXXXSHPHGPPPHPLAPTHPQPPGPGALRPPFFLVFPSIGTACSQPAIPVPAPHMHLLQGSYKAYFSFSTHLTVVTLHYAPFAYTYLRPRSLRSPTEDKVLAVFYTILTPMLNPIIYSLRNKEVMGALTRVIQKIFSVKI

SEQ ID NO: 1489 - DNA, 916 bp, Homo sapiens
  source (1)..(916)
  CDS (201)..(716)
agaggatttttttaatttcatgagcataattgagttggttccagtaacatatttgaaaacaaattcaacaaagaatccattcaaaataatacatttcttaatgctccctctgaaacactcagcaaatattgtgcatctttgacccacagctctgaccttcctgtcctagatgagggtttgtctttctctgccacaagagcatggaaggcaacaagacatggatcacagacatcaccctgctgggattccaggttggtccagcactggagattctcctctgtggactcttctctgtcttctatacactcaccctgctggggaatggggtcatctttgggattatctgcctggactgtaagcttcacacacccatgtacttcttcctctcacacctggccatcattgacatgtcctatgcttccaacaatgttcccaagatgttggcaaacctaatgaaccagaaaagaaccatctcctttgttccatgcataatgcagacttttttgtatttggcttttgctgttacagagtgcctgattttggtggtgatgtcctatgatcgctatgtggccatctgccaccccttacgttacaatgtcctcatgagctggagagagtgcactgtcctggctgtggcttcctgggtgttcagcttcctcctggctctggtccatttagttctcattctgaggctgcccttcagttgtttctcatgaaatcaaccactactgtgaaatcctgtctgtcctcaagttggcctgtgctgacacctggctcaaccaggtggtcatctttgcagcctgcatgttcatcctggtagggtgactctgcctggtgctggtctcttactatggcatcctggcggccatcctgaggatccagtctggcgagggccacagaaaggacttctctacct

SEQ ID NO: 1490 - protein, 171 aa, Homo sapiens
MEGNKTWITDITLLGFQVGPALEILLCGLFSVFYTLTLLGNGVIFGIICLDCKLHTPMYFFLSHLAIIDMSYASNNVPKMLANLMNQKRTISFVPCIMQTFLYLAFAVTECLILVVMSYDRYVAICHPLRYNVLMSWRECTVLAVASWVFSFLLALVHLVLILRLPFSCFS

SEQ ID NO: 1491 - DNA, 976 bp, Homo sapiens
  source (1)..(976)
  CDS (201)..(776)
  modified_base (651)..(750): a, t, c, g, unknown or other
  modified_base (757): a, t, c, g, unknown or other
  modified_base (771): a, t, c, g, unknown or other
ctggttggattccagctcagtgcagagatggagatctttctctcttgcatcttctccctgttatatctcttcagtctactgaggaatggcatgaacatgggactcatctgtctggatcccagactacacacccccatatacttcttcctgtcacacttggccgtcattgacatatactatgctttctcaatttgctcaacatgctggaaaacctagtgaaacacaaaaaaactatctcgttcatctcttgcattatgcagatggctttgtatttgacttttgctgctgcagtgtgcatgattttggtggtgatgtcctatgacagatttgtggcgatctgccatcccctgcattacactgtcatcatgaactggagagtgtgcacagtactggctattacttcctgggcatgtggattttccctggccctcataaatctaattctccttctaaggctgcccttctgtgggccccaggaggtgaaccacttcttcggtgaaattctgtctgtcctcaaactggcctgtgcagacacctggattaatgaaatttttgtctttgctggtggtgtgtttgtcttagtcgggcccctttccttgatgctgatctcctacatgcgcatcctcttggccatcctgaagatccagtcannnnnnnnnnnnnnnnnnnnnnnnnnnnnnnnnnnnnnnnnnnnnnnnnnnnnnnnnnnnnnnnnnnnnnnnnnnnnnnnnnnnnnnnnnnnnnnnnnnntccactntagaccctataggntctaaagttcagacactgcctggcatttttaagttgtcatggcactggtgggagtgtcttttcgcatgctaatgaattatgagtagcatataatgagcagtaaggatgaccagagaggtcactttcatcactgttttggatttggtgggttttggctggtgtctttactgtatcctgttttatcagcaaggtccttgtgacttgt

SEQ ID NO: 1492 - protein, 191 aa, Homo sapiens
  MOD_RES (151)..(184): Variable amino acid
  MOD_RES (186): Variable amino acid
  MOD_RES (191): Variable amino acid
MLENLVKHKKTISFISCIMQMALYLTFAAAVCMILVVMSYDRFVAICHPLHYTVIMNWRVCTVLAITSWACGFSLALINLILLLRLPFCGPQEVNHFFGEILSVLKLACADTWINEIFVFAGGVFVLVGPLSLMLISYMRILLAILKIQSXXXXXXXXXXXXXXXXXXXXXXXXXXXXXXXXXXHXRPYRX

SEQ ID NO: 1493 - DNA, 874 bp, Homo sapiens
  source (1)..(874)
  CDS (201)..(674)
gtaatgagataccacttcatacccgctaggatggctttaatcagcaagacaatgacgaatgttggcaaggatgtggagaaattgaatctgcatgcattgctggtaggagtatgaagtgatgcagtcatttttatttatttattttatttatttttttgagacagagtctcactctgtcagccaggctggagtgcaatggcatgatctcagctcactgcaacttctgcctcccgggctcaagcaattctcctgcctcagccccccgagtagctgggattacaggcatgtgccaccacgcccggctaatttttgcatttttagtagagacggggtttcaccatgttggccaggctggtcttgaactcctgacctcaggtaatctgcctgcctcgggctcccagagtgctgggattataggcgtgggccaccgcgcctggccgatgcagtcatttttaaaaccatgcttgtctttcttcaaaaagttttttttgtttgtttgttttttgtttttttttttgtcttttttgagatggagtctcactctgtcatcaggctggagtacagtggcacgatctcagctcaccgcaacctctgcctcccgggttcaagcaattctcctgcctcagcctcctgagtcactgagactacaggcatgcgccaccatgcccagctaatttttgtatttttagtagagaccgggtttcaccatgttggccaggatggtctcgatctcttgacctcgtgattcacctgcttcagacttccaaagtgctgggattacaggcataagccaccgcacccagcctcaaaaagttaaatatagagttaccacatgacccagcaatttcactactaggaatatacccaagagaaa

SEQ ID NO: 1494 - protein, 157 aa, Homo sapiens
MISAHCNFCLPGSSNSPASAPRVAGITGMCHHARLIFAFLVETGFHHVGQAGLELLTSGNLPASGSQSAGIIGVGHRAWPMQSFLKPCLSFFKKFFLFVCFLFFFLSFLRWSLTLSSGWSTVARSQLTATSASRVQAILLPQPPESLRLQACATMPS

SEQ ID NO: 1495 - DNA, 856 bp, Homo sapiens
  source (1)..(856)
  CDS (201)..(656)
attaaggagagatttagaagctggcagaagtttttgttcaatcagctacctactaagcccaaaactcatatactgtatagccaagaaaaagtaaactatattctcttcctaattattcttttgaaaaatgacttcatgttcattgtcttctcttcattcttaaaaaaggaactcattttgtaaaacagtcctgactgataatgtgtctcttgaccttgcaggtcactggcccaatgaatgtctctgagccaaattccagctttgctttagtaaatgaatttatactccaagatttatcttttgagtggacaattcagatcttcctcttctcactcttcactacaacatatgcactgaccataacaggaaatggagccattgcttgcgccctgtggtgtgaccggcgacgtcacactcccatgtacatgttcctgggaaatttctcctttttagagatatggtatgtctcttctacagttcccaagatgttggtcaacttcctttcagagaaaaaaaccatctcctttgctggatgttttctccaattttatttcttcttctctttgggtacatctgaatgcttgattttgactgtgatggcctttgatcagtaccttgttatctgccatcccttgcactatcctaataaatcatgactgggcatctctgtgccaaactggtcatactgtgctgggtttgtggatttctgtgtttcctgatccccactgttctcatctctcagatgcccttctgtggtccaaacattaatgaccatgttgtgtgtgacccagggccactatttgcattggcttgtgtctctgccccaagaatccaactgttttgctacactctaagc

SEQ ID NO: 1496 - protein, 151 aa, Homo sapiens [sequence omitted]

SEQ ID NO: 1497 - DNA, 877 bp, Homo sapiens
  source (1)..(877)
  CDS (201)..(677)
agaacactaccatttcccttgaaggctgcatgacccagctctttgcagagcatttctctgatggtgtagcgatcatccttctcactgtgatggtctgtgactgctatgaggccatcagtaagcccctgcatgacacaaccatcatgagtccacgggtgtgctgctgttggtggtagaagcttgggtggggggattaacacatgccacaatacagctttttttttttcatatatcaaatacccttctgtggtcccaatattattgaccattttatatgtgatttgtttccattgttaaaacttgcttacatggacacccacatgctgggtctcttagtcatcctcaacagtggggtgatgtgtatggccatcttccttatcctaattgcatcctacattgtcaccctgtactctctgaagtcttgcagctcggtaggtcgacgcaacacactttccacctgtggctcccaccacacagtggtcatcttgttcttcgtggagtgtattttcttgtacataagacctgtggtcacttaccccatagacaaggatatggctatttcctttactattgttgcacccatgttaaatcctctgatctataccctgaggggcatcaaggtaaaaaatgccataagaaaaatgtggatgaaacaggggaccctaggtggtcactagcttacatgctaagagtaaatttttaatgtaaaaccagtaaagttttaccctcctcattccctctaatccactggatacacaggagccaaaggcatttttttaaaaaatttcatttggagacagggtctcactttgtctcccaggctggagtgcagtggcacagtcaggtctcacttcagcctcagcatcccaagctcaag

SEQ ID NO: 1498 - protein, 158 aa, Homo sapiens [sequence omitted]

SEQ ID NO: 1499 - DNA, 874 bp, Homo sapiens
  source (1)..(874)
  CDS (201)..(674)
attagaaacaaatttaattttataattggatttaagaaccacaaacccaaaacagtttggagctccttaatacaagttaaaaataccctagtggtattgaaagtagcacagaatacaatttatgttataatgatgttcctggtttattctaaaatttgaccatatttaatatttctgtttaaccacgagagaaacggtcaatgctaatgattcataccctgagaatcagtcacctattgatggaaatagccaacttgggagagagacagactagattttactttaaagtcagctatattttatatcagtgccctccaataaataatttatttttcttttccctgccttccccgccttctctgccttccctgccttccctttcttccttttctttctttccttctttttcttttctttttctttctttctttctctttctttctctctccccttccttccttccttccttccttccttccttccttccttcaaaaccatcctttctttctttcttccttccttccttctctttctttctttttctttctttcaactgggtctctttctgtcacccagcctggactgcagtggcacaatctcagctcactgcaacctccagctccagggttcaagcaattctcacgtgtcagcctcccaagcagctgggattataggcacctgccaccatgctgggctaatttttgtatttttagtagagacagggtttcaccatattgcctaggctagtcttggactcccggcctaagtgatcttcccacatcggcctcccaaagtgccaggattacaggtgtgagccaccatgcctggccatatacgtaatttataatagacacattaagtaaaatgaagtaag

SEQ ID NO: 1500 - protein, 157 aa, Homo sapiens
MLMIHTLRISHLLMEIANLGERQTRFYFKVSYILYQCPPINNLFFFSLPSPPSLPSLPSLSSFSFFPSFSFLFLSFFLFLSLSPSFLPSFLPSFLPSKPSFLSFFLPSFSFFLFLSFNWVSFCHPAWTAVAQSQLTATSSSRVQAILTCQPPKQLGL

SEQ ID NO: 1501 - DNA, 1015 bp, Homo sapiens
  source (1)..(1015)
  CDS (201)..(815)
tcatattttccctcctttctattgttgtgatttatcaaaataaatatatgtaggaattgagtcatgaaagtcacagtattgttgtttaagcaaaagtctaactgtttactactttataatatacatgataaagaattttggttgtttccaagaagaaacagcatgctccatttcatgtttcaattacctctgccatctccatgtcttccagactaatgaatatgtccagcatggaaacgattaattttgttagctactttatcctcatgggctttccctcaagcccagaaatgcagctcctctactttggtctcttctcattagcctatactctcaccctgatgggaaatgcatccattgtctgtgctgtgtggtgggaccagcaccttcacactcccatgtacaccctcttgggaaatttctctctcctggaaatatgttatgttattacaactgttcctaaactgctggccaacttcctctccacaagcaagtccatctcattcatgagttgttttgcacagttctacttcttcttatctttggggtatgatgagggcttcttcctttgcatcatggcctttgacaggtatcttgccatctgccgccctctacgttatccatgcattatgaataagcaagtatgcactggccttatcatctttgcatggtcatgtgtctttgtaatcttcctaattctgttgattctcatttcacagatatcctactgtggcccaaatattatcaaccattttgtttgtgatcctgtaccattggtgatgctgtcctgttctgcagacataatcatcacctagctcatttactccacattcaattctatcttcatgattggcacctttctctttatcctttgttcctatgctctggtgattctggctgtaatacagatgccttcagaggctggcaaacgaaaggctttctccacttgtgcctctcatttggcagttgtcaccttgttttatggctctatcatggtgatgtatgttagtcctgg

SEQ ID NO: 1502 - protein, 204 aa, Homo sapiens [sequence omitted]

SEQ ID NO: 1503 - DNA, 925 bp, Homo sapiens
  source (1)..(925)
  CDS (201)..(725)
gatggatggatcacttgcaggagactcattcctctccttgactttgctctgtgagattcccaccaatcttgggaggcccagcaggaccctcttgggaagcccagcaggtcagaaggcaaccctgactctccttcctaggcctggtaagttaccaacctttgtctttgcagggtgtgcccaggcagccaaggcagcccaccatggcccagtttctctcagtgttctctgggaagctggattgggacaacaggacagagaccccaggacaagtgaacatgagtcatacgggaggcgagtggttggtgggcaaacaggtggttttcatcctgacagtgctggtggccttctgtgggctggtgggcaatggtgtggtgtgctggcttttctgcttccaggtcaggagcagcccctacatgacctatgtccttaacctggccgctgctgatatggtcaacctctcctgtgtaactgtgatcctgttggagaaaatcctcatgctgtatcaccaggtgacattgcaggtggccatgtttctggagcctgtgtcctatttctctgacacagtgagtctctgtctcctggtggccatgaatattgagagctttctgtgtgtcctctgtcccacctggtgctgccaccgcccaaagcacacctctgctgtgatgagcatcctgagctgggccctggccctttctttgcatgtggttagccaggtttgtgagtaatgggagaagggcctggcatgtgaccaatttcaggcaggctttataatatttcacatgcttatttgtcttgtggtgggcatttccagcctgactttgatcatcaggagcctgtactgcctgaagaactgttcacccatccggatctaccacattgtccgctttgtggccatcagcttcctcgtttggggcctgcccttagt

SEQ ID NO: 1504 - protein, 174 aa, Homo sapiens [sequence omitted]

SEQ ID NO: 1505 - DNA, 964 bp, Homo sapiens
  source (1)..(964)
  CDS (201)..(764)
aattctcccgcctcagcctccctagaagctgggattacaggggcatgccaccacacccatctaatttttgtattcttagtagagatggggtttcaccatgttgaccaggctggtcttgaactcctgacctcaggtgatccacccgcctctgcctcccaaaatgctgggattacaggcatgagctaccgtgcccagcctccatgtacttcttcctgacaaactttgcaggtctggagatcttctactttttcaccattgcccctctgactctggccaatgtcctacccatggggagaaacctcatttccctgcccggctgtggaggccagatgttcttcttcatcttcctgggaagggctgactgcatcctgctggccgtcatggcctttgactggtttgtggccatctgttgtcctctctgttacggcctcatcatgagctggaggttgtgtgtccagctgaccctggggtctctgctgttggggttcttcttagccatgcagctgaccgtgcttatcttccaactccctttatgcagcagcaaagaaatcagcacgttctactgtgatgtcctccctgtcatgagactggcctgtgcagatacctgggtccatgaggccactatgtctatggtcagcaccacctttctcaccgtccccttcctgctcatcactctttcctatgtctccatcatggccgccatcttgaagatttgctctgcagaggggaggcacaaggccttctccacctttcctcccacctgactgtggttctcctccaggactgatgtacacgcctcgccttcttgtgtcccagctctagctactatcctgagaggggccaggcagtgtctgtggtttacaccttcattacccctgtgctgaaccctttgatctacagcatgaggaacacagaacttaaggatgctttgaagagagcaatgacgagggtcccgctgctctaa

SEQ ID NO: 1506 - protein, 187 aa, Homo sapiens [sequence omitted]

SEQ ID NO: 1507 - DNA, 874 bp, Homo sapiens
  source (1)..(874)
  CDS (201)..(674)
ccaggagattcagctctccctctggagataaagagtgaggatccattattaatgttttctacacctgttcctacagatcacacccagcaagttaatggctgtggaaaatgactcttcagtgacaagagtttattcttttgggattaacagaccagcctgagatctaattgcccctgtttttcctgttcttggtgaactatatgaccaccatggtgggcaacttgagtttaattaatctaatttgcctgaattcacaccttcacactcccatgtattttttccttttcaatctgtccttcattgatctctgttattcatttgtctttacccccaaaatgctgatgagctttatttcagagaggaacatcatctcctttccaggatgcataactcagctctttttcttctgcttttttgtccactctgagtgctatgtactgacagccatggcctatgatcgctatgtggccatctgcaaaccccttctgtacatggtcaccacgtcccctcagatctgttctctactgatgcttggttcatatgtgatggggtttgctggggccatggtccacacagagtgtatgatgaagctcatcttttgtgactccaatgtcatcaaccattacatgtgtgacatcttcccactgctccagctctcctgcagcagcacctaggccaatgagctggtgatgtctgttattgtaggcacagttgttatagtaccaagcctcattatcttaatctcttatgctttgattcttttcaatatccttcacatgtcctcagccgagggttggttcaaagccatcggtacctgtggctcccacataataactgttggcctattctatgaatttgggctgatcactcatgt

SEQ ID NO: 1508 - protein, 157 aa, Homo sapiens [sequence omitted]

SEQ ID NO: 1509 - DNA, 940 bp, Homo sapiens
  source (1)..(940)
  CDS (201)..(740)
tgaaatagactccagacttcacacacctgtgtatttctttctcagaaatttgtcctatttggatctccgctactccacagttattgcttccaaaactgactactttattttccaaggaaaagaaaatttcttacaatggttgagcaacacagttgtttttctttgctctctttgttgggactgaaggtttttttctggatatgatggcatatgatcgcttctcagctatttgttcacctttcttctatactgtatgtatgtctcagcaagcttgtgtttgtttggtggttggctcctctatctgtggatgcatcaactccatgatacaaacaggttttaccttcagtttgcatttctgtggagaaaacagattagagcactttttctgtgatgtctcagtcatgatcaagatctcatgtattgacatccttgtgaatgaggtagtactgtttattctctctgctctcatcaccaccaccacaactgtcattctggcttcctatgtgcatatcctctccactgtcctgaagattctctcaacccacggcagaaggaagactttctccacttgcagctctcacatcactgtggtgagtttattctatggaactgtattcttcatgtatgcccaacctggggccatctccaaagagcaaggttatagttgtattctaaactcttgtcatccctatgttaaatatctgatttatagtctaagaaataggtgcaaaatgctttgaaaaggacattgataagaaaaatatcttttcattggcctctagccatctataaaactatagaagcaactaagagcaatactatcagtaatttattatagaataatttcaaagaaaaacatctgaaagtatggagatgaaagtttattttcgtgttttgaccatcaacagatccttttaaaaatgaattaaaggccaggcgt

SEQ ID NO: 1510 - protein, 179 aa, Homo sapiens [sequence omitted]

SEQ ID NO: 1511 - DNA, 1018 bp, Homo sapiens; identical to SEQ ID NO: 1317
  source (1)..(1018)
  CDS (201)..(818)

SEQ ID NO: 1512 - protein, 205 aa, Homo sapiens [sequence omitted]

SEQ ID NO: 1513 - DNA, 1017 bp, Homo sapiens
  source (1)..(1017)
  CDS (203)..(817)
gggaacattctcatcattgtcctggtacagttagattctggactgttcacgcccatgtacttatttatcagtgtcctctcctttgtagaggtgtggtatgtcagcaccacagtgcccatgctgctgcacaccttgctccaagggtgttcacccgtctcatcagctgtatgctttattcagctatgtctttcattccttagggatgactgagtgctacctgctgggtgtcatggcactggatagctaccttatcatctgccacccactccactaccacgcactcatgagcagacaggtacagttacgactagctggggccagttgggtggctggcttctcagctgcacttgtgccagccaccctcactgccactctgcccttctgcttgaaagaggtggcccattacttttgtgacttggcaccactaatgcggttggcatgtgtggacacaagctggcatgctagggcccatggcacagtgattggtgtggccactggttgcaactttgtgctcattttgggactctatggaggtatcctgaatgctgtgctgaagctaccctcagctgccagtagtgccaaggccttctctacctgttcctcccacgtaactgtggtggcactattctatgcttctgccttcacagtatatgtgggctcacctgggagtcgacctgagagcacagacaagcttgttgccttggtttatgcccttattacccctttcctcaatcctatcatctatagccttcgcaacaaggaggtgaagaaggctttaaggagagtcatggctgggcgcggtggctcacgcctgtaatcccagcactctgggaggccgaggcgggtggatcacgaggtcaggagatcgagaccacggtgaaaccccatctctactaaaaatacaaaaaaaattagccaggctcggtggcgggtgcctgtagtcccagctactcgggaggctgaggcaggagaatggcgtgaacccgggaggcggagcttgcagtgagtcgagatcgc

SEQ ID NO: 1514 - protein, 204 aa, Homo sapiens [sequence omitted]

SEQ ID NO: 1515 - DNA, 1038 bp, Homo sapiens
  source (1)..(1038)
  CDS (201)..(694)
  CDS (811)..(838)
tgttcaaccaatagccacaaaagtagtagcctcaggagactcattctcgcagtgaattgggcatgcaccaaattccaggcaagatgaggagacattgtggaagatgctctccttcttttaagccaaagagacgtcaataattgtggcatattattaattagtgccttattcctctacaatttttttcagagaggtcaggaatggttgaagaaaatcataccatgaaaaatgagtttatcctcacaggatttacagatcaccctgagctgaagactctgctgtttgtggtgttctttgccatctatctgatcaccgtggtggggaatattagtttggtggcactgatatttacacactgtcggcttcacacaccaatgtacatctttctgggaaatctggctcttgtggattcttgctgtgcctgtgctattacccccaaaatgttagagaacttcttttctgagggcaaaaggatttccctctatgaatgtgcagtacagttttattttctttgcactgtggaaactgcagactgctttcttctggcagcagtggcctatgaccgctatgtggccatctgcaacccactgcagtaccacatcatgatgtccaagaaactctgcattcagatgaccacaggcgccttcatagctggaaatctgcattccatgattcatgtagggcttgtatttaggttagttttctgtggattgaatcacatcaaccacttttactgtgatactcttcccttgtatagactctcctgtgttgaccctttcatcaatgaactggttctattcatcttctcaggttcagttcaagtctttaccataggtagtgtcttaatatcttatctctatattcttcttactattttcagaatgaaatccaaggagggaagggccaaagccttttctacttgtgcatcccacttttcatcagtttcattattctatggatctatttttttcctatacattagaccaaatttgcttgaagaaggaggtaatgatataccagctgctattttatttacaa

SEQ ID NO: 1516 - protein, 173 aa, Homo sapiens
MVEENHTMKNEFILTGFTDHPELKTLLFVVFFAIYLITVVGNISLVALIFTHCRLHTPMYIFLGNLALVDSCCACAITPKMLENFFSEGKRISLYECAVQFYFLCTVETADCFLLAAVAYDRYVAICNPLQYHIMMSKKLCIQMTTGAFIAGNLHSMIHVGLVFRFSSSLYHR

SEQ ID NO: 1517 - DNA, 1317 bp, Homo sapiens
  source (1)..(1317)
  CDS (201)..(522)
  CDS (753)..(1117)
ttttctgttatcaaatgcattttattgcaataaatatattgaagctcagaaaactcccatcacctgcccaaggcagccaaaatttatgcttagtgttgattatatgtcaggtgcttagcatagaaaatgccatcatttggtatcggttgaggcaattaaactcttttctactctatttgtaggcgtggtatccataagccatgcagaggagcaatcacacagtgactgagttcatcctgctgggcttcaccacagatccagggatgcaactgggcctctttgtggtgttcctgggtgtgtactgtctgactgtggtaggaagtagcaccctcatcgtgttgatctgtaatgactcccacctacacacacccatgtattttgtcattggaaatctgtcatttctggatctctggtattcttctgtctacaccccaaagatcctagtgacctgcatctctgaagacaaaagcatctcctttgctggctgcctgtgtcagttcttctctgccaggctggcctatagtgagtgctacctactggctgccatggcttatgaccactacgtggccatctccaagcccctgctttatgctcagaccatgccaaggagattgtgcatctgtttggttttatattcctatactgggggttttgtcaatgcaataatattaaccagcaacacattcacattggatttttgtggtgacaatgtcattgatgactttttctgtgatgtcccacccctcgtgaagctggcatgcagtgtgagagctaccaggctgtgctgcacttccttctggcctccaatgtcatctcccctactgtgctcatccttgcctcttacctctccatcatcaccaccatcctgaggatccactctacccagggccgcatcaaagtcttctccacatgctcctcccacctgatctccgttaccttatactatggctccattctctacaactactcccggccaagttccagctactccctcaagagggacaaaatggtttctaccttttatactatgctgttccccatgttgaatcccatgatctacagtctgaggaataaagacatgaaagacgctctgaaaaaattcttcaagtcagcataatccaaagtctgaattgccataatgttctcaaatcaatgctaagtgatgacaaactgctcagagaggttacagaactggatttttatttcttttttaccattgaacaaaattcaacaagaaaaattgtgtttctttgtgtttcgtttgtttgttatgattttgagatcagactataatatatactacagtattgtagattc

SEQ ID NO: 1518 - protein, 228 aa, Homo sapiens
MQRSNHTVTEFILLGFTTDPGMQLGLFVVFLGVYCLTVVGSSTLIVLICNDSHLHTPMYFVIGNLSFLDLWYSSVYTPKILVTCISEDKSISFAGCLCQFFSARLAYTGMQCESYQAVLHFLLASNVISPTVLILASYLSIITTILRIHSTQGRIKVFSTCSSHLISVTLYYGSILYNYSRPSSSYSLKRDKMVSTFYTMLFPMLNPMIYSLRNKDMKDALKKFFKSA

SEQ ID NO: 1519 - DNA, 982 bp, Homo sapiens
  source (1)..(982)
  CDS (201)..(782)
gctgttcccaacttcacactcccatgtacctgttcctcagccacttggcttttgtggacatagggcttgccacagtagtcacacctataatgcttatgggattcctaagacgtggaacagccctccctgtcactagctgtgaagcccagctctgttctgtagtcatgtttgggacgtctgaatgcttcctactggcgaccatggcctatgatcgctatgtggccatctgctcacccctggtgaactccacccacttgtcccccataatctgcatactcttagtgggggtttgctacctgggtggatgtgtgaatgcctcaacatttactagttgtttattgagtctgtctttctgtggaccaaatcagatagatcattttttctgtgatttctctcctttgttgaaactttcctgctcaaatatctccattcctgaaattatcccttccatctcttctggatctatcattgtggtcacagtatttgccatagccatctcctacatctacatcctcatcaccatcctgaagatgcgctccgccgaggggcgccacaaggccttctccacctgtacctcccacctcgctgcggttactctctactatggaacgattaccttcatttatgtgatgcccaaatccagttactcaactagccagaacagattgatatcgctgtcctacacagtggtaatccccatactgaacccctttatctatagtctgaggaacagagatgtaaaggaggcactaagaaaggcaactgtcagaatatattcttaggatcaatttgtagcatttcagacgacctataaagttttcattatcggtatcacgtttaggacctaccaaatactacttaactgattgcttaaaataaaattatatttatttgttctaactttcatttttaaatacttgtagaccaattgggagacctagatgtcagtaataatgatagtaataattattactattattaa

SEQ ID NO: 1520 - protein, 193 aa, Homo sapiens
MAYDRYVAICSPLVNSTHLSPIICILLVGVCYLGGCVNASTFTSCLLSLSFCGPNQIDHFFCDFSPLLKLSCSNISIPEIIPSISSGSIIVVTVFAIAISYIYILITILKMRSAEGRHKAFSTCTSHLAAVTLYYGTITFIYVMPKSSYSTSQNRLISLSYTVVIPILNPFIYSLRNRDVKEALRKATVRIYS

SEQ ID NO: 1521 - DNA, 1042 bp, Homo sapiens
  source (1)..(1042)
  CDS (201)..(842)
cctgactgggattccaggaatgccagagaaagacttatggatggccttgcccctctgtcttctttatagcaccacgatcttgggaaatgtcaccatccttgttgtcatcaaagttgagcaaagtctccatgagcccatgtatttttctagccatgttagctgccactgacctcagcctttcactgtcttccatgcctaccatggtcagtgttcactggttcaactggcgttcaataacttttaatggctgccttatccagatgttcttcatccacacatttgggggagtggaatcaggtgttctggtggccatggcctttgatcgctttgtggccatccgctttcctttgcactatgctacaattctcactcacagtgtcatcagcaagattgcagcagccatcctgctacggagtgtgggggctgtgctccctgtgccttttctcatcaaaaggttacctttctgtcactccaatgtcctctcccatgcatactgcctccatcaggatgccatgaggcttgcctgtgctgacactggtgtcaatagcatctatggcctgttggctgtgatcttcatcattgtactagatgccttaatacttttggcctcttacattctaatcctgcaggcagtattgagcattgcttcccaggaagacaggctcaaggctctcaacacctgtctctctcatatctgcagtgctgcttttctatgtgcctctcattggtatgaccctaattcatcgctatgggaagcatttgtcaccactaatacacacattcatggccaatatctacctgcttctccctcctgtgctcaatcccattgtgtacagtgttaggaccaagcagatctgatagcagattgtccaggccttttgtggggctagggttagcccttaatggcatctactatttccaagtaaatgcaatcaagttagagaagagtatcaaatacagcactatccaatagaaattcccacagaagtggatattttctatttctctgctgtttagtaactagtagctgtacatggctatt

SEQ ID NO: 1522 - protein, 213 aa, Homo sapiens
MVSVHWFNWRSITFNGCLIQMFFIHTFGGVESGVLVAMAFDRFVAIRFPLHYATILTHSVISKIAAAILLRSVGAVLPVPFLIKRLPFCHSNVLSHAYCLHQDAMRLACADTGVNSIYGLLAVIFIIVLDALILLASYILILQAVLSIASQEDRLKALNTCLSHICSAAFLCASHWYDPNSSLWEAFVTTNTHIHGQYLPASPSCAQSHCVQC

SEQ ID NO: 1523 - DNA, 1108 bp, Homo sapiens
  source (1)..(1108)
  CDS (201)..(462)
  CDS (700)..(908)
taggactaaccaatgactcagaactgcaggttcccctctttataacgttccccttcatctatattatcactctggttggaaacctgggaattattgtattgatattctgggattcctgtctccacaatcccatgtacttttttctcagtaacttgtctctagtggacttttgctactcttcagctgtcactcccatcgtcatggctggattccttatagaagacaaggtcatctcttacaatgcatgtgctgctcaaatgtatatctttgtagcttttgccactgtggaaaattacctcttggcctcaatggcctatgaccgctatgcagcagtgtgcaaacccctacattacaccacaaccatgacaacaactgtgtgtgctcgtctggccataggctcctacctctgtggtttcctgaatgcctccatccacactggggacacatttagtctctctttctgtaagtccaatgaagtccatcactttttctgtgatattccagcagtcatggttctctcttgctctgatagacatattagcgagcttgttcttatttatgttgtgagcttcaatatctttatagctctcctggttatcttgatatcctacacattcatttttatcaccatcctaaagatgcactcagcttcagtataccagaagcctttgtccacctgtgcctctcatttcattgcagtcggcatcttctatgggactattatcttcatgtacttacaacccagctccagtcactccatggacacagacaaaatggcacctgtgttctatacaatggtcatccccatgctgaaccctctggtctatagtctgaggaacaaggaagtgaagagtgcattcaagaaagttgttgagaaggcaaaattgtctgtaggatggtcagtttaacattgtgggatgcaccataacctagttttatttctctcggatcttctccatgttctgaatcacatttaaggtccacaataaagttaaattcctgaagtgattgccatgcctgtttaaaagtctattgtctaaataaaaggaaacattatgtccagaaacataacatctgaacaagaatggctaagacatcttgggacttc

SEQ ID NO: 1524 - protein, 156 aa, Homo sapiens
MAGFLIEDKVISYNACAAQMYIFVAFATVENYLLASMAYDRYAAVCKPLHYTTTMTTTVCARLAIGSYLCGFLNASIHTGDTFSLSFFGIFYGTIIFMYLQPSSSHSMDTDKMAPVFYTMVIPMLNPLVYSLRNKEVKSAFKKVVEKAKLSVGWSV

SEQ ID NO: 1525 - DNA, 6476 bp, Homo sapiens
  source (1)..(6476)
  CDS (201)..(708)
  CDS (6116)..(6276)
aattgcttgcatccaaaatatacacacagcattaagggctggtttttatcttttattttcccaatcctctttccttctcaaggtgtccaagacacacagagccactgaatctcacaggtgtctgagaattcctcctcctgggactctcagaggatccagaactgcagccggtcctcgctttgctctccctgtccctgtccatgtatctggtcacggtgctgaggaacctgctcagcatcctggctgtcagctctgactcccacctccacacccccatgtacttcttcctctccaacctgtgctgggctgacatcggttacacctcggccacggttcccaagatgattgtggacacgcagtcgcatggcagagtcatctctcatgctggctgcctgacacagatgtctttcttggtcctttttgcatgtatagaagacatgctcctgactgtgatggcctatgactgctttgtagccatctgttgccctctgcactacccagtcatcgtgaatcctcacctctgtgtcttcttcgttttggtgtcctttttccttagcctgttggattcccagctgcacagttggattgtgttacaattcaccatcatcaagaatgtggaaatctctaattttgtctgtgacccctctcaacttctcaaacttgcctgttctgacagcgtcatcaatagcatattcatatattttgatagtactatgtttggttttcttcccatttcagggatccttttgtcttactctaaaattgtcccctccgttctaaggatgtcatcgtcagatgggaagtataaagccttctccacctgtggctctcacctagcagttgtttgctgatttgatggaacaggcattggcatgtacctgacttcagctgtggcaccaccccccaggaatggtgtcgtggagtcagggatgtacgctgtggtcacccccatgctgaaccttttcatctacagcctgagaaacaggcacacacaaagtgccctgcggaggctgcgcacagaacagttgaatctcatgatctcttgcatcctttttcttgtgtgggtgaaaaagggaaaccacatcaaatctctacatctgcaaatcctgccccttggtcacattatttttgtggcttgacggcttttattcctttccgcatttcctttgtgaatattgctttcttcgttatgcctttcactggaatgggtgagtattctgggatcctttgttcagcagaaacctcatgacagaatcctctatacctaggcggcctcttttagtttctgagcaataaccctgtcatccaggtggaatcacaaccatctttttatatacatgaagtcctcacttcattttggaattccctgaaaactgactttatggaaacaatgtacaagaggtcctccaacaccattggttgttcaaagttgtgtagttatactgttgatgaaaaataagtggtttcactatacataactttgcttcaaggtgaagtttccaagagactttcaaagatgttaagtgaggacatactgtacatcaaattcataacctcttccacagttcatgtggaatttctttataaactgcttctagagaatctatttaggcaggttgtgtgtagagatccatgtcgccgttcctcaatcttggctttgagtcaaatcacctggggagcttacaaatgatgaggcctgggtctcgatacctgagattctgatttccttgcacctgtgtgagtatgtggatttttttttttttcctttaaagcaccagaggtggttccaatgacgaagtttttagaggcatcaagctccaatgagtaagaacagaaattaactgtaatatgatttcttcaaatattatcttcaaatgcgttgtccatcaacaccatacaatgtgtattatgctgtttttttcttaccatttcgcattttctatctctttcttttcctttttttttttgagtcagagtttcactcttgttgctcaggctggagttcaatggcacggtctcggctcattgcaacctctgcctcccgtattcaagcgattctcctgtctcagccttccaagtagctggtattacaggcatgcgctaccatgcctgtctaattttttttttttttttgtattgttagtagagacaatttctccattttggtcaggctggtcttgaactcccgacctcaggtggtccgcccgcttccacctcccaatgttttgggattacaggcgtgagcgaccgcgcccagccaccacttagcatttacattttacatttgttgaagttatagatttatacacacattgattgctgctttgttatacacttgcacatacataagatgggaaatagaaaagaataaaatgggcacagtatccctgaagtttcacattccgagacattttaaaaacattagctctttagaaatttgtttcgattaagaaactgtggtatacacacccaatgaagtattattcagcctaaaaaggaagaaaatcctctccgctgcagagaaaatggatgagattgcaggtctgtatattaaatgaaagaagccaggcacagaatgacaaatatttcatgtcctcacttctatgtaggaagaaaaaaggaaaccttggccaggtgcggtggctcaggcctgtaatcccagcactttgggaggccgagtcgcacggatcatttgaggccaggagttcgagacccgcctggccaacatggtgaaaccccgtctctacggaaaacacaaacaattagccgggcgtggtgacgcgtgcctgtagtctcagctactcggagggctgaggcccaagaagcgcttgaactcgggaggcggaggttgcagtgagcccggactgtgcctgtgtactccaacctgggcaacagaaagagactccatcacacacctacacacaaaaggaatctcaggaaggtggaaagtataaaggtggttagcagacgctaggaagaaaaaggggtgggatggggaatgaagagaagtggataattgggtcccaaaatacacaaagatggaataagtgagttccagtgtttgatagcacagtatggaaattttagttcacaagaatttcttgcatatttccagatgctttggtaagaagcttcctaatttcctaagagccagcgggggccgcggggagcgcctcgtcccctgggatgggggtcctaagagccagggggggaagcggggctggctcttactccccgcaccgctgagggcgcctcgcccccctgccatgaggatcgtcatatccagggtgggattggggggtgatattattccccgaatcgcggggggtgcctcacccccccgtccatgtggatcgtcatatccagggtgggagtggggcatgatattactcccagaatcgcggggggtgcctcacccccctgctatggggatcgtcatgtccagggtgggagtggaaggtgatattactccccgaatcgcggggcccccgcccccatgcgatgtgaatcgtaatatccatggggggagagggcggtgatattactccccgatttttcctaggatcctttctaaactgccaccctccgtttacaccctgcgacattatcttccatattgtagcaacatgcagctgctaaagtcgcagggggtgtacacccttcaatattattcgtaattttctaggggaaagttaaacctcatgtcacaggactctgtacactgtgatgtcatcccaatatcctagctttatcttaataataatgtcacattgtgtgtacaccttgtggtgttattcttattctcctaagtggaggttgttttattgttacaggggatattttccttttgatattattcgtaatgtcctagagggatgtcacccgttatgtcacagggtttgtacaccttgtcaaattactcgtattatcctcataagatgtcactcctcatatcacagagggtgtacattctgtgacattgtcgtcatattctagggaaatgtcacttttaatgtcacagaaggtgcacaccttctgaaattattcgttataattttgtggggtgttacccctaatgtcacacggcgtgtacacacagtgatgttacgtgcaatatgctgtggaaatgttgctcgtaattcacaggtcctgttcaccctttaatattatttgtactcttctaggaaaacgttactgctaatgtcacagggcgtgtagaccctgttataaaattcctaatatcccagcgggagttcactactaattgcacaatgcgtgtagaccctttgatattattcgtattgtcctgaagagatgttactactgacgtcccaatgcaggtacattctctgatcttattggttatatcctcggggggtgttacttctaatgtcacacagggtgtactccctgtgttctatttcgtaatatcctagggcaattttactccgaatgacacagggggtgtacacattgtgatattatttgtgatagtctagaaagatggtgctcctaatgtcacagggctgtacaccctgtgatagtattcataatgtcccaggggtctatactcctattggcacagacgataacaccctgtgactctattcgtaatattctagtgagataatacttctcatgtcacagagggtgtacaccccatgttattattcttactattctagggggatgttactcctaatgtcacagggatgtacaacctgtgatattattcatagtgtacctgagggatattagcactaatgtcacaatgtgtgtacaccttgtgatattatttgtcgtatcctaatgccacagggggtgtgttccgtgtgatattcttcctagcatcctagacggatattgctcctaacgtcacagggtgtgtacaccttgtcacatcattcacaatatcctaaaactactttattcctccggtcacagagggtgttcaccctgtgatatttttcatcatagctttgtgggatgttactcctaaagtcacacggggtgtacacagagtcacacagtgatatgagctgtaatattctatagacatgttaatcgtaaatcacaggggctgtacctcctgtgatattattcataatattctaggggaatgttgctactattgtcacgggggtgtacaccctgtgatgtgactcgtcatatcccagcgggatgttactactaatgtcacaatgcctgtataccctgtgatattatttgtaatatcctaaagagatgttactactaaggtcacaatgcatgtacaccctctgatatgattcgttatatcctcgggggatgttactcctaatgtcacatggggtgtactccctgtcatattattcgtaatatccaagggggaggttatttttaatgtcactgggggtgacattacacattaaaaatgcgtattcaacacctgtgatactatccctaatatcctaggggtatgctcttccgaatgtcacatggggtgtacaccatgtgtgtacacgtgctgtgatattattcgtaatatcctaggggaacgttactcctgatgacacaggcagtgtacaccatgtgtgtacccctcctgtgttattattcataatatcctagggggatgtttctttgaatgtcacaaagagtgtacaaaacgtcacaggaagtgtacacgttgtgacgttatctgtaataccctagaaggatgttactcctaatatgtcacaggggtgtacacgctttgatgttatttataatctcctagagagatattacttcaaatatcacagtggatgtacacacatagtgtataccctgtgatggtattcataatatcctagggagatacaacccctgatatcacagtgcgtgtaccccgtgtgtgtacacccttgatattagtcgtactatccagggtaaatattactcctcatatcacacagtgtgcacaccctgtgatatttttcatcctactttagggagatattgcttctaatatcacagtgggtgtaccccatgtgtgtatactctgtgacagtatattttatatcctagggaggtattactcctagtatcacagtgggtgttcaccctgtgatatcattcttatttcatcatgcagcctttttcgacccacactgcaaaaggaatggaacagataagaaggtattgagattagaacgtgctgccgtgcggccgccgcaggacacttttcatatccctgtttctcggactgtagatgaaggggttcatcatgggggtgaccactgcgtacatcactgaggccactgcagtctttctcggggaagatgacacatctgaactgaggtaccctccaacgcctgttccataaaatcaggaaacatctgacaggtgagacccataggtggagaaggctttatacttcccacctgatgatgaaaccctcagaatggaggaaacaattttatcgtaagagaaaagtgtccccgagatgggaagaa

SEQ ID NO: 1526 - protein, 222 aa, Homo sapiens
MYLVTVLRNLLSILAVSSDSHLHTPMYFFLSNLCWADIGYTSATVPKMIVDTQSHGRVISHAGCLTQMSFLVLFACIEDMLLTVMAYDCFVAICCPLHYPVIVNPHLCVFFVLVSFFLSLLDSQLHSWIVLQFTIIKNVEISNFVCDPSQLLKLACSDSVINSIFIYFDTFFDPHCKRNGTDKKVLRLERAAVRPPQDTFHIPVSRTVDEGVHHGGDHCVHH

SEQ ID NO: 1527 - DNA, 3572 bp, Homo sapiens
  source (1)..(3572)
  CDS (201)..(609)
  CDS (2651)..(3372)
taagtcataaaaaataatatgtaattgaatcatttgaaatatctaggaaggccattgggaaaaatttttggccactgtgagtctggaaaagagacaatagggaactatctgatggtaggctgccactaaattagtctgtgcaaaaatcccactttgagtttgattgctatattttttcctagttctcctcccaactggaaatgctagagtccttccagaaatcagagcaaatggcctggagcaatcagtctgcggtaaccgaattcatactacggggtctgtccagttctttagaactccagattttctacttcctgtttttctccatagtctatgcagccactgtgctggggaaccttcttattgtggtcaccattgcatcagagccacaccttcattcccctatgtactttctgctgggcaatctctccttcattgacatgtccctggcctcatttgccacccccaaaatgattgcagacttccttagagaacacaaagccatctcttttgaaggctgcatgacccagatgttcttcctacatctcttagggggtgctgagattgtactgctgatctccatgtcctttgataggtacgtggctatctgtaagcctctacattacctaacaatcatgagccgaagaatgtgtgttgggcttgtgatactttcctggattgtcggcatcttccatgctctgagtcagttagcatttacagtgaatctgcccttctgtggacccaatgaagtagacagtttcttttgtgacctccctttggtgattaaacttgcttgtgttgacacatatattctgggggtgttcatgatctcaaccagtggcatgattgcctggtgtgcttcatcctcttggtgatctcttacactatcatcctggtcaccgttcggcagcgttcctctggtggatcctccaaagccctctccacgtgcagtgcccactttactgttgtgacccttttctttggcccatgcactttcatttatgtgtggcctttcacaaatttcccaatagacaaagtactctcagtattttataccatatacactcccctcttgaatccagtgatctataccgttaggaataaagatgtcaagtattccatgaggaaactaagcagccatatctttaaatctaggaagactgatcatactccttaattttcctcataggaaaataaaatacctgttcagcatttatccccctcattcagttggtcaacatattgatgctattgcaagaactcaattagttcatggtagaactgtttctgtaatcagcctcagctgtcatgaagttctggtcatattaattgtttcttacacaacctaacatttactatagagcattataaaatgtatacttaacattttagtgtgaaaggacccacaatgtctaatatttatttttttcagatctatctgaatataatttcctttgagactttcacatgttttaagaaagagtagatttcctccctatctctagcaatagtctctaataaaaaagacaagtataaaagcagcagcacctagtatagtaccctatacactaaagtagcaatagaatgtttattgctgacaagaagctaatgaatgtgggttttttgtagctcaaaattcagaaggcaatagagggtttttggtaagtaaaaatatttgccatttaatatgtttgtaacccattgtgggtaagaataggaatgtatcttacttatctttagtccctacgttccctagagtggacttcatagttttaaaacagtataggaaactccatgcaaattcttatagtcatatctatatctatgtgtatctatcacatctagctatctgtctatctatctatctatctaaaagattaaaaggaacctagagtactatacaacaaatctcatccatagccctgttctacaaaagataaaaataagacccaatgatacactaggtttttcaaaatcatgctaattagagacaaaatctacatcattcacttaaaaatatagatatttatttcctaagcagtaacaaattgttttggtgtcatgatgtttactgtaccatttttttaaaaatttttttagtatttattgatcattcttgggtgtttctcggagagggggatttggcagggtcataggacaatagtggagggaaagtcagcagataaacatgtgaacaaaggtctctggttttcctaggaagagggccctgccgccttccgcagtgtttgtgtcgctgggtacttgagattagggagtggtgatgactcttaacgagcttgctgccttcaagcatctgtttaacaaagcacatcttgcacctcccttaatccatttaaccctgagtggacacagcacatgtttcagagagcacggggttgggggtaaggttatagattaacagcatcccaaggcagaagaatttttcttagtatagaacaaaatggagtctcctatgtctacttctttgtagcaaacacagtaacaatctgatctctctttcttttccccacatttctcccttttctatttgacaaaaccgccatcgtcatcatggcccgttctcaatgagctgttgggtgcacctcccagacggggcggcggccgggcagaggggctcctcacttttcagatggggcggccaggcagaggcgccccccacctcccggacggggcggctggccgggcgggggctgccccccacctcctggacggggcggctgccgggtggagacgctcctcacttcccagatagggcggctgccaggcggaggggctcctcacttcccagactgggcggctggtcagagacgctcctcacctcccagacggggtggcggcggggcagagacactcctcagttcccagacggggtcgcagccgggcaaaggtgctcctcacttcccagactgggcggccaggcagaggggctcctcacatccccgacgatgggcggcatggaagagacgctcctcacttcctagacggggtggcggctgggcagaggcgctcctcacttcccagactgggcggccaggcagaggggctcctcacatcccagacgatgggtggccaggcagagacgctcctcacttcctagacaggatggcggccgggaagaggcgctcctcacttcctagacgggatggctgccgggcagagatgctcctcacttcccagacgatgggcggccaggcagagacgctcctcacatcccagacggggtggcggccgggcagatgctgcaatctcggcactttgggaggccaaggcaggcggctgggaggtggaggttgtagcgagccgagatcacgccactgcactccagcctgggcaacattgagcactgagtgagtgagactccgtctgcaatcccggcacctcgggaggccgaggctggcagatcactcgcggtcaggatctggagaccagcccggccaacacggcgaaaccccgtctccaccaaaaaatacaaaaaccagtcaggcgtggcggcgtgcgcctgcaatcccaggcactcggcaggctgaggcaggagaatcaggcagggaggt

SEQ ID NO: 1528 - protein, 376 aa, Homo sapiens [sequence omitted]

SEQ ID NO: 1529 - DNA, 7126 bp, Homo sapiens
  source (1)..(7126)
  CDS (201)..(418)
  CDS (904)..(992)
  CDS (4750)..(4817)
  CDS (5481)..(5571)
  CDS (6436)..(6688)
  CDS (6788)..(6926)
cttgtgaattgcttgtatccaaaatatgcacacagcagtaagtgctgatttatgtcttttattttttcaaccctcttttcttctcaaggtgtccaagttacacagactcgcagaatctcacaggtgtcttagaatttctcttcctgggactctcagaggatccagaactgcagcccgtcctcgttgggctgttcctgtccatgtacctgatcacggtgctggggaacctgctcatcatcctggccgtcagctgtgactcccacctccacacccccatgtacttcttcctctccaacttgtccttggctgacatcggactcacctctgccaccatccctaagatgattgttgatatgcaatctcacagcagaatcatctcctatgagggctgcctgatgcagatgtctttatctattttgtgtgtatgaatgacatggtcctgactgtgatggcctatgaccagtttgtggccatttgtcaccccctacgctacccagtcatcatgaatccccatctctgtgtcttcttagttttggtgtcttttattcttagcctgttgaactcccagctgcacaatcagattgtgttacaattcacctgcttcaagaatgtggaaatctttaattttttctgtgagccatctcaacttctcaaccttgcctgttctgacagtgtcatcaataacatattcatgtatttagatagtgttatatttggttttcttcccatctcagggatccttttgtcttactataaaattgtctcctccattctaagaattccatcatcagatgggaagtataaagccttctccacatgtggctctcacctggcagttgtttgcttattttatggaacaggacttggagcctacctcagttcagctgcgtcctctttccccaggaagggtgcggtcacctcagtgatgtacactgtggtcatccctatgctgaaccccttcatctacagcctgagaaacagggacattaaaagtgccctgtggaggctgcacagcagaacagtctaatctcattatctgttccatcctttctgtagtgggggctgaaatatattgcaaaatcaaacatgtctatttgcaaattctgtctctttggtcacattatttttgttgcttgtttgctttcgtttctctccatgtttcatgtatgaatattgcttccttttttgggtctttagttggaacgggtgagtattctggtatcatttgttcatcataaacatcacaagcggatcccatatacctcaacagcgtccttgtgtctaggagtgtctgagcaatgacactggtgtcctggtgatatcacaactcacagctcctttctgagcctcagatttctctgcagcaaagtaagtgcaatagcctttttttcccccaaggccatgcaatgattgcatatctttttattattattattttattttatttttattttttttgagatggagtcttcctctgtcacccaggctggagtgcagtggcatgatctcgactcactgcaacctctgcctcccgggttcaagcaactctctgcctcagcctcccgagtagctgggattacaccaccactcctagttaatttttttgtatttttaatagagatggggtttcaccatcctggccaggctggtattgaactcctgacctcatgatccacccgccttggcctcccaaagtgctgggattacaggcgtgaggcactgtgcccagccgattgtatatcttgtgtcatgaaccagtcagagtagtttcccatcaaatggtagcttctagtatcacatttaaagaatttaattttatgtgcatatttccagaatatattagtaatgatgttataagctgcatggctcagggtatgatataaaccatatttctatcgaatgattaatattttatctgtagagcgataattgcttaactgagaggctgtttgaggggatatagtcaaatgtactggcaagaacagtattacaagctaggtgcagtggctcacgcctgtaatcccagtactttagaaggccaaggtgggtggatcacttgaggccaagagttggagaccagcctggccatgtcgctactaaaaacacaaaaattagctgggcatgggggtacacgcctgtagtcccagctactcaggaggctgaggcaggagaatcgcttgaacctgggaggcggaggttgcagtgagccgggatcgtgccactgcactccagcctgggcaacagagagagactctatctcaataaaataaataaaaataaataaaaaattagctgggtgtggtggcacattcctgtagtcctagctattctagagggtgaagtttggaggattgcttgagcccaggagttcgaggtgacactgagctgtgattgtaccattgcactccagcctgggtgacagaggaagattctgtctcaaaaaataagtatattcttttttccaatgtgctgtcattctatgtgtctcaaatcatagacttctttccctatttacctctatacacctgccatctggtctccctcaaaaacactgtcatttatttacacaccacaggtcaataacatcctttcatccatatccaatttcatctggtgtatatgaaagtgttctttatgtccactaaagacaaatctcatttctttttttttttttttcggagtctcactctgtcgcccaggctggagtgcagtggtgcgatctcgacttactgcaacctccgcctccggggttcaagggattctcctgcctcagcctctcaaatagttgggacttcagtcgaccacaatcatgcctggctaatttttttttttttgtatatttagtagagacggggttttactacgttggccaggctgatctcgaactcctgatcgcagacgatccgcctgccttggcctcccaaagtgctgggactacaggcatgagccatcgcgccaggccataaatctcatttctttagagtagatatttctcagccagggagctccattgataaaatgcagaagatggcaacagaccactcttcacgtgcatctcacgtgatctattagaaaaaacccaggcagccagaaaacaccttttattagagtgctcaagagctgggaacacacaatgatactatagaagctatattctggaccgggtgcagtgactcatgactgtaatgccagcattttgggaggcctagttgggtgaatcacccgagttaaggagattgagaccagcctggccaagatggtgaaaccccatctctactaaaaatacaaaaattagccgggcgttgtggcacatacctgtagtttcagctatgtgggaggctgaggcaggagaatggcttgaaccccataggcagaggttacagtgagctgagatcatgcctctgcactccagcctgggtgacagagtgagacttcatcttaaaaagtaaataaataaaagaaacttatattctgaagctacttcagcctttcaagtgagcagaaatcaaaacccctggacattgcctaaattcagctacagaagggggctacattgcactgcatgtccaggagcagtatggtggggtccacagaaggacccagcacagaggaagttctccgtctccactgaatcatgttgagatattgtggtgtgttggatcctatgctagaaaacagaggaaactgagggccgggcgcggtggctcacgcctgtattcccagcactttgggaggccaaggtgggcggatcacgaggtcaggagttcaagatcagcctgtccaacatgtgaaaccccatttctactaaaatacaaaaattagctgggcgtggtggtgcacacctgtaattccagttactggggaagctgaggcaggagaatggcttgaacccaggaggcagaggttgcagtgagccgattgtgccactgcacttcagcctgggtgacagagcaagactccatctcacaaaaagaaaaaaagaaagaaaaagaaaacagaggaaacagacctggttcttgatgtccttggagcccaaagtcctggcagaaaatggggcctgtgtgatgagcagcatctgagatgttcccaaggacatcccacctcctggttttcatacccttgggcaatctgctcctatttagtgtgagatgcacctggtgactgattcccaactacgagagtgtggaagaagtgatgtgatgtcactctgagaatagaacgaaggacctcagcttttattttgctgccccatcttgctttgcattgatggaagccaaatgccatgtggtcagctgctttatgcagagacccttaatgcaagaaattgagggaattttctgtctaatgtttcagagcaaccgaatcctggtaacaaccttgtgagtgaggttggaagttgatcctctaccttccagccttcagatgactgccaccctggtcaacacgttaattgccaccttctgagaatgtcttgtatttcagtgatgtatcagttatcaaataactaaagttcaataagtaaggaatataccattgtatattcatttggacaaaatacttagacccggagagtcactgaaacaagcatcaaacataagtctctggcacattaaaggccaatccaatgcaagggctaatagaagtgaattaagacattctctgtaactccaatattaaatggaaaccgggaaatagccagattcctctccaacctgtccttggctggcatcggtttcccctccaccatagtctccaagatgattgtggacatccagtctcacagcagagtcatctcctatgcgggctgcctgactcaggtatctctttttgccgtttttggatgcatggaagacatgcttctgagtgtgatggcttatgaccggtttgtggacatctgtcaccctctggattatccagtcatcatgaacccatgtttctgtggcttcctagttttgttgtctttttttctcagtcttttagactcccagctgcacaattggattgccttacaaattacctgcttcaaggatgtggaaattcccaatttcttctgtgacccttctcaactcccccacccttgcctgttgtgacaccttcaccaatgacatagtcatgtatttccttgctgccatatttggttttcttcccatttcggggaccttttctcttactataaaattgtttcctccattctgagggtttcatcatcaggtgggaagtataaagccttctccacctgtggctctcacctgtcagttgtttgcttattttatggaacaggctttggaggggacctcagttcagacatgtcctcttatcccagaaaaggtgcagtggcctcagtgatgtacacggtggttactcccatgctgaaccccttcatctacagcctaacagggaaattaaaagtgccctgcggcagctgcactgcagaatagtctaatctcattttcttattatctgttccattccttccgtagtgtgagttagaaaaggcagcaaggggccgggcgcagtggctcacacctgtaatcccagcactttgggaggccgaagtgggcggatcacgaggtcaggatgatcgagaccatcctggctaacacggtgaaaccctgtctctactaaaaatacaaaaaaattagccgggtatgttggtgggcgcctgtaaccccagctactcgggaggctgaggcaggagaatggcgtgaatccgggaggcggagcttgcagtaagccaaaatcgcgccactgcactccagcctgtgcgatagagcaagactccatctcaaaaaaaaaaaaaagaaaagaaaagaaaaggcagcaaggtcaaatacgaataatataaaaggatgtacacctgtgtccggaattggtgggttcttggtctcactgacttcaagaatgaagccgcggaccctcgcggtgagtgttacagctcttaaggcagcgcgtctggagttgttcgttcctcccggtgggctctggtctccctggcttcaggagtgaagctgcagaccttcgcggtgagtgttacagctcataaaagcagtgtgtacccaaagagcgaaagaacaaaactcccacagtttggaagaggaccggaaagggttgctactgctggctcgggcagcctgcttttattctctcatctggccccacccacatcttgctgattggtagagccgagtggtctgttttgacagggcactgattggtgcctttacaatccctgagctagacacaaagtttctccacgtccccaccagattagctagatacagagtgtcaacacaaaggttctccaaggccccaccagagtagtcagatatagagtgtccgttggtgtattcgaaaaccctgagctagacacagtgtgctgactggtgtatttacgatccctgagctagacatagaggttctccacgtccccaccagactcaggagcccagctggcttcacccagtggatcctgcaccggggctgcaggtggagctgcctgccagtcctgcgctgtgcgcccgcactcctcagcccttgggtggtcgatgggactgggcgccgtggagcaggggacagcgctcattggggaggctccggccgcacaggagcccatggagtgggtgggaggctcaggcatggcgggctgcaggtcccgagccctgccccgcgggaaggcagctaaggcccggtgagaaatcgagcgcagcgccggcgggctggcactgctgggggacccagtacaccctccacagccgctggcccgggtgctaagcccctcattgcccagggccggcaggccggcctgctgctccgagtgcggggcccgccaaggccacgcccacccggaactccagcgggcccgcaagcgccgcgcgcagccccggttcccgctcgcgcctttccctccacacttcccaccaagctgagggagccggctcccgccttggccagcccagaaaggggctcccacagtgcagcggtgggctgaagggctcctcaagtgccgccaaagtggaagcccaggcagaggagtcgctgagagcgagcgagggctgtgaggactgccagcacgctgtaacctctcacacccactgtgatattaggggtaatatctccctaggatata

SEQ ID NO: 1530 - protein, 285 aa, Homo sapiens
MYLITVLGNLLIILAVSCDSHLHTPMYFFLSNLSLADIGLTSATIPKMIVDMQSHSRIISYEGCLMQMSLSILKGAVTSVMYTVVIPMLNPFIYSLRNRDIKISKMIVDIQSHSRVISYAGCLTQCELEKAARGRAQWLTPVIPALWEAEVGGSRDSGAQLASPSGSCTGAAGGAACQSCAVRPHSSALGWSMGLGAVEQGTALIGEAPAAQEPMEWVGGSGMAGCRSRALPRGKAAKARAGRPACCSECGARQGHAHPELQRARKRRAQPRFPLAPFPPHFPPS

SEQ ID NO: 1531 - DNA, 1340 bp, Homo sapiens; identical to SEQ ID NO: 989
  source (1)..(1340)
  CDS (201)..(502)
  CDS (984)..(1140)

SEQ ID NO: 1532 - protein, 152 aa, Homo sapiens
MDLGNQTRVSEFLLLGFSQDLEDQQLLFALFLSMYLVTVLGNLLIILAISSDSHLHTPRYFFLSNLSLADIGFTSTAVPKMLVNIQVQSNAISYADCIAQISNASSSSWWGMVASVMYTVVTPMLNPFIYCLRNRDIKRTLETLLGRMLYAQ

SEQ ID NO: 1533 - DNA, 1015 bp, Homo sapiens
  source (1)..(1015)
  CDS (201)..(815)
  modified_base (1)..(7): a, t, c, g, unknown or other
  modified_base (50): a, t, c, g, unknown or other
  modified_base (52): a, t, c, g, unknown or other
  modified_base (65): a, t, c, g, unknown or other
  modified_base (94): a, t, c, g, unknown or other
  modified_base (865)..(964): a, t, c, g, unknown or other
nnnnnnngaagtaaccttcaatggccatgtattcttcctctcaatgctgncngtcatggacatcntgctgtctaccacactgtgcccaaggccntagcatcttttggcttcaagcacataacattgcttttgatgcctgtgtcacccaaggcttctttgtccatatgatgtttgtgggggagtcagctatcctgttagccatggcctttgatcgctttgtggccatttgtgccccactgagatatacaacagtgctaacatggcctgttgtggggaggattgctctggccgtcatcacccgaagcttctgcatcatcttcccagtcatattcttgctgaagcggctgcccttctgcctaaccaacattgttcctcactcctactgtgagcatattggagtggctcgtttagcctgtgctgacatcactgttaacatttggtatggcttctcagtgcccattgtcatggtcatcttggatgttatcctcatcgctgtgtcttactcactgatcctccgagcagtgtttcgtttgccctcccaggatgctcggcacaaggccctcagcacttgtggctcccacctctgtgtcatccttatgttttatgttccatccttctttaccttattgacccatcattttgggcgtaatattcctcaacatgtccatatcttgctggccaatctttatgtggcagtgccaccaatgctgaaccccattgtctatggtgtgaagactaagcagatacgtgagggtgtagcccaccggttctttgacatcaagacttggtgctgtacctcccctctgggctcatgaatcgggggtcttctagagtcgaccagataggggtgtcaagcccaagtatnnnnnnnnnnnnnnnnnnnnnnnnnnnnnnnnnnnnnnnnnnnnnnnnnnnnnnnnnnnnnnnnnnnnnnnnnnnnnnnnnnnnnnnnnnnnnnnnnnnnaaaatagccgggtgtggtggcacccacctgtaatcccagtacttgggaagg

SEQ ID NO: 1534 - protein, 204 aa, Homo sapiens
MAFDRFVAICAPLRYTTVLTWPVVGRIALAVITRSFCIIFPVIFLLKRLPFCLTNIVPHSYCEHIGVARLACADITVNIWYGFSVPIVMVILDVILIAVSYSLILRAVFRLPSQDARHKALSTCGSHLCVILMFYVPSFFTLLTHHFGRNIPQHVHILLANLYVAVPPMLNPIVYGVKTKQIREGVAHRFFDIKTWCCTSPLGS

SEQ ID NO: 1535 - DNA, 2098 bp, Homo sapiens
  source (1)..(2098)
  CDS (201)..(310)
  CDS (524)..(823)
  CDS (1154)..(1898)
caatgatgaggcctgaaggggccagtgcaggccgcaggggtccatcacaagcacatcagcgtgagcatgtacgtgatcgatgagggggaggcagacagttggagggcattttattcctcagaataggtgaactgagagatttcaaggccctctagctgaatggagaccaaacgccagggcggaggcaggggagttcccgaatggcagcacggtgtggggacacggaaactgggagtgcctcctcagctctgggggcagagtctggggctatccaccgtggggcgaatgctcctcattccatcaccgcccagtgaggacactgtcggtcttatgtggacacagcaaccctgagcggcctccccgctggcccactcatgcctcagtttccccatctcttccgcgaacggaaaggaatcatctcaacagcggctcaaatctgcgcctcacggtccgttcgggcccccgtagccggagttgacccttcttgacccccctgtagcctaaactgacttcgcctcactagagtcttcctctgtccatccctcccccgccccacccccattcctattcgggccgcacctacacagccgctcccgggcttggctctgagcactgaagcggacccaggcgtccatgacagccgcagcccaggctccgcggccctgctcccgccccacttcccgcccctagtcacgcctactgcgcgacccaacggtgcctcgcgagggacaaacagtatcagaaaagaaagcttggccctggaagcggaatttcaggacgcgaaactcgtgtcttttgagcctccatctgtgtattactgtgcgtgtctgcgtcacagcttccccttatcagacgacccctactccctagcacgcctccagcggcaccttcttctttaaatattcatgaccaagggcggggcctgcaggggccggggcggggcgagaaagcgccgcagtgatctccacgtcttggaggccgccggcataggtgtgcgcctggcagaacctcacaaatacacatgcacgcaggccccgactgaatccagggctgtaggggctaaagaggtctaggtcagtagaggcctgaagcccaggctggtctgtccaaggaaaaaggagcgtgattggtaccagatcttcgttccctgcagaaccttgacagttgaacaagtgacctcctccagaacagatggagagtctccagaagcagaggctttagtgaacgaaattcgcaataatcagctccagatcctgaaaaggagggcgaagaatcagtggccaaagctaaccgcttcatacccacacttcatcctcctcagtttctctccaggccaccatgtctgcaggcaacggcaccccttggggtcagcagcgggggaggaggtctgggctggatcaggagtggaggtggagggctcagagctgcccaccttctcggcagcagccaaggtccgagtgggagtgaccattgtgctgtttgtttcttcggctggagggaacctggcagtcctgtggtcagtgacacggcgggaacccagccagctccgcccctctccggtcaggagactcttcatccatttagcagccgccgacttactagtcacttttgtggttatgcccctagatgccacctggaatatcactgttcaatggctggctgtggacatcgcatgtcggacactgatgttcctgaaactaatggccacgtattctgcagctttcctgcctgtggtcattggattggaccgccaggcagcagtactcaacccgcttggatcccgttcaggtgtaaggaaacttctgggggcagcctggggacttagtttcctgcttgccttcccccaggtgagtgacctaggactcaggaccgggcaggacagggatttgggtccatagcatgagttaaagggtgcgcttgggggccattagccattaattctcagggagtaagcctctgcttgcttttttttttttttgccggctcactgcaacctccgcctcccgggttcaagcaattctcctccctcagcctcccgagaagctacaggcgcccgctaccatgcccggctaatttttgtatttttagtagaggcgag

SEQ ID NO: 1536 - protein, 384 aa, Homo sapiens
MAARCGDTETGSASSALGAESGAIHRGANAPHSITAQVFLCPSLPRPTPIPIRAAPTQPLPGLALSTEADPGVHDSRSPGSAALLPPHFPPLVTPTARPNGASRGTNSIRKESLALEAEFQDAKLVSFEPPSVYYCATLTVEQVTSSRTDGESPEAEALVNEIRNNQLQILKRRAKNQWPKLTASYPHFILLSFSPGHHVCRQRHPLGSAAGEEVWAGSGVEVEGSELPTFSAAAKVRVGVTIVLFVSSAGGNLAVLWSVTRREPSQLRPSPVRRLFIHLAAADLLVTFVVMPLDATWNITVQWLAVDIACRTLMFLKLMATYSAAFLPVVIGLDRQAAVLNPLGSRSGVRKLLGAAWGLSFLLAFPQVSDLGLRTGQDRDLGP

SEQ ID NO: 1537 - DNA, 19026 bp, Homo sapiens
  source (1)..(19026)
  CDS (201)..(339)
  CDS (4670)..(4729)
  CDS (8317)..(8466)
  CDS (9834)..(9956)
  CDS (17921)..(17969)
  CDS (18676)..(18826)
  modified_base (12472): a, t, c, g, unknown or other
tttcatgtaggcagcttgatatttgtttgttactaaattgtaatctactgccaaggggaagtcagtccactactaagggcaagaatgccaagtgcttcgagcagtgctgtttaagtctgcaattagtgagagggctcactaatgagcataaggaatgctagaagtaagcttccctggtgggatgaatagtgtgttcacatatggttggccaggaaaatgaacagctccctctacccctgcttgacagagatataagaatctggcaagcccagcagtctcagaattcgggaatcatgcctgaggtctggaatccagcagccgcagctaatggcagatttggtgtgctgatgtaacatgaaggttagaagatcctgctgtcagggcctcgcggtgttggcttcatagtgaacctttcatgcaaggtgcctgtcagggtgtctgaaatactggagggcaggaacttgtgcgcatagtgcaggctgtatgtttggccagcttgctgatagctttgtatatgtggtagaattcagtctgggacttaccttcctggtaacgtatcgctagggaggggacatagtgcctactcacctgcaatcgtcagtttcccagtatttcctgcaaagagcctgacagccttgaatggctgaattggctctggccagttcaaagcagcatgatgctgtgtgtgtgtgtgtgaacgggagccctcccaggctgtgagacggctggcatgcggggatggggctccttcaccgatccatgcctcctcattacacagctctgcttcaacttcgtaagcctcctggatagtaataaggtgcagaagtaacccagtctgctgctgttgaactgtgacctcgtggctaattctgcccttggtgcctgagcttgccacagtgggagtgcttcacttcagaaggcacaaccagccatcctttatgtaatctgcaccatcctagaaaatcctccgatatccttgtccagaaagacaggtggtcgcatgtagacttgcttttgtcctgtggtgagtggttgttctgacttattacctccgtggaatgcgagtgtattcccagtcaggacacttattgttctgggtcactagaacatgccttgaagtgttaatgtatcgagacatgaggcttaaaataggaaattgcattaagcagatcacttcatgtgttatttggacttgggaagtgcgttagaggagaatgaggatgagcctttgtgattcagtgtgtgcagcgctgatatgatggtatatgacaccccaaacaagggtggttttggtgagacgtcgcacagtgactctccacagtaatttggagacgatttcacagagctctgtgattcactctggtccatggcaggatggctcccgctgtttctcaatttagagcccgtagagatagttttggctcatctctcattgagtaatcgtcgagtatgtagaaggcatttagcaaattggtaatgagactcttctcctctaagagcctggcctttataaaagggaaaaattggagaaacttagagttgttgaaaatatgtgaaaagtagccactctgaaaaaagtcaaaaaggaggcagcaatgacaagaatgatccaggattttcctattgagttagaaagtgatcctgtgaaaggaaatctctttccagagaagaggttgaccagatgttaaataataagaataatcattttctagcagatactgtggtatgttatgagagacagttattgccagttttcaataccactgaagaaagggttaaggacctggcttcaatttatagaaaagaagtttgtttttgttttttttttttttttttttttaaggcagagtcttgctctgtcgcccaggcaggagtacaatggcgcaatttcggctcactgcaacctccaccccctgggttcaagcaattctcctgcctcagcctcccggattgccggaattacaggcacatgctgcctggctaatttttgtatttttagtagagatggggtttcaccatgttggtcaggctggtctcgaactcctaacctcaggtgatctgcctgcctcagcctcccagagtgctggggttacaggcctgagccaccgtgcctggtcctagaagagaagatttaaattatacattaggaagaatttccaaactgcaaagaccgtggactattagctcagaaattgctagggtcttgtcccttaagaaagggtgttgtctagtctggcgtgtatgtgtaagccggcatggaggtggaggttgtgctagggaaccattccctccatcatcccagcagccctgaggtcctatttgtcaatagcttttcaggtagggctagagagaagagcctggtcacatagaagcttttccaaaacacagcttccccttgcgtaaatgttcccagggaggaacagagcttgaagaagatcccctgtgattttgctctgtcttcttgattgaaaactgctgctctgtgctctcgtgctttggcaatgcagtctaagtcactgagccctgcaatatgtacaatgtttccagacatctgtgctgggagtgtcctctgagagttgcagcacagaggcagtggacacaggaagccccttttttctcccatgttgcagcggcagctgatggatggagctgtgaagtccaaacgtgctgggtgcactcctcccccacagcctccccagctccagcttgcataacagcctgctttgggaggggctttgttccagaaccttctggcagtgcctggttcagtcctgagaccttgtgtcttaaacacgtcacagaacacgcacatatcagtataatctctaaaagttgaagagcatttggtttgggtatttgcctgggtacaggacaaactatgaggctgatgtgatcaagaatgcttgtcttgtgcaatgttgaccaataggccagtaggacatttgtctcaccaataaaggcctggctagactggacattgaaggtggacataggaggctttgactcccacatgtcaacgattcatatgaaagcgctggggaagagatttatgagggggagaagagctgtgtggtctcggccattatgagaaacatgtcttatttgttttaggtctaaaacatgtctaaatttgttttaggctaggggctgtggctcacgcctgtaatcccagcactttgggaggccctcctcatgcacatctcagggttttagaaatgccagaagtagctgtctacactctgagtatgaggttgacgtgggaaggaccttgtgtaactgttcatttcaacccatcagtggccacataaccagggggaatgacaggttagctcagtttcttgcctgggcccaccagccttacacaagtggtagccacagcctggcccccaaagcctggcggccatctgaggggcgtgttcccagagttagccaaattcatcaccatggctggggtgttggatgaatctctagttagtataatcatagctgggtgtctggaacattgttgggtgcttctctgacctccatccattttccgtaatctgcagaagaaccctcaagatgagtagtagtatacttatttaccaaagggagaactgaggctgagtagttggataacttgcccaagaccacacaagttaatagctaaaggaagcaggatttgaacctagctatgtccaactccaaagcctatgtttgtttgctccacgttaccccatgatggtggctgtagtattgtcatataaaaggacatcactctctttgttcatttacaatctcatgagtgaatgacttcccttttagtccattaagccctagataatattcaaaaattcacaattaagctgtaaattgttcaattttcctttgtaacagtaacagagaaagtaatattttcgaataatagcatatttaaatatactctcaagtttaggatttgaaagtatatttaatattcagagactctcagtattcagagtccagagatgtgtctctgtgtccttgtaacatgtatttggcaatctaatgggaaagactcgtgttcaggggccccaggctcagaaattaactctaggagaggtgggggaagcacacgtttccttaggagaaaggcatggggatcactctctccagttatgcacagacaaaaattgtatttaacactacttttgatacatagaaaatttattttaggctaggggcggtggctcacgcctgtaatcccagcactttgggaggccaaggcgggtggatcacgaggtcaggagtttgagaccagcctggccaacatgctgaaacctcatctctactaaaaatacaaaaattggccaggcgtggtggcacacacgtgtaatcccagctactggggaggctgaggcaggagaatcacttgaaccctggaggcagaggttgcagtgaaccgagattgcaccattgcactccagctctgggcgacagagcaagactccatctcggaaaaaaaaaaagaaaattttgttttaaaattgatctattcttaggtgacaatgctattttattatagtcagtaatgtttgaagagctttaaaaaaaagcctgcagtaaaaaaaaatttttgctgcagatattgatgaatgttcagaacaaccctcagtgtgtgggagccacacaatctgcaataatcacccaggaaccttccgctgcgagtgtgtggagggctaccagttttcagatgagggaacgtgtgtgggtaagttctccaggtaacttttcgaaacagtattcacatggtgtgcattagctcttatgcaaaagttctggtcccaggtaaaatgagtctggtcaagttggaaggtgctgggaagagcaatttataaagatgaatcagacttagcctctgccctccaactatctggagagtcacaagtgtaatgagtaagcaacattattgcctacactagtaataccatcgcctcacctgttgccagcttttgcattacatttgcctcttataaacttcttttaatcattttcattatgcttttaataactataagctattagacatgtttcttccagtaattagtagccttggggttcacattgagggagcaccttataggtacttttggatcattacctatcttagattgaattctactttagttacacctaaaattccaactggggtcattctatttatggattttaattttaccaaccacgagcagcagcataatttcttagccttatagaagtaagttgcggctattaattaggttaattatgctcttgctgaatgatgatttgggtgatgatgaggatgggtcagccacgaacagccagattgtttaaattcttcctctttttcctcctgctgcactttgacctggtcgttcaagattcttgttcccaggtctggagggtgccatgtcaaatgcgcatctgaactcaacatgtcttcccaatttaaaacagattcctcttgtaccatgtcagcaaaccatcttcttgcctcttcctcactgttcgctaaaccctagaatgttttctttttgctctgtctcaaagcttgggtaagcctgccaaggtcgtggggtgaggtggtgtcttgagggtgggagggaacaggcagttctcatattttgagtgtgacccaaacatctgtgagctcagggaggccagtcccctctgcacagttgagattttcactctgctgaagttacttcttttttttttttcctcagtagggaacatcagtttctgtgtatttgacctgatttctttctctgctttttgaggctaagcagattcaaacgtttaattttaatggccataccatttacattacacttcggctcaagcttgggcagtggatactttatcccttgggtgctgatgtgcacagtaactgagatccatcctgggacacctgtgtggagcatggtgacctgggtttctggatccagtcattcctgatgtccacactcactgaaggggcaggctgggatgcaagacaggtgctgggcaaatgtctgcttcagacatttacttttgaggaagacaacctctctggggctcagttcctcgtctgtaaaatgaagtgattagaccggatcattggtttcctgtgacccatggagctcttggaggtgcctcaggagctgtcaaggaggacacaggccagctgtgggcaggctcttgtcctctcccctgagctctagcctcccttttttttttttttttttttgagacagggttttgctattgtcacccaggctggagtgcaatggcgcgatcttggctcactgcaacctctgcctcctgggttcaagagattctcctgcctcagtctcccaagtagctggaattacaggcatgcaccaccactcccagctaagttttgtatttttagtagagacggggtttcaccatgttggccaggctggtcttgaactcctggcctcaggtgatttgcctgccttggcctcccaaaatgctgggattacaggtgtaagccaccacgcccggcctacatatttgagggagaacatcttcaccccttttaattggctcctttgagactcactgcgcagagagaaggctcactgtagaaccaagtctgcctacacgcattcaaagaaataactctggcttgtcactgagtaattgagtggtcattccatctctcttggaattccttgttgaaacagtgttctaggtcggaagcctgcactgggaaggttaccctgcaggtcagaatggggcaaggtgaagaaataaatggggcaaggtgtgctctgccaactgtgaggggctgggggctcaggcagggcctgtggactgaccaggaggaattctcttttcatgaggattggtatccattatcggggaagggatgtttgtggacttccatctttggcattttctgtaaactcataactctcttttccactgggaaccaacttttgcagttaattgaaatgtgcaaaacatgtttttgtgaaggaaaggtgggcctcagcttgcccataagtcagcttgatgtgaagatgtagatacccctctgaatggacatagccctgtgacactgggctggcatatggagtgtggtgaacttgaggtcctacttctcctcccctaggcatcttggtgcagggcatgatggcatgcatcagctcttctcttgagggaagaacagggcccaggcttaggcaaaaagctgtagcagttaacttccagtatgccaagcacagagaggccagtagatgggactgtgattctcttaagggtcctgatgatagaactcatggaaggagggctgaggaggaggtgagtgtcacagaggctagctgataatgccccatcttgtgctgttgcctcaagatggaaggcaaaggttgaggtctacagggtgattttcagctggttcagttactctggggttcctaaggcaccattgcattttgcttctgattttctaaaagaactcagagccaggacagagtcccatcctcacaatgtcagaacacaaatcattccctcccatcaggctttgtgtagttggattatcccagatgaaggaggactcatgtttttcctccatgagtcttcttaagattgatttcagtttgtcctaccttaagtgcagacagacagagaaagagagagagagagttgagggggtggggggaagaacataaggcaatttatctaaggccatgtggttgacccatggtacctggtatataccaaggctgcctactccaaaggctcacagtcttccaaccatagctgtctccctgccttagaaacatttatttgtccttccttggtggcaagtgggtgactgacttgggcatttgtagtgaatgttccacctgtacagggtgggccaaggctgaagacaccacatggaagtctcagctcctttcctccaagcagtctcaacagagttgccatcagaagtgtggcatctgcagatgtcccacccccatatccagatgaagggaaagttgggtcctggggacctgtgatggggatctagtttggagagtggcctgagacagacccccagagtgaaactgaggtcaagccaggtggaatgacaaccacggtgtcagtcagccaagacccatcagaggcagaacccaagtggggaggaaacggtgaaagcagtagtaccagcccagtgaggagtggggtgcaggtgaagctgtggacatgcctagaggtctagggtccaggcatggtctctctttatagagctgggaggggcatgtggcctgctcaggggactttcttcctaagactgtgcatcaaccttttgttctgaagctgtcgtggaccagcgccccatcaactactgtgaaactggccttcataactgcgacataccccagcgggcccagtgtatctacacaggaggctcctcctacacctgttcctgcttgccaggcttttctggggatggccaagcctgccaaggtgtgtggttgctctgatcttcccctgtgtgtaacctgagaaagtttcctaggtggtacctgtcatgtgccaatcaccaactcactcccaaatagaagaaagaattcttctgtcatctccacagagtaaatgtgttgctttttatatctctctagtagtttgaactatgcattttcttttgggggctattctcattgatgactgttttgttctaggtgactagttcattcaggtgacaattagacacctgctctctgctaggaaccagggatattttctgtctttcacaaagagacaaactgtccttttacatggaggacatgcatggagattaaagtctatccttttatttaataagatgtattaacatgtagccattcaactggcttgttctaaccttctccttcaaaaaagcaaagttctctgattgaataaatgactgcggagtcaaagtataaatgactcaatagaatccttcagacttgagcttcttggctgccattgttctcttacaggtaattttaggtaagatagcccatcaatagagtaccctgagtttcttggtttgcacaattacttaatattataccatagagtatttctaaaaagtcccaactaagatagaatttctgagatactttctctttattactgaacatgtgaatattttcttttcactgagggttttctgcctagcagttaataatctgtcagtaaacactcagacagttttgaagctctcatttatgacaggagggagaattttataatacaaatagatcctatcttttcccctgttgtaaggttgatgaaaacattcttttctttctttttttttttttttttttttttgagatggcatttagctcttgttgcccaagctggagtgcaatggcacgatcttggctcactgcaacctccacctcccgggttcaagcaattctcctgcctcagcctccagaatagctgggattacaggcacgtgtcaccatgcccagctaattttttatatttttagtagaaacagggtttcaccgtgttggccaggctggtcttgaactcctgacctcaggtgatctgcctgcctcggcctcccaaggtgctaggattacaggcgtgagccacggtgcctggccaaaaacatttttcatgaaaacattgctgccaaagtgaaacacatttgcaagtacgacagatagatattggggagttagtgacttgatagttaatgtttagtgagttttggattactgttcccagatcagaagcaggttcccatagatttgagtaagtggcttaaattattgggtaaactacgaattccagaagaaatctcattgtccctgggcctggtggctgttttacagatgtagatgaatgccagccaagccgatgtcaccctgacgccttctgctacaacactccaggctctttcacgtgccagtgcaaacctggttatcagggagacggcttccgttgcgtgcccggaggtaaggtggtgggacatctggagtcggtagcccattgccctgtccatgaatgcagagcacatggcccattgccctgtccatgaatccagagcacatggcccgttgccctgtccatgaatccagagcacatggcccgttgccctgtccatgaatccagagcacatggcccattgcctgccctgtccatgaatccagagcacatggccctgggagagaaggtgaggcgggaaagtaggaggctccatggagagttctaagggttgttgaggtgggagatcagagcatggactgcaatgtagagcattctttgaaatggtagaacatcaggtgggaacattgcctataatcccaatactttaggaggccgaggtgggtggatcacttgaggtcaggagttcgagatcagcctggccaacatggcaaaaccccctctctactaaaaatacaaaaattagtcaggcgtagtggcttgtgcctgtaatcccagctactacggaggctgaggcatgagaatcacttgaacctgggaggcagaggttgcagtgagctgcaattgagccactgtagtccatcctgggtgacagagtgggactgcctcaaaaaaaaaaaaaaaagaaaaaaaaagaatatatttgacaccttagactggagttaaccagttgtgttatttatttttaattactgctgctgttgttggtcagatatattcatgccactataaatgttttcaattagagataagtaaacattttcatcccatcgctttttaagcagttaaaaactttaaataaccatccccttcactagcctgtgagcacattgaggacctgtgagctcattgaggacctgtgagctcattgagggtggtgcaggtacacttttttttttgtatgtttccagtacccagtggagtgtttggtatatggtggggctcacagctatttacagctgttgaagaaataaatgaatgcatcagctccattcctacaacagcatttgaaaatatttgtttatcttcactctcactaagactagtttttagagtagttgtctatcaaaaaagagaaaatatcagattaagatttaaattttgatgtatagtagcatatatcgttagtctaaattattttcttctgcttaaaatggggcttagcaaactatggcccatgggccaaatctggctgtctgtttttgtaaataaagttttattggaacacagccatgcttatgtatagtctatggctgctttcgtgttacaaaggccgagttcagtagttgtgacagagactgtaagctctgcacagcctaaaaagcataaataggctgggtgccatggctctcgcctgtaatcctagcattttgggagatcgaggtggacagattacttgagtccaggagtttgagagaccggcctgggcaacatagcgagaccctgtttctacaaaaaatagaaaaattagctgggtgtggtgtggcacacctgtagtcctagctcctcggggggctgaggtaggaagattgagccagggagatcaaggctgcagtgagccaagatcactctacaccccatcctgggtgacagagtgagattctgtctcaaaaaaaaaaaaaaaaaaaaaagtataaatagcctactatgtgggctcttgacagaaaaagttgctgactcctggcttcgataaacctaggcaaggcaaccttttgttcctgaaattatgggaacaaataccactactcatagattttaataggcaggttacatagagaagagtttatgatcatttgagtcaacacattccagctactattaacaatgactaatattcattatttcctcagtcttgcttcacatctccagtttaaagagaagcagatgtttccaattttgtttttttgtttttttaacctgactttttgtcccctcttgaaaactctgttgactaaacagaaacagatccaggcgtgtaggctggaatctaaagatgggacaaagttaaaaccaataagggctgcttgccaggattgtttagatattggatcttgttcccttaagaagtttaacatttggttatatactggagagagtgttcactagaaacgtgtaagaatgttcattgagttttgtttgtaatagaaaaaaatataaatgactgcaaacaagaggaacaaacagatgactgttggtataatccatacaatgaaatgacataaaacagttaaaatgaatgaactagagttcaggggtaagtctcaaaagcgtaatgttgagcaaaagaaattataaaaggatatgtatagcatggccccatgtgtataaaacataagcctatgtgaaaatatacctacatgtgttatgttatgtacatacataagaaagctacaacatgcatagtgaatgagaaatgaaagttcagggcagaggttacctctataatgggagagagggaattgggactggttgagggttacatggcgtgtcttagtctgtttggggctgctctggcaaaataccatanactgggagtttataaacaacagaaacttgttactcatagatctgaaggctggatagtctgagatcgacgtgctgagaagttgagtgtctggcgaaggctcacttcctagttcacagacggccagacatctttctgcaaagtccttatatggtagaaagggcaagaggtctctttggggacgctattataagggcaccactaaggccattcattagggcccccctttcatgacctagtcacctgctggtggcctcacccccaatgccatcaccttgggagttaggatttcagtacgtggatttgggagggacataaacattcacattgcagcacaagagctgcgtctgcgtttctaatgttttatttctcagtcggaatatgaatacacatattttcatcatattattctaaattgtatatgactaaaatactttatgaagactggacacagtggctcatgcctgtaatcccagcattttgggaggccaaggtgggtggatcacctgaggtggggagttcaagaccagcctgaccaacacggagaaaccccgtctctactaaaaatacaaaattagccaggtgtggtggtgcatgaatgtaatcccagctacttgggagcctgaagcaggagaatcacttgaacctggggggcagaggttgcggtgatccgagatcacgccgttgcattccagcctgggcaacaagagcaaaatcccgtctcaaaaaaaaaaaaaaaattagctgggcgtggtggtgcatgcctgtaatcccagttactcaggaggttgaggcaggagaatagcttgagcccaggaggcggaggtcacagtaagccaagattgcaccactgcactccagcctgggtgacagagaaagactccatctctaaataataaataaataaataaatactttatgaaacattacacagagaaaaataatgcatagtgtcatctggtctcctggtgcctatcatagtaaaggacagggatcatacagcacttatttggtacttactgtatacagaaggggctagtttccaaaagaaaactaaactggctttgaaggtgagccagtgaagatcatggctactgaaatgtcaactgatgacagacaaactacgagaaattgcgatttgttcctctttgtcttctgcacgctgctccacaccctgtgtatggattgtgaagttagtttagtggcttgctgttctcactttcttttaaatggcatgttgaaatagcaaacaataatctagaaaatatcagagtgaggagaatatatgtagtaggagtaagtattgtttcatgaagcaatacttgtatgtatgtttgtgtatgtgcatgggtgagtgcatgccagcatgtgtgcgtgtgtgtgtgcacatgtgtatgcgtgtctaagtgtgcatgggctggtgtactgggatgctgagtaaaatctgtttctttctatgggtcatggttagaagttagaaagccaccatattagttctctattgttgcataacaaatcatccccaaagttagccacttaaaacaatgaacatttattttctcacagtttctgtgcgtcaggagttcaggagcagctttcctgggtggtccctggacccagggactctcatgaggttgctgctgagacattagtcggggctgtggtcttctgtgatggcaaagaaggatccctgctgaaggacccgcatggttgtcagcaggcctcagttcctcgcgacatgggtctctctacagggatggctaagtgtcttcaagatctagcagctggccccctccacagcaagtcaaaggagagagagagagagagaaagagagactgaccaagatggaagccacagtcttttataaacgaatcttggaagtgacaagtatcgcttctgttgataccatcagtctcgggccatccctcttgcagtgtgacaggggtctgcccaagtatggaagaccaggcagtggggagaatgagggccatcttggaggtcggccaccatagccactgaccctgaccttgcctggacaacatctgagggaatgtaactggctaggtttttgtaacataggggagtttattagaggatcaaagagaggcattaaatgtcttgggctagaaatgtaaaacctggtccaggagtttaagaacaccctggacaacatagcaagaccccatctctatcaaaaaatttaaaacttctaggcatggcatttaaaaattagcacacacctgtagttccagctattcacaaggccgaggcaagagcatcacttgagcctgggagttcaaggctgcagtgagctatgatcgtgcccctgcactctagcctggggtgacagagctagaccctttctccaaaaaaatttaaaaataataaacaaaatgaagctttccctcaaccctgcatccctctctcactgccatcccctccccatccttccctttatagtttaactcttcatcaaggttgtctggaattgctgcctccacttcctcctctctcatcttccattttttttcctatctttatattgtaaaaataaaacatagatgcaagcaatatgtagttcaaggagttactctaaggtgagcctggttgtcactaccactcagatcttgaagtagagctttaccagcagccccaggagccccacctgccccaatcatagcctcctctctctcctcaaaagcaaccactaacctggcatctgtagttgtctcttccttgcatttctaatagctttatcacacttgagtgcattcctagtcattgtaggtttggtgctgctcatttttctatctatagttttcttctccatccctttcctttccttgcatttggtctgttgaagaacccatgcctttagatctgtagtttcccacagtctggatcttgctgattgcacactcattgtacagcactacacactcctttgtcctctaaattgtctgcagattgtcagatgcttgatcagacttaggttcaatccttttggcaagacaataggtggtggtgtgatctttcatcgggagtgtatgtctgcttgtctcactttttgtgatgttaggagctattgatgattactgcctagacccattaatttctagggagggtcaaatggtgatattctaatttcatcattactttctcatttattcattggaattcatgctcattattacctgggtccactcatttctaatgggggggagcaaaatggtgatagtctaattctattcactgcaatgaaataacagctaaaactgtatttgtaatttggaagtagagaggtagctttattcggtatatgggtggagaagcagaggacagtcagtctcccaagagaaaaataaagcaagtgagtgacaaggagacaggagctcttagttcctgacagttgtctatttctggttccagtcccttttctgattcacatgacataactatattttcataataaattcttcctttgggtttaggttaagtcagagtggttcctgttactttagttaaagaactttgacagtgagggcactgtgcacatttatgatgatattattactattagaaagtgcaggctggataattagctactatgctctgtacagaagttagttgatgtttatggatttttgttcattttaaaattcagataagctatgtttttgaccacttttcctttctgatgtgtcttcattaaagaatgcctccctaaaataatatgaatagatatctactacatcaaacagtagtttaaagaagtgaaatttttatctagtggaaggggtaatactaaagtaataatagctaacacttatatagcacataatttttgcccagtattgttttaaaaatagcaaaatgtaaggtaaattagaagaaatctttttagtaaaagaaattttctgtcaaagtgtatggcatatgaatcattttgcaatcagaaaaaacagacagttggttcaaatatcttgagagttgtgtcttacaaaattacgatcgtgtgttatttatgctttccaaaagcagttgtttaggttcttgtgtttagactgccagtaaatatgctttcagcagaacaaaacactcttgcatcttcaaaaataaaaaaaaaaagcattgcaatttgcttttgagatttcctggctctctccccaccccccgcctatatctgggccttctcttacctggtctctgcttacatttttttgtttgtttgcttttgttttcttgagatggtgttacccaggctggagtgcagtggtatgatctcagctcactgcaacctccaccacccaggttcaaacaattctcctgcctcagcctcccgagtagctgtgactcaggcgcacgccaccattcccagctaattttgtatttttagtagagatggggtttcaccgtgttggccaggctggtctcgaactcccaacctcactgatttgcccacctcagcctcccaaagtgttgggattacaggcgtgagccaccgtgccgggctccatcctgcttaagtttgatcccactctcagcactgtcttcccagtgtgatgccctgacagcccggtcaatttcctagggtctagctcttctagcccctttagtttttaactttttttttttttttttttttgagacagagtctcgctctgttgcccaggctggagtgcagtggcatgatctcggctcactgcaagctccgcctcccgggttcacaccattctcctgccttagcctcccgagtagctgggactacaggcgcccgccaccacgcctggctaattttttgtatttttagtagagacagggtttcaccgtgttagccaggatggtctctatctcctgacctcctgatccactcgccttggcttcccaaagtgctggaattataggcatgagccaccgcgcctggcttagtctttaacttaaaggaagaaaaaccctcccagttttgctgctgtttttacattggcctgcagtgccttctagagtgcctgttagcgctggggctttcctgttcccacactgtgagatgctctgcccctttcctctgctgtctgccacacaaagatgacaagttggtggtgtgtcccttcacccttccttatcaccgtgttgctttgtaaatgctacccatgggctatggattttgttacctagttaatccatctggaactggactctaaaaagtaagctcctgcattcttccagagtctctcattctctctctaaccactgcagtcagcttctttccccaccacaacacccaaactgctctcgtaaaagtcagcaacaaccctccctttgttagatctgaggcctcatttctttttcttttcttcttgtttttttttttttttttgagacagagtctcactctgtcattcaggctggagtgcagtggcgcaatctctgctcactgcaacatctgcctccagggttcaagcgattcttgtgccttggtctcctgagtagctgggattacaggtgtgtgccaccacgcttggctattgttgttgttgtttgggacaggatctcactctgttgcccaggctggagtgcagtggctgcatctcagctcactgcagcctccacctcccgggttcaagcaatcctcccacctcagcctcctgagtagctgggattacaggtgcttgccatcaagccaggctaatttttgtatttttagtagagacggggtttcaccatatttgccaggcttgtctcgaaatcctggcctcaagtgatctgcccacctctgcctcccaaagttctgggattacaggtgtgagccatcgtgcctggcctgaggcctcatttcttgatagcacttggcacaattggtctcgccctccttcctgaaacactttcttcatttggtatccaggacaacacacctcagggttttctgcatttctggctggtgcacgtcactgctggtacgattagccccattgaatgcatgaagatatgggggttagagagactagataatttgtccaaggcatccaactaactagtagcatagccaggaccaatagttaaatatttcttaagcatctcttgtgtgcctgtcactgtgcttgacacatgaacagtaaaacgtctccaccctggaggagtctgcactgtaactgggcaggaaaagggaatacttgaaattagtagtgaataactaccggtcgttcactaggagtgacaactaccagtcgttcactaggagtgacaactaccagtcgttcactaggagtgacaactaccagtcgttcactaggagtgacaactaccagtcgttcactaggagtgacaactaccactcgttcactaggagtgataaccagtgataactagcagcaggaagcagagatgcaggtgggctaaaaaagctggggagagtgagagagggaggatttgcactcagccttgaaggacaggtgagatttgaataggagacagggaggaataatgaggaggaggggcagtcaggcaaatgggggagttgatgttgaggagggtccaaaccaggccacccaaaggcttgaca

SEQ ID NO: 1538 - protein, 223 aa, Homo sapiens
MVGQENEQLPLPLLDRDIRIWQAQQSQNSGIMPEVWNPAAAANGRFGTFRCECVEGYQFSDEGTCVAVVDQRPINYCETGLHNCDIPQRAQCIYTGGSSYTCSCLPGFSGDGQACQDVDECQPSRCHPDAFCYNTPGSFTCQCKPGYQGDGFRCVPGGFKRFLCLGLLSSWDYRSDNYQSFTRSDNYQSFTRSDNYQSFTRSDNYQSFTRSDNYHSFTRSDNQ

SEQ ID NO: 1539 - DNA, 23613 bp, Homo sapiens
  source (1)..(23613)
  CDS (201)..(369)
  CDS (3824)..(3902)
  CDS (9229)..(9409)
  CDS (13105)..(13246)
  CDS (13334)..(13622)
  CDS (15407)..(15491)
  CDS (15646)..(15744)
  CDS (16591)..(16732)
  CDS (17546)..(17656)
  CDS (18387)..(18499)
  CDS (21481)..(21606)
  CDS (22463)..(22541)
  CDS (23223)..(23413)
cttgtgaattgcttgcatccaaaatatacacacagcattaagggctggtttttatcttttatttttccaatcctcttttcttctcaaggtgtccaagtcacacagagccacggaatctcacaggtgtctcagaattcctcctcctgggactctcagaggatccagaactgcagcctgtcctccctgggctgtccctgtccatgtatctgctcacggtgctgaggaacctgctcatcatcctggctgtcagctctgactcccacctccacacccccatgtacttcttcctctccaacccgtcatgggctgacatcgctttcacctcggccacagttcccaagatgattgtggacatgcagtcgcatagcagtcatctcttatgcaagctgcctgacacagatgtctttctttgccctttttgcatgcatagaagatcatgctcctgattgtgatggcctatgaccgatttgtagccgtctgtcactccccacactacccagtcatcatgaatcctcgcctcggtgtcttcttcgttttggtgtcctttttccttagcctgttggattcccagctgcacagttggactgtgttacaattcaccttcttcaagaatgtggaaatctctaattttgtctgtgacccatctcaacttctcaaccttgcctgttctgacagcgtcatcgatagcatattcatatatttagatagtactatgtttcgttttcttccgatttcagggatccttttgtcttactctaacattgtcccctccattctaagaatttcatcatcagatgggaagtctaaagccttctccacctgtcgctctcacctggcagttgtttgcttattttatggaacaggcattggcgtgtacctgacttcagctgtggcaccacccccaggagtggtgtggtggtgtcagtgatgtacactgtggtcacccccatgctgaaccctttcatctactgcctgagaaacagggacattcaaagcgccctgtggaggctgcgcagcagaacagtcgaatctcatgatctgttccatcctttttcttgtgtgggtaagaaagggcaagcacattaaatccctacatctgcaaatcctgccccttagtcacattatttttgtggcttgatggcttttatttctttccacatttcctatgtgaatattgctttcatcgttatgcctttaactggaatgggtgaggattctgggatcctttgtttagcagaaacctcataactgaatcctctatacctaggtggcctcctttagtttctgaccagtaaccctgtcatccaggtggaatcataaccatctttttatatacgtgaagtcctcacttcattttggaattccctgaacattgactttatggaaacaatgtacagcaggtcctccaacactgttgttgtgttcaaagttgttatgatgttgatgaggaataagtggtttcagtatacataattttgcttaaaagtgaagtttccaagagactttcaaagacgataagtgaggacatactgtacatcaaattcatatcctcttccagagttcatgtggaatttctctataaactgcttctagagaatctatttaggcaggttatgtgtagagatccatgtcaccggtcctcaagcttgtctttgaatcaaatcacctggggagcttacaaatgatgaggcctgcgtctcattacatgaaagtctgatttacttgcacctgtgtaggtaagtggattttttttttttttttttttttaaagcaccagaggtgattccaatgatgaagtttttagaggcatcaagctccaataagtaagaaaagaagttaattgtaataatgatttcttcaaatattatcttcaaatgtgttgtccttcaacaccacacaaatttttattatgctgttttttcttaccatttagcattttcttttttcttttcttttttttttgggggggggcagagtttcactcttattgcccaggctggagtgcaatggcacgatctcagctcactgcaaactctgcctcccgtattcaagtgattctcctgtctcagccttctgagtagctattacaggtatgtgctaccacgcccggctaattttttttttttttttttttttttttttttttttgtatttttagtagagacagtgtttgtccatattggtcaggctggtcttgaactcccgatctcaggtgatccgcctgctttggcctcccaaagtgctgggattacaggcgtgagcgaccgcacccagccaccacttagcattttcattttacatttgttgaagttatgaatttatttacccattgatttctgctttatgatacacttgcatatacataaaatgggaaatagaaaagaataaaatgggcacagtatccctaaactttcacattccgagacatttgaaaaatatttgctttttcgaaatttgtttcaattaaaatactgtggtatacacacacaatgaagtattattcagcctcaaaaggaataaaatcctctccactgcagagaaaatggatgagattgcaggtatgtatattaagtgaaataatctaggcacagaatgacaaatattacatgtccttacttatgtgtaggaagaaaaaagaaaatcttggccaggtgtggtggctcaggcctgtaatcccagcactttgggaggccgactcacacagatcacttcaggccaggagttcgagacccgcctggccaacatggtgaaaccccgtctctactaaaaacacaaaaaattagccaggcgtggtgatgcgtgcctgtagtctcagccactcggaaggctgaggcccaagaagcgcttgaactcaggaggcggaggttgcagtcagccgggattgtgcctgtatgctccaacctgggcaacagaaagagactgccatcagaagaacacccctccaggtcaatccttgctctccctcggggcttctcttaaagtgcacagccttaactggggcagggtcctgaagggtggggagaggaaggccggctccctggaatacacaatcgatccttgcaggtatccactgtcaggtctctgagcttgatgctgtcatgtcccttgacaccgcttccggggcttttcggtggatggcttttggggtggaagtggcagccccagcttaccagccatcatgctcatgtccgggatctcagtcctctggggaaggtgaggtggcttttcctcagccaaggctgggatcctcagtgggtgctggttcatctgactttcctcccaatggggtttgaaggtggagagggggacagtgcctgggccacaagagagcacaagacctggcttcctgtggaaggtgcccactccactcccacttttcatgcctccagagcccaacttgtaccacttcacagttttaccagggcccaaatctcctcctagtttgggactagaacacctctcactctccaagccatcctccaatcctgccttttccactgcttctcttacctgctcttgcacactatgactacatccttgccccacctgccccagtcaggggactgcagaactgagggcagatcttgggtaaggcctgcctctcctgcctttcttctcccaatgctccaactgggggttcatgactgcaaaaaaacccgttgtgtcaacaactccaatggcctcccttgatatagtccatcatgtagacagatgcaggatgctggggagggcccatgagagaccctgggtgacaactcctggccctggtctggccccagcctgggtctggagaactgaaagccacctggcttgttttccacaggggccagaaaaggctggagcagccgaagtctttcggaaacagtatctgcggtatattcagggctgactcaggaaagaaggtaagggaaagaaagagtggagggctgccagccccactctcctacgctgccaggcctcagcttggtgcatcttcttgaggccttcagaagtgatgagcggctccagggcatggaccctgctgctgctgcttgtcccaacctgagggaaacaaagcccaggcctagggctttagtatgaggcatgtggggagtagaaattttgtggcctttgaataggatccagtattaatccagtaataatccagccagtggattattaaagaaaaaaaatcgaacaagaatagaaattacacttctagttgatttatccttaaaacctggctgtgggattattgagctgatacagggactccatggccataaagtaggtggcagcctgtagatctatgttcacttccagagttttccaaactggatggaagagaaaatttgtggtgtgtgtagcagggaacacgtattagggactcaataccacttgagagaccagactacatctgtgcaaataaccttgtttatctagccattaaacaggaaaaaacaagtttctctcctttggggctttctgagcctcaatctactgatgggcagtacattgtgtctctccagggtaagggtgggacaggtggatttgggaagtctcagtgttcccaaggaccataagaatcctgtcttctggagatacccattaatatctcttgaggaaatactgggaaacactgccaaactgatctatggatcagtttaatccattttattaatagctcattttattatttgcagtaacatataaatcctgccctaagttattggaagacaattttataaaactgaaaacaaaacattttccctcctaaaaacactcaagtcatattaccgatagcatagatcactggggtcgcgccctcagccttgctctgggccccctctctggaagagattccttcacagagtgaccaactcctcccattttaaaaatggaaaagtcctatgtcccaagagccctcctcagttctgcgcagactattgggctcactctcctctagcaggtactggaagagccaggactggctgcagtcagccccaggaactctctgagacctacaggtcatgatgcaaggggactggtatcactgattaagctactggccggcccgtcctctttcttctgtccagtctcttgcctgcaggtcactgtccagctctcctgggcaggtgaggggaaggaaagctgcctggccctgcccaccacccacaagcacccaagcatgacactctgagttccagctctgaccccgtctcctgcacaaacccctcctccgccccacccttgcttcactccaagtgcccttcctgctccttctcactatgcattcatttctcaccagtcttaagactactgcctccaggaagccttcctgactgctccagtccattctaaccccttttctagcctcccaatgctcccagctggttgactctcccagcccccctttctaactttctagcttcagagagtgtcagagagggagtcatgcctgtaaacccaggattttgggaggccaaggcaggaagattgcttgaggcaagagttcaagaccagcctgggcaacatagggaaactttgtatctataaaaaattagccagatgtggtggtgtgcacctggagtcctagctactggggaggctgaggtgggaggatcacttgagtccaggagttcgagtctgcagtgagccatgatcacatgactgcactttagcctgggcaacaggggaggaggcatccttagaagcatcctgagagaatcaagttagatgggagcaggctttcgctcatgtacacatgtagctgtgatggatggaactgctaagttggaaaggggttgagaaccctcaggattctgggaggaggcactctggctggaagtacagtcttctgggaacctggtagggagtgacaaagccagtggagacagttgcctggagaaagtctcacagcctctgctttcttccttcccccaacaatcctttcctccacccaccagggactgtcccttgtctcagcaggagctctcccagaagctctcactcagcaccaagcttgggctgcttcccagatgcccaaaggcagatggggaaggcgggttccagccaggctcagctccaggagctgaaaagaacgctccagaagtggctctgtcttgcattcttccttaggctcaaggattcgcagataaggagccatgactttataacctttagagtatatagagatttgtatgtgtgactatgtcactaaaaaaggcactacatccattccatggaattctaatcagcaatgaaaaggaatgactgctgagacaggcaacaaaacttgggtaaatctccagagaactaagatgggtaaaaaaaaaaaggttacatactctatgattccatttataatttttaaattcatttttattttaaaattatacagggagatggggaggtcgctatgttgcctaggctgaacttgaactcctggcctcaagtgatcatcccacctcccaaagtgctggattgcaggcatgagccactgtgcccggcccaattctatttatataacattcctgaaatgactaaagtttggatatggggagcaaattagttgctgccagggttcagggcagaaagggagtgtgagtataaaaggaggagaactggaggaatactgctggagatggattccagctcggtatctcaactgcggtggtggatacatgaacctacatgtgtgataaaactagaattaaacacacacatatttataaaaatgggtacgacaggctgggagtgatgactcacacctgtgatcccagcactttgggaggccgaggcgggcagatcacctgaggtcaggagttcgagaccaacctggccaacatggtgaaaccccatctctgctaaaactacaaaaattagccaggcgtggtagcacgtgcctgtaatccctactcaggggggctgaggcaggagaatctcttgaacccagcagatggaggttgcaatgagccgagatggccccactgcactccaacctgggcgacaagagcgaaactccatctcaacaaacaaaaacaaaaaatgggtacgataaaaaatggagaaatctgaaagattgatggactgtatctgttaatatctgagtagtgatattgtagttgtgaaagatgttaccactgggggaaactgagatctctttgtagtatttctttcaattgtatgtgaatctaaaattatctcaaaaaattataattttttttttcaaaaaataaatacaaccaagtgcagtggctcacccctgtaatcctagcactttgggaggctgaggcaggaggatcacttgaggctagaagttcaagatcaatctgggtaacaatgcgagacctcatctctacaaaaaaattttaaaaattagcctgccgtgctggtggatgcttctagtcctaactcttttggagctgaggcaagagtatcacttgagcccaggagctggaggctacagtgagctatgattacaccaccgcactccagcctgggagacagaatgagaccctatctcttaaaaaaatacaattttataaaagggggaactatgggttccacacatttgctaatgggcaaggcagcctggaagagatcaccctccctctatcccttgcccaccatttccttgcagcaactttacagaacctcttccagaggaggtctgttctggaaaaatccaccccactgctgtagttctttgcctctttcttctgggacacacaatgttggtagctcagtaccagagctccatctagaagccagataactaaatcctgataaaggaaccagacaggctcggaggggaggtctgtgaaacttattccactggttttacatggcacagaattcttattggttcaacctcacagccctctctccatgtacacttatttttgggtttcctgctataccgtagcataggagacatcacagttggtgcagggcccaatgatggaatgggggattctgattattcaagcaccaatgtcctaatccatcattaccaaaagcatgtactagtgcacataattcacagggtgttgtggcaatctggtccctaacctctgagcatttctgctgctataaaatggacatacactttatcttacagagtgttatatagttaggcattatgaaagacatataaacatccctgacacctgacaaggagacacattcccaaaatggcagtacagactgggcaattggagggctcatggtgccttgggaatcttaggagatgtcaggagaccaaatgccccagtgggaaaactgtgcatctcagcagaggctggtggatgcctctcctcagtgctgctgcagtggtttaaccctggctgtcacatgtcaccctagtgagccaagaggaggaggacaagtgttggacctaagttgaaacccgaaatgactgagttcatctgtaagtgattaactagattaagtttttctgcttttagggaagagtggaggattgagtcagaaatcaagtttagttgtagaaaaagttatctttttgtacccctgagtttgcagtctgtaaaacattggagccactacacagatacacactttcgtatacagtgtgtgcttatacactgatatacacagaccatgggcattctcacaggcatatacccagtggtgtgctggtaagtgttaacagccagctttctggaaaacaacaataacaacaacctaagttgtagcagttactgatttctgtggtgtaaatactcccaccacggtgatttcaagctaccaacataattacacctcatggaagatggaagagttgtacataaaactgggtctttgtgagctgtgtgagctggctccagcataagttataggtgcacatttatgcatctgcctaaagttgcctaaatatgcaggcttgcttaggtttcttcaagaactgaaacgttaacatgaaatctgtagacacattagtatagaaaaatacgtgaggacatcatctcaactatatgcatctgtagacaccttcagtcacttagaaacatacacaaagagaagttcgaatatataaaaaaatacacacctacgcagattgatgcaggccaggacacgcatataagctcacacatagacacccacatgctcagaaaagaagagggagtaaaccaaccggatttgctcaggttgctgccctggcctgaggccccacatccctcagaacaacttaagatcaaggcagataaggtccctcttttctttcagttcccttacatggctgaagagacttgaaggacagaacgtttacagcagttgtctacggctgcctctgtgttctgaagaccccatgcacccctcgtcccttctgggttgggcctggcagtcccgtaggctgtctttcccttgctttgcagatgccagccccagagtcccacctccaccgttggtaaggaagcccctcacccctgcctctttcaattgtgggaaagtgaactccagcctctctctccttcctcatcccagatcaacagcagatgttagtatgacccccctcctggctccctccgtgactccagctctgccccccacctccacctccacctccaccacttgcttgttcatctctcacctgggccaatgtccagccttctaagtgtttcccttctccaaactctcccttcccatttgtcaccctataagtaacctgccagattattttaaagcacagtgctgaggtcacacatgtactggcaacttctaatgcaagaccgactagggctagatctctttgaggctccctgaccacacgtccaacaactcctccctcagttcacaatttcacttctccttattttctctttctcttcctgatctgttctgtaaatttagtttctgctgtggaatttgcttgctcccttctttagttcaaatcaggcatttgctacccctcatgtctgtgacaccgtgtttatagtttataaaccactctcaaagctatttgtggagtactgaggttagccctggacatgctgtggtgagtaaaaacagatgtggctgtgtttcatgaataaagtcaacaaaatctgttgaggaccctgaccaaaagtcatctgtcccaaaatcctaagtggatttgtgaggaaagatattttcccattgtctctcttaacactcttccccctgactcccaaactatggcctccctggggtcataggaacaaagtacagaagacagagaagaagactgtggcttgcagattcttaaagaactttattaaccttgtgagtgtcatagaagcagctactgggatgttgcaagcccagtgcaaactggtatatcttgctatattgcaacatcttgaatttccttccctttatattaactacccacacataataagccacatctattatttgtgtgagcctatgctttttacttttattttagagcctctcgtttcctcatttgtaatatgtgatcagaaatctgtcattctcggcctgccgcggtggctcactgctataatcccagcattttgggaggccaaggcaggcagatcacttgaggtcaggagttcaagaccagtgtggctaacatggtaaaaccctgtctctactaaaaatacaaaaattagctgggcgtggtggcacatgcctgtagtcccagttacttgggaggctgaggcaggagaatcacttgaaccaaggaggcataggttgcagtgagccgagatcccaccactgcactccagcctgggccacagagtgaaactctgtctcaaaaaaaaaaaatctgtcattctcataaggttgttaggatgatcaaacaagataaaggtacataaaagagctctatagaattataatgtacaaggccgggcacagtggctcatgcctgtaatcccagcactttgggaggccgaggtacgcggatcaaaaggtcaggagatcgagatcatcctggctaacacggtgaaaccccgtatctactaaaaatacaaaaaattagccaggcgtagcagcgtgcacctgtagtcccagctgctggggaggctgaggcaagagaatggcgtgaacccgggaagcggagcttgcagtgagctgagatcacgccacactgtactccagcctgggcgacagagcaagactctgtctcaaaacaaacaaacaaacaaacaaacaaaaagaattataatgtacaacataaacgtattttatttattctttttttttttttttttttgagacggagtttcactcttgtcacccaagctggagtgcaatggcacaatcttggctcaccacaacctccacctcctgggttcaagtgattctcctgcctcagcctcccaagtagctgggattacaggcgcctgtcaccacgcccaactaacttttgtatttttagtagagacagggtctcgccctgttggccaggctggtcttgaactcctgatcttgggtgatccaccccctcggcctcccaaagtgctgggattacaggaatgagccaccacgcccggctactttcttctttaaatcaattatatggccattatttatttcataaataggcattcagtgactttgaaatattatggtccagatagagacaacagggttgtacaacagaaatatgtaggtcaaaattttaaatattctagtagtgacactaaaaaatataatagattggcaaaatttagtaatctataatcttgatctactacatccagaatgttatttcaacatgtgattcatataatagtgactaatgaggtatcttacactctttttttgtagtaagtctttgaaatcctgtgtgtattctacattgacgggacatctcattttggactaaccacatttcaagtgctcagtattcacatatggatactgtgcaggacagcacacactaattggtaatgtaaatacaagttagttaagatctgtgaagtactttatggtttccaaaactcttttggcatttaaatcttgcgtcagccccagcaggtagatgtttatcatttccattttgtagaggagaggctgcagcaattacctgtaagtcacccaagctcatccagctagtaaatggtgaactcaattcttgtcttaaacctgggcactttcccttttgcttgcttgcctaaacaagcaatacaaagacaaacttaatatttatacacatacgtcccatggctcattgcagtagtacaggacagaaacaattatttcaaaatccacctacaatctagtctccaaaaatcctgcccagtttaattgcaccacaatctactaactgtaattctaaaaatgtgtatgttggataatcttccagctctaaagtgctgtgaattaaaaaaatgccataggcaggcataaaaaaatcctaccctctattatattctccatctgatatagaatatatgatatatattctataaatgaatacatgatacagagtctatcatgtagtgatttactttttacttttgtgaattacaacgtggtagggtaggaaatgagaaagcttaaaaagcctaattttctcactaaagcataaccagacacagcagcctattaggggtttctccagaagatggcaggcagtcaagggggacagagttcgacccgcgacaggccaactgatttccccaaaaagatgccaagggcagctaaccgccctcctggcccgcgaagctgctccttgagggcccaaaacttcccggaggagccagaggaggccctcaggagccacagctctccctgacttggcctgtatttgcacccctagggatcccattccctttcccgacgcagcgcaaggaaggggagcggaatgggggctgaaaggcaataaaaaacttgtaaagccgtatctgctagttctcccagtgggctatgtccctgcaaatatcctccacaagaagtaaactgggtgggtaggaagaggtgaaggctccctcctcagggctgccgggaccgcctcgagggcttgtctgtttaggtcccaattcctcccggatccgtacattcacacgagcgcagggcaacaatctgagcgagtgttcgtgtgtgcccgtgtgactcgccatcgcgtggcagatgttcagtagaacattacagtaatttctgttacaggtccatgggcgcaggtccctgagcccacagcttcgcgggggtctggccgagcatgcgtcacaacctacgcggccaagagcagtgcgcacgcgcaacctaacgcgggactgccagcaacttccgggcgtttacaggcaggcaggtcagtgatgtgtcctaagggtccgaccgacctagatacccctctttgattcctcctcttgggattagtgtccatctctggaagcaggatccaggaggacgggaggggccgctgcggaccgcagtcgctccacctggaggagacaccagaaggaagacagcctgagggacgcagccatccccggctcctaccggcgccccgccccgcgcatgcgcacgcgcacagggagtcagctggctgcgcgggaggtcacgggaagtggggcggtgcccagacagctggagggaaggaggtgtcaggcggggagagacgcaaacggcgggaccagcagcgacggtagcagcagcatggccgcgatctatgggggtgtagaggggtgagtgcggcccggcggagggagcctgggcccgaagcggggcggaagccgtggcagcctggcaagctggtggccttgatcctcggcgtccgggcactttgggcggcgggaccttgcggtgaagaggtgtgtgcacgcgcagggggccctggagccacagctgtatgccttacggggactctgcctgtgcaacagccacaccccgggttggggatcctttgtgtttcttggcggaaccacgcccctttcttccacgaaacacccactccgctgtcttcagctggagaagcagctcctttttcctattcctgacctcggacagagttttgcagaacaggtgtcaggtgtgaaattgctgagcgcgggcagggtggggagtgggagtggggagaagcgggacaaagatcttggctgaggttatccgggagctggagcagctgcgagccagagtactaggttgtcctgatgtctgaaaaccgctccatccctgttggccttccatgctgctttcactagattgcatttttctgctcagaagcttgtttactgaactttttgtaatagctctgcccctgggtatgaccatggacaagatatttaccctccctgggctacagttaccgtatgtgcaaagtgaggatagggataaataagatcgctatgtccctgccagtggcaacattctgtgaatctgagtttgtcaaatcagggaataatgggggtcgctggcctctcagccagggcactgtactttcgaatctgtgattgttttcacttctctggcagccacaccccactgctgattcacagaccccaaagtcttttcacatgaattgttaggaatgatctttcccatcctgtatttgtagcacttaaaaaaaacagtataggagtctgcattcatccttgttatagtcatctgtaagatatgacccgtttcttccagttcgtcaagacatgcttttggatgtggaatctgccacctcatgtattaactacccccttgaaatttcatgtcctctttgagtttgatgagcggtcttcagtgtcttcttctgccattcctaaaagtaatgatcaataaagaaacatatatcccatcaccacagatctccctgtgaactactgtgacccccagtaatcaacatttgaaggtttagttgcttaagtatgtatgaagtcaccctgccatctggtcagcatttctagcaaaggtgtcttgaagaccttggcagctggatcttgaaatgcagtctttagctattgtgagggaagcagagagatgtgccatttttcttaggagtgtttgctgagcattgcctgtgccagctcctgtgctcgttctgagagggtaagtaagtgatcaggagcttgacccagtggagcttgaagtctagtgagaggcggacacaaagcgtctgaacacacacttcatacagaggagactttaataactttggaggcactatgaaggtttaactaacggagacttaactaattcgttggggtgggccacacctcagaaaaggtttcgaggactaggtgaagcgtaagtagagtcttgcaggataaggaggacatccccaagggaagaggagtgagaattatgtttcagttaaagagcactcaaacactgaaccacagaggcgggtttgggagtggtgattgagtttgtcgaagctgtctcctccatcatactgggctctgccagtgtggacagcacaagcttagctctctctgtgggtttttccgagcaagatcaagtgccctcttgtgttctgtaggggaggcacacgatccgaggtccttttagtctcagaggatgggaagatcctggcagaagcagatggactgagcacaaaccactgggtaaaaaccacactgaggggatcagagggcttggttctgattttattctctgtaattcctgttgaggtggtggctgggactcacagagcagcctgtgggggcaacatagcttctgtaagcctttgtaactccttcttcccttgattggggccagctgatcgggacagacaagtgtgtggagaggatcaatgagatggtgaacagggccaaacggaaagcaggggtggatcctctggtaccgctgcgaagcttggtgagtctggggcggagcctgggaattcagccatctgtgacactgagacagctagcaagtttggactagatgagtttgatgactgcagagggaaagacctccaagacttagtccctggtgtcaaaactgtcataatctcacccagtctcatggcttcagttgccacctacaaactacaaatgtgttggaagagcacagggctttggagagctgctgagaccttggtttgaatcccagctttgctgctcagtatctgcgtaaccctgtgtaggttactcaccttctctaagcctcagtttcctcatttggaaaatgtgaatagtagctacctcagagttgttgggaaagtaaaatggcatgatacattgcaaagtggttagtatagagcctgacccataagcactcattaaatgttagctattatttactcctggttcagatctttctcccaagttgcggtagctccagctactccctggacatatatgtgagatgttctgcagacacaggcaaacctcgtgtataccaaaccaagcttacctctctccatctcccctcaccttgccccgctgcctgatctttctgttaagagcactactgcccttccaagctccaaagctggcattgttgaatcccctctttcttctgtccatccccagtccaggttgttcttataaccacagccttctgaggggtcattgtgtggggagaaaggaggactggggctgggtgaacagggtatggccagatggggagaacaggaatcaggcatcaggagggggcgggggttgagaaaagagctggggctggggctctgcacactcgctcacctcccgcgtggcctagggcctatctctgagcggtggggaccaggaggacgcggggaggatcctgatcgaggagctgagggaccgatttccctacctgagtgaaagctacttaatcaccaccgatgccgccggctccatcgccacagctacaccggatggtgaggaagtggagggaggggtgagagtgagaactggtttttttgggaaagccccttagatatagctgacaaaacttgttctgcaaatatccagaaggcagccactcttatattcccctcaactctttaagtagtttaagtctctgccagagcaaggaccaggcagcaggaggaagggcaagaaaggtctcttgatgggaatccaggagtggggtcaaacataactcccctgcagatgagggaccacctgggggcggtgtagtgaggaaggcaggctggggaagctgtcagtgctgaggaggaagtggggtggccttgtgatagtgtaaagagttttggtgtcatgggattggtgtttgaatcccagttcctgttttgcctgctataccatgttggcgaagttccaaaactctgagtttcagttttctcatctataaaatagaggaagttgtattcataagatggtttagggtatgagtgaatatcactgtgagaacgggtctagcacaatcccagtaaagcaggtagagtcactggaagaccggctgggcaaggagccacattccctctaagaggtgcaggcttgcatttctctttgtccccctagacgagggcgttatgggattagagtttttctgagacccaggctctcaccctcaggcaggaaactagctgggctcagttttctcctctacaggactgggtggtgattcccttgcctggggctgttttctgtcctgtctttccacagtggcaagctgttgctctgtgccaggcctcggccacactgagcctcctattccctttccccaggtggagttgtgctcatatctggaacaggctccaactgcaggctcatcaaccctgatggctccgagagtggctgcggcggctggggccatatgatgggtgatgagggttcaggtgagctcactgactggcccagctccaggtcctggatctgctccttccttcactccctgtctttctctccttagccttggctcactgagcccttggggcttcctggggacaactcctgaacctggccattccatgtgcaggatcatgactgagatcatagaggtgcaaatgctggacgagctgctgaccctgctctccagcagtgacttgcacccaggactcagattcatccctcagcacaggggcctgcctgtgttgacttgctgtccttagggaggagttgaaactgagggtaaggccatagatgccaggagatgccataccagtctgctaggggaaagggtgtagaagcccttccaacatcacctctctctaggtagtgtgtgtttattttcataggggcccttgaggtccagttcatggcagtgactccggtggtatttgtgacaacagactgaccttgccttatccttgggtaggagctggtgtgacacagcctcacctattctgttttccccctccaactttcccttatcttggtcagtcagatacagtttgatagagaccctcccacccccctctcccaccccctgccacccctggctgggaatcaggaaacctaatttgtataaaattcaagcagatcactaacctgtctggatctgagtttccctcctcgtgagctcaggatgactgctcccatcttcttagccctctctgctccctgcagcctactggatcgcacaccaagcagtgaaaatagtgtttgactccattgacaacctagaggcggctcctcatgatatcggctacgtcaaacaggccatgttccactatttccaggtactcctcctgctcccagtaaacatgcgcacctggggtagggcagtgaaacactccaagtaagagtggatgcaggggagggcctgggcggaccggcaggaaatagggtgagttgtgggtctgagttgcagggtgaagtcataggtgaggacagggtgcattctaggaggtgcattctaggacagggcagtgcattctaggagggtgtcagtcatgaggaagcgatggtttggggacaggtgattagccagacttcattcttgggcagctagaacctgctgggaggtgaaagagatggcattctaggctagaatgaaaagtgcaggatgagatcacagggcagagacagcaggtagagtatgaatgtgtgcactgggctgtgagctgcttctggcctggatgggtcaagagagcccttaaagaggtggacagggagagttctgggggatatgcatcttcctcctctgggcgttggggattgactcctccttgtctgtgctgtgttcatttgtggtaagttaggaaacatctgcctttagcggaaccagaggtaaaaggcgggagagaaggtgaaagggagaggacaaggttgatgagtttgatagttacctgtgaggcccagttagtcttcctgtccagacatttaggtgggctggggctggggctgggaccaggaccaaggaaggaaaatagagatgctgggaagtagggcctggattatcagggctgagggattgatgattaaagaggggcccggctaggccaaggtgaggaataggaggggaccaggaagagaaatcacttgatgagcagttgtcataggaagtgcagttagtaactgttaagctatccggactcagccaattggttccaaactctactgataggtctactgctccctcttctatcctttagtcattcttacagggttgtttcaaagatcagatgagatagtatataacgtgcttactacattgctgtaggtgctcaagttttaccacccaccccctcagacatttacttaaaatatattctgggggctgggcacggtggctcacacctgtaatcccagcactttgagaggccaaggtgggcggatcacttgaggtcaggtgttcaagaccagcctggccaacatggtgaaaccccgtctgtactaaaaatacaaaaattagccaggcgtggtggcgggtgcctgtaatcccaggtactcaggaggctgaggcagagagaattgcttgaacctgggaggcggaggttgcagtgaggtgagagcacaccactgtactccagcttgggtgacagagcgagactctgcctcaaaaaaaataaaaaaaatattctggggaaccattggttcctcaggaccttagaggtgttaaagatgtataagtttgttgggattggaaggacctaccttctgtggtcaaataagttttgggagaaacaaattgatttcttgattgcaggacttctcagagcctttaatttgctaatgtgcattgtgactccccaagggagagttacaatatgcaatattccttggattcctttgaccaaagaaatcttttcaagagcaccccaacccagctactcaggaggctgacgtgggaggattgcttaaggccagcctaggcaacagcaagaccttgtccctaaaaaggaaaaaaaaaaaattacaaaaaaagagcagctcaagaaactataggaaacactttggttaacacaaatctgttctctgtgctgccttcaaactaatctataagaaataatgaagtccatgttagggaacacagataacttttctcaaatgagaaatctcaaatccctgtactttggagttaaaaaaaattattctagcttttccaacagtagagacattaggaaggccaactttggtgggcagattggggattttcctttgcttctgatgactctcttgtgccctttctcctctcaggtgccagatcggctagggatactcactcacctgtatagggactttgataaatgcaggtttgctgggttttgccggaaaattgcagaaggtactggaggtggggggtgggttttatctggctttgttctccaaagatccccagttgggagattgagtggggttcagacaggactgacaacaattttcctctcaccaagtgacctcagttctctgccaccactggccttggtggtggtgggccttggggtggaggcagaagggcacgtgggtcgtgttgacagttttgtattacctgtgtttttttctttaatagctatcatggcttgcttaggctgtatgcctgtttctgaggaatttatgaagcagttgtcctttggacaaatctataactttcttttcctagccaattatactcaaagaactaggggattatagagaggttaggcatattttgttgggtgtcaggagatgctgaacagagggcttgtatatctgtacattgctctttctccactgtgaggtccatcctgccttaatttgggttcctgcagcctcagggcattctagggctctcttagatcctgctggactgagtcccctctagaaaagaagcaggaacaggctaaccaacagcagactgttagaagttggtggagggcactgacaggagtaccagccagctgttcagctaggatcctgggtccccagagctgacagcctcataggaacagacttacagtaactcagtgtgagctggatgcatactaggtgccagtgcattcctttagtgggtgctgccctcccttcctgagttgggggcctgagtgagcacctctgtacagggcacccctctacagagggaggtagctggtatgtttgtcagtggagacttgcttctccacctgccacgaggcgggcatccatccggcagtagactcctagctcagggtgctcctgtgatggctgccttgcaacagagagaggatagcccaggaatggcagctccctcctttctcaccagtttccttcttccgtcctccctaccccaggtgctcagcagggagaccccctttcccgctatatcttcaggaaggctggggagatgctgggcagacacatcgtagcagtgttgcccgagattgacccggtgagttgaggtgggagtgaaggtggggagctgctgggtgaggagtggtcctttcccactgtggatgggactatcccatcaaaccctgcatagattggatactattttaaatgaacttagggtctaagaagcattctgcagaatgtctgtaacaaaaaagttctttggtcaaatgccgccctctgtaattggcctgtaatctgtatttatgtatagtaaattagtttaatgtacgtgtgtgtgtgtgctgtcccctttctattttattttttatttttttgagacacagtctcactctgtcagccaggctggagtgcagtagcgtgatctcagctcactgcagcctccacctcccactctacctcccaggttcaagtgattctcgtatctcagcctccccagtagctgggattacaggcgcgcatcaccatggccggctaatttttgtatttttggttttgccatgttggccaggtaggtcttgaactcctgacctcaagtgatccacccaccttggcccaaagtgccgggattacaggcatgagccaccgcgcccagcctgtcccctttctttcagttaatttcagttcagtcatgtttctgttcatttccctcacttctgtctttccttcctctctattgttgcttaacgctttttccttcctcttctctccttgccctttacaaatgtctcctattttcctccctttttttttcccctttcctgagtctgtctactgtttcttggcttgagggcgagtaactgggatagagtgggttggtcataggaaactcccgccttcagcactggagaggctaggttggcccccatatccattttctgctctccacccaggtcttgttccagggcaagattggactccccatcctgtgcgtgggctctgtgtggaagagctgggagctgctgaaggaaggtgagcctggggggaggctggaagggcaagggcaggggacggggctggaaaggaggtggcccaggaaagctttttgccccagagagaacctgcttcctggaccctgaggcctagacaggccactgatgctcccgtctaaggccctcaacctcattctgccattgagccctttaatgatgtcccatccaccttccttgaactcttgaaaagatgttgtgttccaaatgatttattgaataatagctacttttaaaaagttaaagacaaatcagacttaaaattggagcactgactggcatgtgataacctgggggacatccctagtcaacataattctagctagaagaaaagaggcctggcttcttagccctggcagccttatgccaggcagttggatggtttctaccggacattctgaagtagctcaaggactcccattgctaccatggaattcctggcattgggtcctttggagctgagaggagagcaggccccctatgttgctggctccaatactcgagtacccagtgcaccctgtgtgctgggcacttggcatgtaggcccctccagcatctctacaggagtacctcagggtctgggcgtccttgtctgtcttccttcctggccccagtacaggttgctgttctcctcttatctctgtccttgtgttcttccctccaggttttcttctggcgctgacccagggcagagagatccaggctcagaacttcttctccagcttcaccctgatgaagctgaggcactcctccgctctgggtggggccagcctaggggccaggcacatcgggcacctcctccccatggactatagcgccaatgccattgccttctattcctacaccttttcctagggggctggtcccggctccaccccctccaagctcagtggacactgggtctgaaaggaaggagtcttttgcttcctttctcctttttacaaaaacaaacatagaagaaaataaatgcactttatccactccccaattggactgcattatcaaacacatgtgctatgtacatcctcagtgcacctgccagcagatatcctgga

SEQ ID NO: 1540 - protein, 601 aa, Homo sapiens
MYLLTVLRNLLIILAVSSDSHLHTPMYFFLSNPSWADIAFTSATVPKMIVDMQSHSRARKGWSSRSLSETVSAVYSGLTQERSSLTWLKRLEGQNVYSSCLRLPLCSEDPMHPSSLLGWAWQSRRLSFPCFADASPRVPPPPLVHGRRSLSPQLRGGLAEHASQPTRPRAVRTRNLTRDCQQLPGVYRQAGSRRTGGAAADRSRSTWRRHQKEDSLRDAAIPGSYRRPAPRMRTRTGSQLAAREVTGSGAVPRQLEGRRCQAGRDANGGTSSDGSSSMAAIYGGVEGGGTRSEVLLVSEDGKILAEADGLSTNHWLIGTDKCVERINEMVNRAKRKAGVDPLVPLRSLGLSLSGGDQEDAGRILIEELRDRFPYLSESYLITTDAAGSIATATPDGGVVLISGTGSNCRLINPDGSESGCGGWGHMMGDEGSAYWIAHQAVKIVFDSIDNLEAAPHDIGYVKQAMFHYFQFPSSVLPTPGAQQGDPLSRYIFRKAGEMLGRHIVAVLPEIDPVLFQGKIGLPILCVGSVWKSWELLKEGFLLALTQGREIQAQNFFSSFTLMKLRHSSALGGASLGARHIGHLLPMDYSANAIAFYSYTFS

SEQ ID NO: 1541 - DNA, 15182 bp, Homo sapiens
  source (1)..(15182)
  CDS (201)..(236)
  CDS (6850)..(6921)
  CDS (7370)..(7436)
  CDS (9192)..(9410)
  CDS (10309)..(10518)
  CDS (11029)..(11313)
  CDS (11358)..(11554)
  CDS (11809)..(11988)
  CDS (12857)..(14176)
  CDS (14689)..(14730)
  CDS (14821)..(14982)
  modified_base (1017): a, t, c, g, unknown or other
gggagtgtaaattagttcagccattgtggaagacagtggcaattcctgaaagacctaaagacagaaatactattctacccagcaatcccattactgggtctatacccaaaggtatataaatcattcttttataaagacatatgcatgtggatgttcattgcagcactgttcatagtagcaaaaacatgtaatcaacctaaatgcccatcaatgatagactggataaagaaaatgtggtacatatacaccatggaatactatgcagccataaaaaagaatgagatcatgtcttttgcagggacatggatggagctggaggccattatccttagcaaactaacacaagaacagaaaaccaaataccacatattttcacttataagtgggagctaaatgatgaaaacacatggacacatacaggggaacacacactggggcctttcagagggtgggtcaggaaaataactaatgggtactaggcttaatacctgggtgatgaaataatctgtacaacaaacctccatgactcaagtttacctatgtaacaaacctgcacttgtacccctgaacctaaaataaaagttaaaaaaaaatacaccaagattcaatgtctggttcatagaggtaactaatatgtagcaaccccagcagttactttctctctttcttttcttttttcttttgagacagggtcttgctctgttgcccaggctggagtgcagtggcacgatcacagctcactgtggctttgacctcctgggctccggtgatcgtcccacctcagcctcccatgtagctgggattacaagcatgtgccgccacacccagctaactttttgtagagatgaagttttgccatattgaggttttgtcatgttgcccaggctggccttggactcctgggccttaagcaatccacccgcctcggcctcccaaagtgctgggattacaggcatgagccaccacacctgggtccagcagttactttctataagaggtaatggaggccgggcgcantgtctcatgccggtcctcctcgctgtttgggaggccgaggcaggtggatcttttgaggccaggagtttgagacctgcctggccaacacggtgaaatcccgtctctactaaaaatacaaaattatctgggtgtggtggtgggcacctgtaatcccagctacttgggaggctgaggcaggagaatcacttaaacctaggaggtggaggttgtagtgagccaagatcgcaccattgtacttcaccctgggcaacagagtgagactctgtctcaaaaaaaaaaaaaacaaacacagaagaagaagaagtaatggaggccaggtccagttgtcgtcacgcctgtaatcccaactacctgggcaggctgaggtgggagaatcactttggcccaggactttgaggccagcctgaacaacataacaggatcctgtctctaaaaaataaaaatgaaataagggagcactgcttactagcagccttcacaatccatgtttagaggtgtccaggagcaacctaggagctcagagaagctgccagcagctaaaaacttatcagtttccaaaaatcattatgtatattggagggacaaaggccaatcaccttgtggttcactttggacttgggagtaggtaggtggcagcaataagtccccattggtctgaactccactttgcctaagacctgattcagcctgtgggtgcttcctgacaccccatgaaactgatcggtccataagactgtaagatttgatatagatatacagatatatagatttttttttgagatggagtctcactctgttgcccaggctggagtgcagtggtgcaatctcggctcactgcaacctccgcctcctgggttcaagtgattctcatgcctccgtctcctgagtaactgggattacaggtgcccaccaccacccctggctaattttttttgtatttttagtagagacgggttttcaccatgttgaccaggctggtcttgaactcctgacctcaggtgatccacctgcctcggcctcccaaagtgctgggattagattacaggagtgagccactgcacccagccagatatgatatttttattaagatcttttctattacagaatacaaaattgaaacatacagaaaagtagaaaaatataccaaatctaccatttaattaaaatcaccgtttatgtcttggtgtattccatttattgattgattgatttgatacaaatattacctaaggcctccaatgcacggtgctaggcactggggggtactgaggtaaactcagtgctttggagagcctgtagcatttccctccagtctttttctagatatctctgtacatgcaaaaatgtttcaagcttttctaaaatcataggaacagtctaaaaagtgtaaaataaatctcaattttatcaatagttttgaacaccttggacaccttagctttatttgaactaggaatatgttgctctcatttctactgtcactattagtcatgaactcaaagtggttaagatgagagatgagctgggaatcaattagggaaaattatgttttgggggtggaatacggaggacctctccagctccagctccatcagctttcttttttttcttttctctttttttttttttttttgagacagattcttgctctgtcgcccaggctggagtgcagtggcagtgatctcggctcactgcaacctccacctcccaggttcaggcgattctcctccctcagcctcccaagtagctgggattacaggcacgcaccaccacacccagctaattttcatattttagtagagatggggtttcaccactttggccaggctggtctcgaactcctgacctcatgatctgcccaccttggcctccaaggtgtagtgctgggattacaggcatgagccactgcacccagcctctatcagcttgcttttttttttttttttgaggagtctcattctgtcacccaggctggagtgcaatggcacgatctcagctcactgcaacctccacctccctggttcaagcaattccctgcctcagtcttttgaggagctgggattacaggggcacaccaccaaacctggctaatttttttgtatttttagtagaaacggggtttcaccatgttggccagactggtctcgaactcctgacctcaggagatcagcccgcctcggcctcccaaagtgctgggattacaggtgtgagccaccgcgcccagcctctattagctttctaatgtcctcggagttccttcttccttcagtgttcatgctgatggatgaacagccttccctccactggaggctgtccttgcctctcctaactgggggctgccatggctcagtctcccctcggcactgaagcatccacttttctgggtctcagtccacctcttgcttgtgtatttcctggtcctcaacagaccctgttgagcatagtctaggaccacttcatgccttgacagactccatttggagactgcagcagatgctattgatgtcccacatccccttggcccatctgagactgcctatagctgcaacagacagcacacagcatgctaatagcatcctacctccagcacctgtgttttctctctcacttctctctctggttctcaaaccagattctccaccattttcatgttttctgaaatcagctatttacaagagcgattgctcccatgagtgtatttgcccagtgtgtctgctcttccattagcagcaaaactggcaaggggggattggaggtggaggtggaggtggaaatgcaatggggctatgtttctaccataggtacttcgtactttgtgtgtgtgtttaaatcaactttttttgattaaaaaaaaagtctatgattagaaaaactatatatgaaacagcacacagacccatccagatccttaatccctttctccagaagcaacaactattgtcaaatttctgatgtattcttccagaaatattctagggatataaaagtacaagcatcttaaatagattccttttgtttacatacatgggagcataatatatataacatatatttaaacttcactacatatattggggatcactccaaaataaagctacttcacttttcccccacaactttaagtaatgtgttgcttggaaatcccaagatttatataagctctccctttttaatagacattttgattgtttaatcaactcatttgctatcacaaacaattctgccttgaatattcttatgtacatgtttttacacacatgtacaactatacttttaatacttaatataattaaaattttctcttttgataattagcaggtgagaaatagtatcttcttgtttgatttgtatttctgatgcgtaaagttggaggtttgtatatgtttatcaaactacttcttttttatttttatttttttaagatggagtttcactcttgttgcccaggctggagtgcaatggtgcaatttcagctcactgcaacctccgcctcacaggttcaagcagttctcctgcctcagcctgctaagtagctgagattacagggatgcgccaccacgcctggctaattttgtatttttagttgagacagggtttcaccatgttgggcaggctggtctcgaactcctgacctcaggtgatccactcacctcggcctcccaaagggttgggattacaggtgtgagccaccgtgcacgcccattatcaaactatttctattccttcttcagtgaattgcctattcccatcttttgcctattttctatcttattgatatgaaaactagaagaaacttcctttgttgagaaaattattcttcttaggccaaacttaaaagtttttagacagtcaaatttatttcctttttggcttctcagttttatgtatttaaaaaacttaaatacataaaaaaccagtattatcaatttaaaaaaccttccgcagtttaaaattattttatgaaataacttgataattttttctagtattctctcagattcttttttacatttaagactctaggccagtgcagtggtgcacatgtgtaatctcagctacttgggaggctaagttgggaggatagcttgagcccaagagtttgaggctattgtgagctatgatcatgagctttgatcatgctactgcactctagcccgggcaacagagggagaccttgtttctaaaagaaagaaaaagaacgagagtgagagcaagcgagagagagagaaagaaggaaagagagagagaaaggaaggaaggaaagagtgaggaaagagaaagaaagaaacaaagaaagaaaggaaggaaggaaggaaggaaggaaggaaggaaggaaggaaggaaggaagggagggagggagggagggagagaaagaagggaaggaagggagggagggaggattctagtctatctggaaattattttagagtaaaaatcagctctcatatttttatcttttctttatttttcatttgtaaccttgactgtttgatcagtgattcagcctttgaggagttcagaacaatccagatttcccaggtccttgggaacatgactgaacctggcttatagacatgttgctggttgtgacttcgaacccctaagcctctcctgctctcggagctttgggtccagagcctaagaagagcctgggcaccattctcactggggcatgtgggctccaggtggcccccacagtgacctggattcccatttcactcagagtcacaggctgtagcgcttcctctgtaaattcagccctggctccctcccctcttccctcccatcccatctgcacactgccctgccagctcttccttgcggaaatttgcatcgtgggcttgtagggactgcttcactgagccatggtctgttcggctgccccactgctgctcctggccacaactcttcccctgctggggtcaccagttgcccaagcatcccaacctgtaagtgagactggggtgagacccagggaaggtctgcagaggcgacaatggggacccctgattgggagagacaaagcatggaatgaaaggataggtagtggggaaagggctgaggggagaggaagtaatgtgtaaggaaagtggatgctttgttatgagatctctgagaactcagttttactttcctgggtgtgggggatagctcttgtttccttatttgagtccctgtaaactcatatgatacctgctgtactttggataaagtctcattcagtcaagctggccatttaaaaagaaaaagaaaaattttgcagatttggaaactattggcttagaggatgggagagaatctgaggaaagacatcagagtctagagggtgcctttccatctgtgttctcctcaatagatagctatatctatggctatgtctatatgtcactaagcctaaatctatctctattgctaaatttaaatctatctttatgtaaatatatatctgtatctgtatctaaatctatctatatctatatcttttttaagacatgctctcaccatgttgcccaggctggacttgaactcctgggctcaagtgatcctcccacctcagcctcccaagtaactgggactaaaggcacgtgccattgtgaccagcttatactcacgtcttatccatactcgtatctatatcaatatctggttttggatagatatccacacgcacacgcaggtgcatatagacagggctcaggtctgtgacacagtgagcccctccatatttcctggaggaaggactgccatgttctctctccttgggccagctccatcctcacctccctaccagacagacccttccctgcctgccccatccccctatcttctagctttggccgatggccaagggccagacaatgtgggcccagacctccaccctcaccctgacagaggaggagttggtgaggaaataatgtacaggaaccaaagacggaggaaagaggctgccttctgctcaccctgctgtcaaatcctacagaaggaataaactccccaagcgcctgggccccagccagcaatgtccagctccgctgctggagctccagaccaagccatttcaattagcctagaggcccagggacaggtaaacgcaggaaggaattaaacaaagcatgttgacttcccagggcgtgcctggttcctggtcttgggtgggatagcagggttcctggggttgcatccctggcaccccctaacagaagcctgctttcccttcctgatgtgtacacttgactcctggcaaaaagaagagctggttgagactgagtcatgctggctgagactagtcaggctggcccctggggtgcctttggaagggacttgaggtctcccctctgtgttctgttccagggacagagtcaggctggaggggaatctggatctgggcagctcctggaccaagagaatggagcagggggtgagtgtatggacaggaggaggagggagggggaggagatgggagctgggaatgaggtggaaacccaggacccagaaaagagagggcaggtgcagcgagggagtggtggcggagagagaggactggctctgatcacagtcggacaggtctgtgaccagttctctagcggagaggcctggaaatgaactcatttgtctttgaagcctcatccataaaataggtgttgctggacggatgacatgaagccgtgtatctgaaggcacagtgcctaggggaggacttgctcccttcctgagccctgtctatatgcacctggacaggctgtgggagggggtctgctctgcattcctgggactggccagctaggtgagagaatccagaggggaccggcttgtggcctcgctgcctgtcctctccagctgtcccctctgctcctgtagaatcagcgctggtctccgtctatgtacatctggactttccagataagacctggccccctgaactctccaggacactgactctccctgctgcctcagcttcctcttccccaaggcctcttctcactggcctcagactcacaacaggtaccacttgcgtgggaagggggctgagagtgaatgaacataggctcccgggcctcctgcagccagcttgcctgagactctgtgagcccctctgtatttcctggaggaagggctgcctggttctgtctccgtggcccagctccttcctcacctccctaccagacagacccttccttgcctgccacatccccctatcttctaactttggctgatggcccaagggacagacaacgtgggcccagacctccaccttcacctgttccctggcccccgagacatctgctgcttcgagtcctgactgaggaggcagtcctgatgcatgggcctgactgaggcacctgtagcttggggattggtccagatacccagccctaaagcctctcaggcatcaggcaggtgtctgccctgcccacctagcttcttcagacagcctgcccaccccctcttctcttctctctgtcagagtgtaatgtcaaccacaaggggaatttctattgtgcttgcctctctggctaccagtggaacaccagcatctgcctccattaccctccttgtcaaagcctccacaaccaccagccttgtggctgccttgtcttcagccatcccgaacccgggtactgccagttgctgccacctggtgaggaaggttgggaacttggaaaccaatggccttaagtgaaataaatgttctcagtggttttctcctctctgaacctgtagtttggccagctggtccaagcacagctgctcctctgggtgggagaaaaagccagccatcatagcagatcacaggccctgagcttggaacctgagtagggagactaatgagagaggccccagagacataaggaccaggagagaaagtgctggagtgactgctttttaccttaggaggcaggaagcagctccagtagcccaggatacctgggggagggagaggcatagaccaaaaaggttccctctttggtttccaataacagatagagtcttccaggctggattgcagcagccacattcaggtgcccacccagggacaaaaagaaaaagttaaaaagctagggagggagtgtggaggaatgggctccagagtcaggggagaagccattgctcggctgcatctgagggccataagtccctcctccagggtcccctgtcacctgcctccctgcagtccccgggatcctcaacctgaactcccagctgcagatgcctggtgacacgctgagcctgactctccatctgagccaggaggccaccaacctgagctggttcctgaggcacccagggagccccagtcccatcctcctgcagccagggacacaggtgtctgtgacttccagccacggccaggctgccctcagcgtctccaacatgtcccatcactgggcaggtagccagcctgtcctctccttgcctcctttctccttcctcttacttcccttcatcctcgtcttccttctctgctttccttcacctcttcttcccacgcctccctcccttctccttccttcttttctttccacctctttctcacccttttcatctttccatttacccattctggggaaacaaaggctaagaggtcccttggtgtgaaaaattgcaatgtggaaaattctaaaaatggccagctgttttcactgtggtctgggacttctgagacccttttcagggtttacaaagtcacaactattgtcctaatatgctaagatgtcatttgaccctttcactcccactccctcaggtgtagacagtggccctttccagaggctacagggccatcacgagattgaatgcaaatgcagatgggagaacccagacacgggcaagatttgcaaacatgtaaaacaaagtcacttgtctaattatgttttggaaaatgtagttatttttcataaaaatgtttctgttaacaaaaatactacaattctccacacaaaatatggagaatgtggagaataccgtctcaatgtctgctgagaacagatccatgtttttcaagatgctaaaatggcaggggtggtgcaggaagggcatctgctctagggagagcatgaaattcacgggcatgggccgataaaagagagatctcttctacctcctagaaatccttcttggggacagggaatgtccaccaaaggggccatcctgggaccttgcttgctggggttaagcactgggtggcaggcagaggacaggagcaaggctgtggcttggaaagcagcagagattctgtggtgcagcggggcccagaggagccacatagcgccgcacacacgtttctgcaggtgagtacatgagctgcttcgaggcccagggcttcaagtggaacctgtatgaggtggtgagggtgcccttgaaggcgacagatgtggctcgacttccataccagctgtccatctcctgtgccacctcccctggcttccagctgagctgctgcatccccagcacaaacctggcctacaccgcggcctggagccctggagagggcagcaaaggtatgagaaggggccagcagtcaggggtcagagggaccagggggcagctgtctcttccaggcagctgggtcttcagctcatgagaaacagaggccacagttcaaccagagagtggggtccaaggccaacactgttttctaccccatcagagccatgccacgtctattgccataacataaccacatgtgtataggaaacttttgcaaaatgctgtcatctacacaatctcatttaactctctatggaattagtttgatggtagtctccattttacaaatgaggaaatggtggaaactgagtcctagagcttgttagagaccccacagtcccctccagcaaaatccaagctctcttcctctgtccaagtggagcccacacatcatttggctcttccccactgcttcctctgtttctgaattgctagaaagactgaaacagcatgtcagagcctgctgggttccaggcctgtccctggcccaatgacagttcccttcttcgttttgccttcagcttcctccttcaacgagtcaggctctcagtgctttgtgctggctgttcagcgctgcccgatggctgacaccacgtacgcttgtgacctgcagagcctgggcctggctccactcagggtccccatctccatcaccatcatccagggtacgcagggcctgggcgcagtgggctggtcccagctgcttgccttgggagcacgggctctcttgcatggcacgtctctgccctgggcaacaggaccaggcttcggggcccgcatagggttctgcccaaggagaggctcaggtgaggctgtgattgctgagtagcgcctgctcgtcattcttcagatggagacatcacctgccctgaggacgcctcggtgctcacctggaatgtcaccaaggctggccacgtggcacaggccccatgtcctgagagcaagaggggcatagtgaggaggctctgtggggctgacggagtctgggggccggtccacagcagctgcacagatgcgaggctcctggccttgttcactagaaccaaggtgaagcttccaccctgctgcccacgtgccccctccacggcccaccctagcctctctaggacccagcttgcagacccttttccccaaggcccagcccacaggctgttcagcttctctgaagtggagccctagcagagccaggaagtaggagtgagagggcttctgggggtcaacaatctccatgggtctgggatgctcttctcaaaccatcattccaccatgtgtcccacttcatgctgtctcgtctgtctcagctgctgcaggcaggccagggcagtcctgctgaggaggtgccacagatcctggcacagctgccagggcaggcggcagaggcaagttcaccctccgacttactgaccctgctgagcaccatgaaatacgtggccaaggtggtggcagaggccagaatacagcttgaccgcagagccctgaaggtgagatctctgagccacagtgggggccagctgggcagtcgggggctgaagactccccacctgtgggcatttctgtccctctgatgtcaccatgggctgttgggcagcagacctttccagagtccaggggcctgctcctgatccatttctcctctcagacaccactctctgaggctgcagaatggaggcctggcgctgggagcacatgggggttggaggcaggcaagggtgtggagacatgaggcccgaggcgtgtgtgcgcatgcaggcgtgtggctatgatacagacaggaagtttctatggagacgctgaagtatgcttggctttgctgggctcacctaaatcggctctctgtatgggcatccattggtgacccatgagctgcagccaaaagtgtaacaaagggcaatgatattacacaccgtttatgcctgggaatacatggcatgtgtgaatgcacagacatgcgtgtggccgtcgcctccaggacacggtgccctctaccactgctggtcaccattcctagctttgcagacctggaggggccaaagaatgggagaagtcccctcttagaacctgggtggcccctagggatggagggggaagaagggttttcagcagaggggctgggtgcaggtcaggggacatatccttgaagatgccccaggtggttggccaaacagctccctgttcttcccatctagaaagtctcccttcacaggcctgtcttcctctcccttttctctccaaccttgggtcgcacactggactgggaagggaaggtgtggggtctgttgttctcattgcccccggctcagtcctgtgggcgccagcagacggggttcatctttcttttgggtgctgcagaatctcctgattgccacagacaaggtcctagatatggacaccaggtctctgtggaccctggcccaagcccggaagccctgggcaggctcgactctcctgctggctgtggagaccctggcatgcagcctgtgcccacaggaccaccccttcgccttcagcttacccaatgtgctgctgcagagccagctgtttggacccacgtttcctgctgactacagcatctccttccctactcggcccccactgcaggctcagattcccaggcactcactggccccattggtccgtaatggaactgaaataagtattactagcctggtgctgcgaaaactggaccaccttctgccctcaaactatggacaagggctgggggattccctctatgccactcctggcctggtccttgtcatttccatcatggcaggtgaccgggccttcagccagggagaggtcatcatggactttgggaacacagatggttcccctcactgtgtcttctgggatcacagtctcttccagggcagggggggttggtccaaagaagggtgccaggcacaggtggccagtgccagccccactgctcagtgcctctgccagcacctcactgccttctccgtcctcatgtccccacacactgttccggaagaacccgctctggcgctgctgactcaagtgggcttgggagcttccatactggcgctgcttgtgtgcctgggtgtgtactggctggtgtggagagtcgtggtgcggaacaagatctcctatttccgccacgccgccctgctcaacatggtgttctgcttgctggccgcagacacttgcttcctgggcgccccattcctctctccagggccccgaagcccgctctgccttgtgccgccttcctctgtcatttcctctacctggccacctttttctggatgtggcgcaggccctggtgttggcccaccagctgctctttgtctttcaccagctggcaaagcaccgagttctccccctcatggtgctcctgggctacctgtgcccactggggttggcaggtgtcaccctggggctctacctacctcaagggcaatacctgagggagggggaatgctggttggatgggaagggaggggcgttatacaccttcgtgggccagtgctggccatcataggcgtgaatgggctggtactagccatggccatgctgaagttgctgagaccttcgctgtcagagggacccccagcagagaagcgccaagctctgctgggggtgatcaaagccctgctcattcttacacccatctttggcctcacctggggctggcctggccactctgttagaggaagtctccacggtccctcattacatcttcaccattctcaacaccctccaggtaggtgataggggggtggctgtgttttttgcttttttagatggtctaagtcactgccgatctcttctctaggaggtaccaaggtggagcagaagaaacataggttcaggaattttggaaggcttaggtgtggatcccagttcctccactgagtagctggataactttggacaaattacataacctctctgagctttggttttcttatctgtaaaataatagctgattttgttggagaaatcaggaaattgtcagtacccaatcctttgctatcccttttataaccataacaataagaaaagcacctgaaatggatcctatgcaccaaatagtggtaacagaaaaattgagatgagaagccttaggatgtgaattacacaggacagaaggagcatgttgattcgggtggatcccttcctccttgaccagcttatccccatgtccctcttctcagggcgtcttcatcctattgtttggttgcctcatggacaggaaggtaagtctgcccacctaaccccctgcctcacttgcagcccgcaggccggggccgtggctggcataagcagagcatttacctctcccgcagatacaagaagctttgcgcaaacgcttctgccgcgcccaagcccccagctccaccatctccctggtgagttgctgccttcagatcctcagctgtgcatccaagagcatgtcagaaggcattccatggccctcctcagaggacatgggcacagccagaagctgagagaagattggggttgttttttagaatgaacagttttccggttccagctccccaccagtggaatgagcagcctggtcagagcagtcaggatcagggtcctgggttcctgattatcacctggactcctgctgactctcttttctctggtttctccatctaaaaatctgcctccagttagcatttgaaggaaaagtgtggga

SEQ ID NO: 1542 - protein, 929 aa, Homo sapiens
MPINDRLDKENVLWPMAKGQTMWAQTSTLTLTEEELGQSQAGGESGSGQLLDQENGAGVPGILNLNSQLQMPGDTLSLTLHLSQEATNLSWFLRHPGSPSPILLQPGTQVSVTSSHGQAALSVSNMSHHWAGEYMSCFEAQGFKWNLYEVVRVPLKATDVARLPYQLSISCATSPGFQLSCCIPSTNLAYTAAWSPGEGSKASSFNESGSQCFVLAVQRCPMADTTYACDLQSLGLAPLRVPISITIIQGTQGLGAVGWSQLLALGARALLHGTSLPWATGPGFGARIGFCPRRGSDGDITCPEDASVLTWNVTKAGHVAQAPCPESKRGIVRRLCGADGVWGPVHSSCTDARLLALFTRTKLLQAGQGSPAEEVPQILAQLPGQAAEASSPSDLLTLLSTMKYVAKVVAEARIQLDRRALKNLLIATDKVLDMDTRSLWTLAQARKPWAGSTLLLAVETLACSLCPQDHPFAFSLPNVLLQSQLFGPTFPADYSISFPTRPPLQAQIPRHSLAPLVRNGTEISITSLVLRKLDHLLPSNYGQGLGDSLYATPGLVLVISIMAGDRAFSQGEVIMDFGNTDGSPHCVFWDHSLFQGRGGWSKEGCQAQVASASPTAQCLCQHLTAFSVLMSPHTVPEEPALALLTQVGLGASILALLVCLGVYWLVWRVVVRNKISYFRHAALLNMVFCLLAADTCFLGAPFLSPGPRSPLCLVPPSSVISSTWPPFSGCGAGPGVGPPAALCLSPAGKAPSSPPHGAPGLPVPTGVGRCHPGALPTSRAIPEGGGMLVGWEGRGVIHLRGPVLAIIGVNGLVLAMAMLKLLRPSLSEGPPAEKRQALLGVIKALLILTPIFGLTWGWPGHSGVFILLFGCLMDRKIQEALRKRFCRAQAPSSTISLVSCCLQILSCASKSMSEGIPWPSSEDMGTARS

SEQ ID NO: 1543 - DNA, 946 bp, Homo sapiens
  source (1)..(946)
  CDS (201)..(746)
cagggcagctggtggcctcttgcacactggccagcaatgcaccggctggtccctgtgctccatgggacatgtgatcctgagactgtgacctacttcctctcatggcctcttactttctctttgccccaccatgtccctgctcaggggttatgtcaacccacagaaatggaaatctctcagtggttcctttgtgggagagcatgctgaagggacttgagggtggcctggagaaccaggccctgctctttgctgtgttcccaggtctatacatggtgaccatcccgggaaacctcaccatgaccatggtcatcatcctggacacgcacctgcacttcccagtgaacttcttcctcaggagcctcccccttcctggaccttggccatgcctccatcaccccaatgccctggttaacttctcttcctcgtccaaggtcgtcacctttgcaggctgtgctgcccggttctttttctccttgctgtctaccactgagactttcctgctggccgtgatggcctatgactgcttcgtggccatctgtagtctggtgtggtgcccagtgaccacgtgcctctcgatctgcatcatcctgggaccaggcacctactgcagggtctgcctcagctccatcgtgcagaccggcctcatgttccagctcccttctgcagggaccaaccacattgaccactctgtgacatgccccagctgctccggctggcctgtgcatgcctggccctcaatgagctgaccaagttcagcctttgtgggctcatgatgggaacgccactcttgtggtcctcgtctcctttggctgtgtcacagtgaccatcctgaggacaccctccgcagccagtgacataaggtcttcacctgtagctcccacgtgatgaccgtgtccctgtttgatgggactgtgtttgtcacatatgcccagccagggactatgga

SEQ ID NO: 1544 - protein, 181 aa, Homo sapiens
MLKGLEGGLENQALLFAVFPGLYMVTIPGNLTMTMVIILDTHLHFPVNFFLRSLPLPGPWPCLHHPNALVNFSSSSKVVTFAGCAARFFFSLLSTTETFLLAVMAYDCFVAICSLVWCPVTTCLSICIILGPGTYCRVCLSSIVQTGLMFQLPSAGTNHIDHSVTCPSCSGWPVHAWPSMS

SEQ ID NO: 1545 - DNA, 1336 bp, Homo sapiens; identical to SEQ ID NO: 569
  source (1)..(1336)
  CDS (201)..(598)
  CDS (785)..(1136)

SEQ ID NO: 1546 - protein, 249 aa, Homo sapiens
MSGENVTKVSTFILVGLPTAPGLQYLLFLLFLLTYLFVLVENLAIILIVWSSTSLHRPMYYFLSSMSFLEIWYVSDITPKMLEGFLLQQKRISFVGCMTQLYFFSSLVCTECVLLPPWPTTATWPSATRCATTAGDFILAFIILVFPLLATILSYWHITLAVLRIPSATGCWRAFSTCASHLTVVTVFYTALLFMYVRPQAIDSQSSNKLISAVYTVVTPIINPLIYCLRNKEFKDALKKALGLGQTSH

SEQ ID NO: 1547 - DNA, 4011 bp, Homo sapiens
  source (1)..(4011)
  CDS (201)..(369)
  CDS (1717)..(2215)
  CDS (3715)..(3811)
gatcgagaggtcaccaggtgggggtaggattggggttcccctctgaacggtgagaataaaggagaaaagacctctggacaatcatccttaatctcgtgacgccctcctctccacccccgaagcttctgtattctttgcttttaaacactactttgacccttcaggtagcatgcttgtaggggtacccctccaggagtggcatgcctctgcgacccacgggacctgcaaggagtggggcttgtcccgcctgggttccaagcctgcccccctccttcttttcagctgagttctgcctctcctccctgagtgggcagagggcaagggctgagccagacagaattgagagctcggaggaaggaaaaaatcagggtaaggagttaggacagagaggcagcaatggggctgagcctcactggggcgcagagggactttaaacttggccccaagaagacaggctccagatgttttgcctcggaggaatatggagagcaggctttcctgggggtggggaggtggggtcctgggcatcttcctcatcttcctttcccaggaaaactctggcttgcattcttccctctgttctcctgacatttgttttagggtgctctccagacctcagccctccttctacgtcccactccctggtctgatgtcttcagggtttgggagggactgcagggagagagcaggggacagggggactctggctgcctccctgtccccaccagggcagctgacacccccctagacccctcaccccagccccattatgtggtgtggtggagtccctgtatcaggatttcgctccccttccttgcagctgacagaggaggcctgagagcgcagtagtaactccttgcagttctagggtgtaacactctcctccagggagctccaggctgtgcagacattattgatctcctgcctggcagaagttgaacctctgagtgtttaagctatttacccctggacactcaaccagccaaggaaaaattttgctctagcgtccccattctcatcacttggttagtcacaggctgtgactttaccctacagcctctgtctggggacaggccttcataaatgctgttcccagcttctagggtcatagcaggttctaatgtgggaacaggaagtccagcaaatagtgaggaaggtggctgctctatggctctgtgattttagagccatgttctgccagaagagcaaggagagcagacaggcttgtctgaaagccctccctcttaaatagcatttaaagaaatttctttctcttcagcctccccacactcccaacttttgtccttgagaaaaggtgcaacacttctgagtcttcagtggaacagaaataaactgagccagtgcttgattgtctctatagcaatccacccttccctaattgagtatgtggttttcattcattttctctcattggttcctttatttccactccatcaccctatgttcactctgggcagggagctaataggtctgcttaggttacagggtggttttgaatttggccagctttactgcaacatatagccaactgtttgtatgtctttcaaaggtttagaatggagctcagataccataccccaaagatgctggcagagacattctgactcattaagggagagctggctgatagcagagaggggtgacatcagccttgcagacattgccctggggaattctgagcagtgttgctcacagcaccacctggccagatggagaccaccatggggttcatggatgacaatgccaccaacacttccaccagcttcctttctgtgctcaaccctcatggagcccatgccacttccttcccattcaacttcagctacagcgactatgatatgcctttggatgaagatgaggatgtgaccaattccaggacgttctttgctgccaagattgtcattgggatggccctggtgggcatcatgctggtctgcggcattggaaacttcatctttatcgctgccctggtccgctacaagaaactgcgcaacctcaccaacctgctcatcgccaacctggccatctctgacttcctggtggccattgtctgctgcccctttgagatggactactatgtggtgcgccagctctcctgggagcacggccacgtcctgtgcacctctgtcaactacctgcgcactgtctctctctatgtctccaccaatgccctgctggccatcgccattgacaggtgagtgcagcagcagtggggacaacaaaggcggtcagggaggaaggggcattggaattgccccctcctgtactgcagttgcagattgatgagaggtgtctctattccccctagatgtggttgcatgggggactcaaaagcttgcccattgactgacagtgagaagagttctccttttccagctttgttcagacagaagacagcagagccctctagagttgggtgatgggaagcttttgatctcccttgctatggatgttttcctagatattacacctttcaaggtctagagtagacaggtaagaggagatatcgagggaaactttaagcgtcaggcagttacctcttgagtcaatgtggaaatcttgaaggaggtttctatctcatcaagacttcctctactaaaatatgaccttctagcatcatctgtttttaaataagattcaaggatttatgactggctgtggtaaacagttcaagcctataatcccagcaatttgggaggccgagataggaggagcatttgaggccaggagttcgagaccagcatgggcaacatatccagacctcaccttttgaaaaaattaaaaaattagctgagcgtggtggtgtgtgcctgtagtcctagctagttgagaggctgaggcaggaggatcacttgagcccaggaattccaggctgcagtgagctatgttcatgccactgtgctccagcctgggtgacagagggagaccttgtctctaaaaaataaataaataaataaaaataaaaagattgagggatttgttttgaaaaaaaagggaacatatgtttatttactttttgttgttgcattaatcactttgcaccttttagtccatttgcacagatagtgcagaagacctgtttctggtgatcgcaaataaaatcagtaagagcagcctctgcatatctttcttcaacttagtctcttcctttagtgtaaacttgtgctaatgggccaggctggtctttgttcctcgggggacaatctttgctagctcctctgcccacagctggactgtcattacaaagcacctggttacagtctagagacaattatcctgaggatcaaatcaggcttctgtgtacttggatctgaacagcctgtctctctcctttaacccagagagcctgaggcatacatgctctccctgttctctggcctcaaggatctgagggggtttgacctggccctcacagtcaggacagtgttctagggaggagcacagctaagagagcttgttttctgagaccgtaggcagggcgaccaggggtgggatgaccgaaaaggataacctgaaaaaagggggttaccaaggaacctctgtctataaaaccgctgaggggtggaaactctgcctcccttctctagggaaggacatcaggaagttagcagcttacatagcccttggtctgtccccgtagatccttgcagagtgctacttcttcttggccaaattccctccactgaatcacagagccctgcagcttttcatttacctggaggccaaattccctccactgaatcaaagagccctgcagcttttcatttacctggacaaggaccccgcatgaacccactgaaggagcaggaggggagcagtcaagtagagtatctacttcgtaggttcctttcaaagctgccaaggaagagctccagggactttgtctctgaacttttttgaaagtagaagccgccaccttctctcttagcccatgaacaggacaaagcatacagagtcatttcctgaagtttcatactagcgagaaactac

SEQ ID NO: 1548 - protein, 254 aa, Homo sapiens
MPLRPTGPARSGACPAWVPSLPPSFFSAEFCLSSLSGQRARAEPDRIESSEEGKNQAPPGQMETTMGFMDDNATNTSTSFLSVLNPHGAHATSFPFNFSYSDYDMPLDEDEDVTNSRTFFAAKIVIGMALVGIMLVCGIGNFIFIAALVRYKKLRNLTNLLIANLAISDFLVAIVCCPFEMDYYVVRQLSWEHGHVLCTSVNYLRTVSLYVSTNALLAIAIDRALQLFIYLEAKFPPLNQRALQLFIYLDKDPA

SEQ ID NO: 1549 - DNA, 2901 bp, Homo sapiens
  source (1)..(2901)
  CDS (201)..(324)
  CDS (2268)..(2701)
tatcagtaagaatatcagagggctgtggaaaccccttgcggtactgggagtaataccatcgtctctccctctgaaaataggaggattttcacagggatgtgtacacaccctgcgatattgggagtaagatcatcctcttcacccaggaaatgactaacaaggtcaagggggggcgtactccccctgcgatattgggagtcatgtcgtcctccccaaacctggatgttaacaacgagatcacagagggggtgtacacaccctgcgacattggaagtaatatgatcctctccccacctggatactgggaaggataccacagcacgggtatacgttttctatgctgttgggagtaatatcattcttttcctttctggatattagcaagaatatcacaggggtgctgtacaattacttcgacattgggagtaatatcatatcatactctattttcctggatattgggcacaaaaacacaaaagggtgtacaacccctgcgatactgggagtaatagcatactcttcttccctagatgttagaaaacaatatcatcagggctgaacactcctcgcgataatgggagtcatatttactctttcacaggtcatttggaacaatatcacagggggtgtttacaaacagaggtggtgtacaccccctgtgatattggaagtaacatcattctctccacctactgacattaagaacaataccccagcgggaggtggtacacccccagtgatattgcgaataatgtcatgctctccttccctggatattaggaacaatatcacaggggggtgtacaccttctgtgatattggaaggaatatcatcctctcccccgctagatattagaaaaaaatatcactcacggtgtacacccactgtgatatgaggagtaatatcttcctagggtattacgaataatttcacagtccgtacacacgtgctgtacactcactgtgatattaggagtaatatctacctagtagataacaaataccatagcagggtgtacacccactttgatattagctgtaatatatttctaagttgttacaaatatcacagggtgtacaaacatggtgtacactcactgtgatatcaggagtcgtatctctgtaatatattatgaataatatcacagggtgtacacccactgtattattaggagtaatatctctgtaggatattacaattaagatcacaaggtgtagagccaccgtgatattaggagcaatatctttctaggatattacaaataatatcacagggtgtacgcccactctgctgtctggagcaatatctccctagcatatcaaaaatcctatcacagggtgtccaatctctgccttccaggttctaagggattctcctgcttcagcctcccgagtagctagggttaccagccaccacgcccggctaattttttttttttttttttcactggagatggggtttcaccatgttggccaggctggtctggaattcctgacctcaggtgatccatcagcctcggccgcccaaagtgctgggattacgggtgtgagccatgccgctgggccaagagttatatattcaattcatttggaaacacagctcccatctttgagcgtgcatgtacttttatgaagaaatgatgtcagaaaaccgaaggatgataataaatatgaaaagtaacaggcatgtgaaaaggtctcccgattgagaactataaggttcgatgtcgttttcagataatgtggtcctagctcttgtgtcgtccttttacatattctacatcaatagaagttgtagcacggtgtcagaataaagtagagtgtatttcacggcttcttaatttctttcaattacactgagatctttttcttcaagagagaaggacattgtcatggcattgtattttttctgaaaagagtaggctgtattttactgagattacggatttgttatatatgacgttttggtcttctaatattcttcagtggattttctctaaagtagtatgtacagaaagccttgtatagcaaaaaagtaaatcacgtaataattctgagatttttggaattgtcacaactgagaaacattgctggcggtgtatggaccgcaagtgtgaagatgttccttgtgaattgcttgcatccagcattaagggctggtttttatcttttatttttccaatcctctttccttctcaaggtgtccaagacacacagagccacggaatctcacaggtgtctgagaattcctcctcctgggactttcagaggatccagagctgcagtcggtcctcgctttgctgtccctgtccctgtccacgtatctggccacggtgctgaggaacgtgctcaacatcctggctgtcagctctgactcccccctccacacccccatgtacttcttcctctccaacctgtgctgggctgacatcggtttcacctcggccacggttcccaagatgattgtggacatgcagtcgtatagtagagtcatctctcatgagggctgcctcacacagatgtctttcttggtcctttttgcatgtatagaaggcatgatcctgactgtgatggcctatgactgctttgtagccatctgtcgccctctgcattacccagtcatcgtgaatcctcacctctgtgtctttttcgttttggtgtcctttttccttagcctgttggattcccagctgcacagttgaattgtgttacaattcaacatcatcaagaatgtggaaatctctaattttgtctgtgacccctctcaatttctcaaacttgcctgttctgacagcgtcatcaatagcatattcacgtatttccatagtactatgtttggttttcttcccatttcagggatccttttttcttaatttaaaatcgtcaccttcattctctggat

SEQ ID NO: 1550 - protein, 185 aa, Homo sapiens
MSSSPNLDVNNEITEGVYTPCDIGSNMILSPPGYWEGYHSTEDPELQSVLALLSLSLSTYLATVLRNVLNILAVSSDSPLHTPMYFFLSNLCWADIGFTSATVPKMIVDMQSYSRVISHEGCLTQMSFLVLFACIEGMILTVMAYDCFVAICRPLHYPVIVNPHLCVFFVLVSFFLSLLDSQLHS

SEQ ID NO: 1551 - DNA, 1054 bp, Homo sapiens
  source (1)..(1054)
  CDS (201)..(582)
  CDS (652)..(854)
  modified_base (69)..(168): a, t, c, g, unknown or other
cctcaagcacctgatcttggacctacttcttctaaattataaaaggactctccccaggtagagggaagnnnnnnnnnnnnnnnnnnnnnnnnnnnnnnnnnnnnnnnnnnnnnnnnnnnnnnnnnnnnnnnnnnnnnnnnnnnnnnnnnnnnnnnnnnnnnnnnnnnngccggactgcacgaggtcgcttcgccgcccatatggtgaggaaaggaaagagagacacgggtctggaggccgagagcgcaagaccggggggtgagcacccggcacgctgcgagggtaacaagctatcaggaatgcggggtccgtggcgggggagtgttgtgggcgcggttaggccgagtcctttagacgcccagctgcacaacgtgattgcctacagaaggacctgcttcaaggatgtggaaattccgaatttcgctgtgacccttctcaattccccgtcttgcatgtgtggcaccttcaccaataacataatcatgtatttccctgctgccatatttggttttcttcccatctcggggacccttttctcttacgataaaattgttttctccattctgagggtttcatcatcaggtgggaagcataaggccttctccaccagggggtctcacctgtcagttgtttgctgattttatggaacaggcattggaggctacctcagttcagatgtgtcatcttccccgagaaaggctgcagtggcctcagtgatgtacacggtggccatccccatgctgaaccccttcatctacagcctgagaaacagggatattaaaagtgtcctgcggcaccgcacggcagcacggtctcatctcaatatcttcttatctgttccattccttttgtagtgtgggttaaaaaaggcagcaaggtcaaataagaatgatgtcacagggtgaacacccactgtgatattaggagtaatacctccctaggatacagaatatactgtcacagagtatacacacatggggtacacctgctgtgatattagaagcaatatctccctaaagtacgatgaaaaatatcacagggtgtgcacactgtg

SEQ ID NO: 1552 - protein, 194 aa, Homo sapiens [sequence omitted]

SEQ ID NO: 1553 - DNA, 6168 bp, Homo sapiens
  source (1)..(6168)
  CDS (203)..(480)
  CDS (782)..(837)
  CDS (1253)..(1390)
  CDS (3663)..(3801)
  CDS (5596)..(5968)
tcccgcgcccccttcgcgtaggccctggacgggtcgtctgggtctgtggttgattacttgtctctcctttccctactccagagtaagccctttgagaaggggccgtgcctccgtcttggttctgctcccggcccctacccaaggtcgggcccacggcaggtgcgccagggcccggcactgagcgtgtcttctccccgcagccgcccccgagggcagcgtggccggcgactccgccttcagccgcgcgccgcgctgtgcgcaggtggagcgggctcagcactgcagctgcgaggccggattccacctgagcggcgccgccggcgacagcgtctgccagggtaggcgcgggctccgccaggacactggggacagcacggggaggacatggggcggggaaggggctctcacccaccgccctcctgccggcacgggtggcttcctgcgcgcggtctcagaaggcctggccactttgcattataggtaagtgttgacctagtgatggctagaaggcagctaattcacagaaatcagagctcgccccgcctcagaacctggtccagcctatgcccaagccacacgcgcttggttcaggagagccttgagaccctccatcccctccgccctggctggaatcacgtctacgggtggcaaggaggagcttaaatcgccgtgttggtagagcgggcccggagctgggtaggggtgtgggactcattccttggtcccctctgggcttagctttcctgacggctcagttttgctgtgctctcctgattaccagagttctctccccaaacaacgcaaagcaggagttcaaagctgagatctggtcagttggtgctaatagcctcattttacagcacagaaaggaggattcccaaagataaagagagttaacatggggctgttaacccatccctactttctgggaataggcttgatttgccagcctctgcagggtctccccaggtgtcttcagcctaagacagtgatgcctttctagggcctagcacttcagctccctctcactcctccttttagccctctgggccctcggcttaggagaaagggaagcacacctgctcctcttgtgagtgctctgctgggggtagggcatggcggctgcccgaggcccagccacttaactgcagctgccactgcctccaggaattgaagcatgattgttctgggtcacagctggcaacacttgctgcatggctcctaaagtcacagtgagcacttctgtctgcagacgtgaacgagtgtgagctctacgggcaggaggggcgcccccggctctgcatgcacgcctgcgtgaacaccccgggctcttaccgttgcacctgccccggtggataccgaactctggctgacgggaagagctgtgagggtgagtgaggctacagagtgtcgtctgcacccagccacctgctgctgtgctgaacccccaggacctcacagtcgggagtgaggtggttaggagagtcacagtttcagatacattggatttttaaaaagccaccaaccaaagggcttctcaaaggtcaggccacattatcatctacataaataggaaaatgagttccttaaacatcttggcaactagtcttttccgactttatttgagtaaatgggttttttgttttcttcaaggtctggtcaattctacccactcaacaattccttcagctagggctgggcctaaaggcagagtggccaggtggtcacccatgtcatgtaatctggaggaacccatgagactccatgaccctgtgtccacctgtaagtccacctctgaaaggggcagcaccttacaggcacttatgtcttagtgaggtcgggcgctacagcaccagccttgtctgatggtagctgaggacaacaagggaggcggagcacccagggagggacaagagtcgggggcatcactacccctggcttgtgaggtacaggaagtgagggggcttatcagagcctgaaagattgtggctctgatcaaggacacagcctccatcagaaccacatccaggcaggtcaggactcctcaggctgggtcactgtcatttgccaaccccagctaaaaaccagtcagcctctcaggtgcagagagtgggttggggggcagcggcgcagatggaaaataactggctcaggtttcaccccagtgctgaatcctgtccatcagcagtggtttcctggagggccgggttgaggtttctgaggctgattcctggcagagtgggaaacaacatcttaagttgacaaggaatgtctgcagcagggatgggaggcacctaagagattaggaaggatgtgtgcagagtgggttggttgtagaacagagatgctgagaaccctcgcaacagtcaccatcatcactacaggacaagtcccagggacactgggtgcctaacaggaagcctcctgtgtttccccacctccacttagggaaaatacagatgtcagttgatgtagacatgctgaatctccacatgagctgagtcagagcacacatctcaggcctgaagcccaagtgggatcatcctgacccttggcccttaaaccaccatgctgcagtgggcctttcggggggctggttctgctcctgcaggcatacctcacactaggagggtggacaggcccacctccccagctggacttcccccatggaaacaggacacagaggggagccccgctggctccagataacagctctgacccaccaagggagaacgggagaagagagggcagagggctcctccatgggctgacgtgggaatgtgaggggagaggtggctccccggtgacatcccattggggccccgctgcagggctctgaggagtgggtgacctggggctggagcaggagaaggcatccagatagccacccacactccctccctcccacagtgctcacgaaggcccacctggggttgcttggggttgggagggacggcctccagctggggagactctctggatgtctgcaaagggagcagagaactcatacaaatcatgatattgaggtgtctgcactcgcatggggtgaggctggcagggaagactttctagaagattctaatttaaaaaaagtgtgtgtatatatagtatatataggtatatggtatatatatgctgtatatggtgtatatatggtatatatatgaatatggtatatgtatatatatgtatatggtatatatatatacacacaccatatataccatatatacgtatatatggtgtgtgtatatatataccatatatacatatatatatataccatatacatatatatacacacacacatatatatatatgaagaataacagccatggagggtaatggggcacttgggctgagaagcagacaggtctaagagaagcattgtgaccagtaacactcacctggtgctttccaccatccttgccacctgtcataccccagggaaagaggacaggatcccagggaggggcactccctggcatttcctcagggccctgattccacacagttaaggaaggcaggctttctgctttaagaataagtgccaggagcagggagcaccacattacaggacctgcagggcctctcatgtggttctgtctgcaatggagggaaggtcagggcgattctcacctgttgtatgtcctgtatctcagatgtggatgaatgtgtgggcctgcagccggtgtgcccccaggggaccacatgcatcaacaccggtggaagcttccagtgtgtcagccctgagtgccccgagggcagcggcaatgtgagctacgtgaagacgtctccattgtgagtatctccaggggaggcacaccctcacccaggcctccaagtgtggctgggctggatgcttcctagaggttcttgggagaaggtacagttataccatagaaagatgagaggcaggaggctgggaggctggtgtctctgaatttccatttccgcttagtggttgcatttaatgcgttgctgctctggagaaataagaaccccattccccatgggagtaatatactaagtgcacccccactacatagaggttgatggggttgctgccaccccaggatggcaaagccagggcaggcactgaagggaagaagctgttggtgacattaccctgataaacccatagcagcccaggagacaggtatagatcacatggatttgggaggtgacagcattcacatagccaggaactatagactcccttgagttacactgcatatcccgtgcaccctgcattatatcactctgcttttccaatagtactagaaggttctacatctagtaactgcaactcttaaacagcaagtagagcttttttttttttttttaaagttgggagatgggcctttaaggggaatgactacaactatcacaaagcacatacattttcctctcaaaaagagatcacaagagccctagcgttgtctttaaaatgaagtaacagccatggagggtaacttaattatttgaattgctgttgagttaaagcagattagaagcagcaagaaacttagtggcactgaagcatggcagtttttagagagagtgaagacatcagaaccttcctcatgaagtcactcggtgaagggatagggaacgggtctatgacggcctctggggcattcgaccaacagctggatgtgacagttgactgcataatcatgatgctacagaatcgccaaatatactagattgcatttgtcttttaacaacatagagaaatatcgaaagcatttccacaagaccctctttccaaatgattaaggaaaacagggcttcctgcgttgagaatacacgtgatggccaggcacagtggcttatgcttataattcgagcactctgggaggccgaggagggcggatcccttgagatcaggagttcgagaccagcctggccagcatggtgaaaccccgtctctactaaaaatacaaaaattagctgggcgtggtggtgggcacctgtaatcccagctacccaggaggctgagacaggagaatcacttgagcctgggaggtggaggttgcagagagcctagatcatgccattgcactccagcctgggcgacagagtgagactctgtctaaaaataaataaataaaatacatgctgctgtgtttaggaagttcaccgtacaccgtgtgggaagcactgcattacaggatgttgctggctaactgctgaggtcctgccattactgggcgaggtcgcagcacatggagaaagggcacctggtttgaatatcagcattgccattgttatttaatattcccaggctatatttttctgtaaaaatgatagtaatagcataaataaatgtatgtgcacacacatacacacgtacacaggtgggcagggagcacccttgagcaggaacagaagcagcagcccttcctttgccatgcctgacaccagctacattcactcgtccacagctccatagctcctgggtgaaggacccgtggctgggaaaggtcatctaggtggcctctgcaagagggcaggtgggcagccgggtcagagcagctcttcatgagactccccaaggctgactgcctccattttgcctctccgctccagccagtgtgagcggaacccctgccccatggacagcaggccctgccgccatctgcccaagaccatctccttccattacctctctctgccttccaacctgaagacgcccatcacgctcttccgcatggccacagcctctgcccccggccgagctgggcccaacagcctgcggtttgggatcgtgggtgggaacagccgcggccactttgtgatgcagcgttcagaccggcagactggggatctgatccttgtgcagaacctggaggggcctcagacgctggaggtggacgtcgacatgtcggaatacctggaccgctccttccaggccaaccacgtgtccaaggtcaccatctttgtatccccctatgacttctgagggtacacaggggcactggggtgtggagagctgacctcatttctcttccccgaaggctcagcttcgggcaccgactgcgtggagcctcccgcctgttcccgccctctcaccagtgcacccaggcttctagggcagcgttgcacggcgccccatggaatagcacggaagagcagccacaaaactcaactgctgccatcact

SEQ ID NO: 1554 - protein, 327 aa, Homo sapiens
APEGSVAGDSAFSRAPRCAQVERAQHCSCEAGFHLSGAAGDSVCQGRRGLRQDTGDSTGRTWGGEGALTHRPPAGTGGFLRAVSEGLATLHYRVLSPNNAKQEFKAEIWSVDVNECELYGQEGRPRLCMHACVNTPGSYRCTCPGGYRTLADGKSCEDVDECVGLQPVCPQGTTCINTGGSFQCVSPECPEGSGNVSYVKTSPFQCERNPCPMDSRPCRHLPKTISFHYLSLPSNLKTPITLFRMATASAPGRAGPNSLRFGIVGGNSRGHFVMQRSDRQTGDLILVQNLEGPQTLEVDVDMSEYLDRSFQANHVSKVTIFVSPYDF

SEQ ID NO: 1555 - DNA, 925 bp, Homo sapiens
  source (1)..(925)
  CDS (201)..(725)
tttatctgttttgttcattgctctatctccaactctcacaacagtgcctactatatagaaaatgctcaataaatatttgctgatgcaataaataaaaaaatgtaactaagcaaccaagccccaaagagtctgattttattaatattgttttctgtctcctcacaggaagccccttggcatcacgcacctccctctgggctatggcatctctgagccagctgagtggccacctgaactacacctgtggggcagagaactccacaggtgccagccaggcccgcccacatgcctactatgccctctcctactgcgcgctcatcctggccatcgtcttcggcaatggcctggtgtgcatggctgtgctgaaggagcgggccctgcagactaccaccaactacttagtagtgagcctggctgtggcagacttgctggtggccaccttggtgatgccctgggtggtatacctggaggtgagtagacttcaggtgcatgttgtctctatgactgtgctagtacttgtcttccctgagttctggcctttggggctcaaaagactccccagacagtcaggaactgaggaaggaaggagagctctcattctccctgtaatgagagagttaaagctctggaaaacagtcaccatcctgtccctcatccacatcagaaccaaggagctgagaatgattctgttcatgggtctccagtgttcaggtgactggatttgagtgacgggactcttcctaatatggcctagagtttattctctgtgccagacatgtctcaatgacatggtgggctgggtgaagcagtccagaagacctcttcaccagtgtttaatgtatatgagggtgagggtgtgcaggagggatgtgaggccaggaggaaaaaggaattatagaaaaaaaaaattagtgaatgtaaggga

SEQ ID NO: 1556 - protein, 174 aa, Homo sapiens [sequence omitted]

SEQ ID NO: 1557 - DNA, 14739 bp, Homo sapiens
  source (1)..(14739)
  CDS (201)..(276)
  CDS (3889)..(3986)
  CDS (4568)..(6309)
  CDS (13998)..(14374)
  CDS (14460)..(14539)
gcagagctccaagggcccttggacgtctttactgaaggggaaactgaggcctggagaatttccctaagctcacacttcaacttagtgtcaaccagagtagaacgctggtcttccaggctccctccaaaagttatgctctgtgtcattaaaataaggaggagtctccttccaggaaacctcgtgttcagggaatgtgaacgatggtattaaaccaaaaacgtcccaacccaccaacaaacaaagcccagggcttcgaggctaattatgcgtttgctcgtgagtcacggtgcttctgctgagacccaaagccgagagccctggttcgtgcacttctgctcacggggagggaatgcatcagagcgcccaggagagctgtcaggctgtccttcggtttgtctgctcggcttgctgacttcatgggccagtgatagacgccaggctattcccccttcccaggagctggacaggggctggactgagtcactgaagtgattgacgacgctctcggctgcctgggggagaagttataattagggcagctttgtggccctttaactgccatctgtcagagctgccaagcagcaccaggcagcgtgggctattaggcctccaggtgctgggctcctagaggctgtggccactgcaggagctggcatcacatgctgagaatccaagggcccagctgtcagtcctggttctgtggcccctccctcccctgcgggctttgcagccgggtttcaggggagccctttggaggccctgtggagccctggccgccagccacagcagtggaaagtgctggaaaacaggaaactgctgcatgtggtgctgggatgggctttgcagatgtgaggatttatacagaggaaaatctgcaaattcttgcaatatttgtcatgctgagtgtggcccattttagacagtggtggccctgttcccatagggaattatctgtgcagtcctctcaggtcaaggggcaccttccctggcacaagcccttcctgggctggcttgatgcccctccccagctggggagtgcagactcgtagaaagccacataaagatgggtcctcagagggtgcctcatcctacactgtccttcatagatggggaaactcaagattgccctgggctggccaggtgacatgcacttaatttagtctctgacacttgggctgtgacaccgttttgaagcacgctgggtatatgagtgtacattaaatataagtgccagccagcttgtctccaggagcaattcaagctccaccttttgcacgtcagcccaggcagtaaatatctcacgtacacttacaccaaagagatgggcaaatacccacactgtccacgcagacccctaagagtacaggcaccgttgtcttggtggacagattgttttctcatgccctgaaactcagccttagaatcctaaggtcttaggaatggacaggacaccagttgtcttccagtccaataccctaccaggcgtgggagtcttctctacagcttgcttgccaagtgattgctttagcctctgcttgattgcttccagtgacagtgagcttactccctctgtgaggttgcccattttcagtgtgaactgaaatctgctactctataacttctgcacccgcttgacctctgaagccacactgagctaggttctttctgtatcccgtggcagcccttcagggatgctaggaaagtgattgtagactcctcacagcatctcctcctctggttatttattcatccacagctccttcattttaattttaatttaatttttttctcaccatgtcttagggtgctgacacagttccttcaatggatgctcagatgttctgttttctagacccccttgccatcctctagaattctttaggaagtcagtttgccattagcctttttgaagttcagagtggaactgagcccagcattacaggtgtggccacgtcagggcagtgcagggtgagaccatcacctccttttttccacatgtgatacttcttctattaatccagtctcagaccacactagcttttgtgggcagcctccttcctttgttatcgttagtaaaaagtcctaagtcttctcctagggtgaatattgagccactttttttggtgtattctgtttaggcagcttgttttctgttgctgggttctggacctgacatttgtctatataagtttttactttttttcagatgtgtccctagcataacctggccccattcctttgcatctagatgcctttggacaaggtattctttttcctttcttgtttccattgttctatatgcttagtcaagttcttaatgtaaaagtatagcaggtcagggcttccatgggctgtgaacaagtaaaaaaatcaaggtcttggccgggcacggtggctcatgcctgtaatcccagcactttgggagaccgaggtgggcagatcacgaggtcaggagatcaagaccagcctgaccaacatggtgaaaccctgtctttactaaaaatacaaaagttagccaggcatggtggcatgcgccttaattccagctactcgggaggctgaggcaggagaatcccttgaacctgggaggtggagtttacagtgagcagagatcatgccactgcactccagcctgggggacagagcgagactccatctcaaaaaaaaaaaaaaaaaaaatcaaggtctgtgtggttggggaatgggcttaggtttttatctcagagtaagcttgttgagggggcagggaaggggtgcatggggctgaggccaaattaggaagcctgggttactctgagacgtgggccaggctccagaccccgtgagttcagagccacagacagagaccagagaaataccttctttacccaaccattgatggcttctgtgccatcatttgaaattctttcctctgactcaggatttttgctcatggaaagggagacacagcattaacactcaaagtacttcctcaggggtctggagacctgggctttaagctcagaagcctttccttgcttcttgcatctccaaaaagtgatgggaatgagtgaccggcagtgattgctgcatcttccaggagtttggacctttgaacctttggtggaagttgcggatactctcacatatacacagaaattcttagttccttgactacgaataccaagaccagaagcactttgaagccttcctgacttgaggagtctatagggtccatgctgtggataagcatggaacaaggcacgcatttgcacagcgctggccgggatgaccctgcatcctttccgcattcgctcctcacaacagccccaagagcggggcgggagttaccatcccctcttcacacacgagggagctgaagcttgcaggcctcaagcttcatgcaaggtgaaactgttagtgatccttaaatattcatatagggaccagcacccatgtcccatatctctacattttacacacacacacacacacatacacacacacagttatatatgtcattgtcatcagtgatttcaaacaccaacatttccatgaacttgcctccattttcagaacattgccacacctgacctaccatcttttagctcaaagtacatctcagtaggtttcctggaacttactcaaggactccccagtgtttcttgtggaaactgggacttatacccacaaggctggcttcgggcaccagctaagccacagcagcctctcccagcgaggcaggacatggtgcagacacgtcattgccttttcctgggagggtggtttgaattcgagctagatgaagcgcaggtgaaagggctagcagatggctaagtgatggttggtggtgatgggctgggcagggcaggcccaggcgagggtgaggaagagctgcttccactgtagtcattcaggcagatcccagctctgtggtcctaactctgccgccgctgctgcacctcccggcaggctaccgtgtttgtggcctcaccatcttcccccaggttcagccctatttatttgttcccattgcctttgtgttcctcctgacagggctgtgtttaaccagcacattcagatgatgtgagggatacagagatggataagatacagttcccgccctaaggaaactgtagggatgaaagatggactccctgtccgtggaaagcttattgactggggaaggagacagacaggggacacagtgaatgacatccaaggccaccatggccaatgatggagactggaaagacgacttcatggaagggtaactgattgactcatggaatctgggaagtgtcctaaaggttattgcactggagttggacgtggaagcatgggaaaattttgtataaggacaagggacattccaggtagggagaattgcctgggcaaaggcatggaaacagaaaggcagggcaaaggtgcagaggcttcctgttcagagcagagagagcatgcgttcagtatgtgatgatggggttcaaagccaagccagcattggcactggagttgatgttggcttaaaacttgccagtgtcaggtagaggaccctgactaacgtgtgctctctccccttgcacaggctatgccactgaagcattatctccttttgctggtgggctgccaagcctggggtgcagggttggcctaccatggctgccctagcgagtgtacctgctccagggcctcccaggtggagtgcaccggggcacgcattgtggcggtgcccacccctctgccctggaacgccatgagcctgcagatcctcaacacgcacatcactgaactcaatgagtccccgttcctcaatatttcagccctcatcgccctgaggattgagaagaatgagctgtcgcgcatcacgcctggggccttccgaaacctgggctcgctgcgctatctcagcctcgccaacaacaagctgcaggttctgcccatcggcctcttccagggcctggacagccttgagtctctccttctgtccagtaaccagctgttgcagatccagccggcccacttctcccagtgcagcaacctcaaggagctgcagttgcacggcaaccacctggaatacatccctgacggagccttcgaccacctggtaggactcacgaagctcaatctgggcaagaatagcctcacccacatctcacccagggtcttccagcacctgggcaatctccaggtcctccggctgtatgagaacaggctcacggatatccccatgggcacttttgatgggcttgttaacctgcaggaactggctctacagcagaaccagattggactgctctcccctggtctcttccacaacaaccacaacctccagagactctacctgtccaacaaccacatctcccagctgccacccagcatcttcatgcagctgccccagctcaaccgtcttactctctttgggaattccctgaaggagctctctctggggatcttcgggcccatgcccaacctgcgggagctttggctctatgacaaccacatctcttctctacccgacaatgtcttcagcaacctccgccagttgcaggtcctgattcttagccgcaatcagatcagcttcatctccccgggtgccttcaacgggctaacggagcttcgggagctgtccctccacaccaacgcactgcaggacctggacgggaatgtcttccgcatgttggccaacctgcagaacatctccctgcagaacaatcgcctcagacagctcccagggaatatcttcgccaacgtcaatggcctcatggccatccagctgcagaacaaccagctggagaacttgcccctcggcatcttcgatcacctggggaaactgtgtgagctgcggctgtatgacaatccctggaggtgtgactcagacatccttccgctccgcaactggctcctgctcaaccagcctaggttagggacggacactgtacctgtgtgtttcagcccagccaatgtccgaggccagtccctcattatcatcaatgtcaacgttgctgttccaagcgtccatgtacctgaggtgcctagttacccagaaacaccatggtacccagacacacccagttaccctgacaccacatccgtctcttctaccactgagctaaccagccctgtggaagactacactgatctgactaccattcaggtcactgatgaccgcagcgtttggggcatgacccatgcccatagcgggctggccattgccgccattgtaattggcattgtcgccctggcctgctccctggctgcctgcgtcggctgttgctgctgcaagaagaggagccaagctgtcctgatgcagatgaaggcacccaatgagtgttaaagaggcaggctggagcagggctggggaatgatgggactggaggacctgggaatttcatctttctgcctccacccctgggtccatggagctttcccgtgattgctctttctggccctagataaaggtgtgcctacctcttcctgacttgcctgattctcccgtagagaagcaggtcgtgccggaccttcctacaatcaggaagatagatccaactggccatggcaaaagccctggggatttccgattcatacccctgggcttccttcgagagggctcttcctccaaatcctccccacctgtcctccaagaacagccttccctgcgcccaggccccctccgggcctctgtagactcagttagtccacagcctgctcacttcgtgggaatagttctccgctgagatagcccctctcgcctaagtattatgtaagttgatttcccttcttttgtttctcttgtttgtgctatggcttgacccagcatgtcccctcaaatgaaagttctccccttgattttctgctcctgaaggcagggtgagttctctcctcaaagaagacttcaaaccatttaactggtttcttaagagccgtcaatcagcctggttttggggatgctatgaaagagagaaggaaaatcatgccgctcagttcctggagacagaagagccgtcatcagtgtctcacttgtgatttttatctggaaaaggaagaaacaccccagcacagcaagctcagccttttagagaaggatatttccaaactgcaaactttgctttgaaaagtttagccctttaaggaatgaaatcatgtagaattttggacttctaaaaacattaaaatcagcttattaatacgggatagagaaagaaatctggtgcctgggggtccctgtgttcacccctagagtttgttttaaaatttttaattgaagcatgtgaagtgtacctgcagaaaagtgggaacatgatagtgtatggcttggtggattttcacaaactgaacatacctgtgtaatcagcatctagacccagacccagagcgtcacaaatatcccccatcctgggcttttcccagaggagatgggggcttctgaagatggacttacctgggacctgccccccatgagccaggacggtccccccacagtcagcctgtgcaaaggccccgtggccaggggtggaggagaatatgtgggtgtggacaggatgggagactgtggcctgaacaggagattttattatatctggagaccctgagagaccctgagacctggggcaccctggctggccaggtcagaagcatcctgactgcagaggtccgtgcagccacaccctcttccctgccagcaagctgtctgcggctcatcggaggcccctccgcctggagccttctatggacgtgatatgcctgtatctgtttttaattttcattcttcacttaggggaagtgaaatcgctcagagatgagatcctttaattgaaaacgaagtgtaacggaatctagtgtctttctaatgtggtaaaattctccatcaacatcacagtcagctggcagctgaacttcagaatctcacttacagcaggcgacacgggggtacaccgatgggtcacactgggtctgggggctccctggagctcctcctgcgtgtggtctggttaggagttgagttgtttgctccagggttattctcctcctcgagtcacagtcacacgaatacctgccttctctggctttcctgctatacacatattcacatggcgctcaagaagttaggctcatggcaacgtgtgtctttctctggacaactggcccagtttacagtgaaatggagaatttcaggtctccacgtctgcccaggaaagaacttcagctgactccacggggatctggaaatccacgaccaatcccgatcggctcttattagctccccgctccacaagacacctgtgctttggaaatccaccaccaatcccgatcggctcttattagctccccgctccacaagacacctgtgatctggaaatctaccaccaatcccgatcggctcttattagctccccgctccacaagacacctgtgacatcctccagggccacaggagcacgtgctgaccagttttcccttccagttcctgcacaaaaagtgtccagagggctgtttgcaaacactagtgcactttgtagcttttcaccctctgtcccagggaatctaggagagatgaggcccgtcagagtcaagagatgtcatccccccagggtctccaaggcatttccacactattggtggcacctggaggacatgcaccaaggcttgccagagccaacaggaagtgagcccagagcatggcacatgagcatcacccgctgatggtggcctgctgtgcctggtgccaacaggggcatcccggcccatacccctccagacaggaagcatgggtttgcccacagacctgtcgggtgctcctgtgagtggcctccagatgtctttgtgcataggcacaagtgggccagggctggagggaggtgggaaacctcatcatccggtgggccctgccaatcttaacccagaacccttaggtattcctggcagtagccatgacattggagcaccttcctctccagccagaggctgacctgagggccactgtcctcagatgacaccacccaggagcaccctaggtgaggggtgagggcccccttatgtgaacctcttgcctcttcctttctcccatcagagtggttggatggagccattggcctccttttcttcagcgggcccttcaacctctctgcaccatgttgtctggctgaggagctactagaaaagctgagtggagtctcctttccaacaggatgatgcatttgctcaattctcagggctggaatgagccggctggtcccccagaaagctggagtggggtacagagttcagttttcctctctgtttacagctccttgacagtcccacgcccatctggagtgggagctgggagtcagtgttggagaagaaacaacaaaagccaattagaaccactatttttaaaaagtgcttactgtgcacagatactcttcaagcactggacgtggattctctctctagccctcagcacccctgcggtaggagtgccgcctctacccacttgtgatggggtacagaggcacttgctcttctgcatggtgttcaataggctgggagttttatttatctcttcaaactttgtacaagagctcatggcttgtcttgggctttcgtcattaaaccaaaggaaatggaagccattcccctgttgctctccttagtcttggtcatcagaacctcacttggtaccatatagatcaaaagctttgtaaccacaggaaaaaataaactcttccatcccttaaagaatagaatagtttgtccctctcatgggaattgggctgtatgtatattgttcttcctccttagaatttagagatacaagagttctacttagaacttttcatggacacaatttccacaacctttcagatgctgatgtagagctattgggaaagaacttccaaactcaggaagtttgcagagagcagacagctagagataactcgggacccagagttggtcgacagatgttagatgtatcctagcttttagctataaaccactcaaagattcagcccccagatcccacagtcagaactgaatctgcgttgttgggaagccagcagtggccttgggaaggaagccatggctgtggttcagagagggtgggctggcaagccacttccggggaaaactccttccgccccaggtttcttcttctcttaaggagagattattctcaccaacccgctgccttcatgctgccttcaaagctagatcatgtttgccttgcttagagaattactgcaaatcagccccagtgcttggcgatgcatttacagatttctaggccctcagggttttgtagagtgtgagccctggtgggcagggttggggggtctgtcttctgctggatgctgcttgtaatccatttggtgtacagaatcaacaataaataatatacatgtatacatgggctgtgtgtgctctctatggaagtcttgggtaggtggtctcacacctgtggattctgctcttctatgtttgtgcaaggttgaactggacagatccttacagaaagcagattttgggctgagaataggcctttggaaagtgagtgggaggccgggtgcggtggcccacacctgtaaccccagcacgttgagaggccgaggtgggtggatcacctgagctcaggagttcaagaccagcctggccaacatggcaaaaacccatctctactaaaaatacaaaaattagccaggcatggtggtgtgtgcctgtaatcccagctactcgggaggctgaggcaggagaatctcttgaacccaggaggcagaggttgcagtgagccaaggttgtgccactgcccctccagcctgggcaacagagtgagactccatctcaaaaaaaaaaaaaaaaaaaaagaaaagaaagaaaagaaaataagtggggacccaaaagaaaataacaaatggtatctataggccaccgtggctggaaaagacctgaaggataagttcaatccattttatagatgaggaaaaggagctcaagacaggaaatgaatgtccaatagtcaccagtaagccagtggctgagccagcccggcaacccaggccttcaggctcccaggctggttcttttatgccaccaggaagccactgacgttctgtcagcatttgttcaaagcacacgtgtgtatgcacacacacacatgcatgcaggcaggtggcaggactatgttacacacctctggactcctctaagtacttagcaccaggctcaggaagtcccaggctctcaggcaacactgtctgaaggaaggtgactccctccaagtgtccaggtgtctccagaactccctcaggcctttgggttctgggggtgccacagctgctggtgcaggtccagcagttaagagaggggtgatctgctgtccctgtccctttatcccatgattatacacaggaaaagggcttccaatcatatttacctggactcttctagtgtcttagatcccttctgccaggtgtaagcctgtcccaggagattaagcccaacaggggtcagtcatgttcatcatattacagggctggacccctcccatgagcaaggcagggccttgttgcccttccctagccactgaaccttagtacagtcaaacagctttctggaattttggataatggggaaaggagttagaatctccatcccttctctttcagaagatccttgaaatttttttgtttgtttgtttgaggcaaagtctcattctgtcacccaggctggagtgcagtggcgcgatctcggctcactgcaacctccatctcccgggttcaagcgattctcctgcctcagcctccctagttgctgggactacgggcacatgccaccacacccagctaatttttgtatttttagtagagatgaggtttcaccatattggccaggatggtctcgatctcctgatctcatgttccacccacctcggcctcccaaagtgctgggattacaggcgtgagccacctcgcttggctgatccttggaatttttaatgcaagtccccttccacagatgtttcaccctacacacacactctctctctctgtctcctacctccccaggccttctgccacacccattccacagacgagaatgcagagacttgtagagattaaatcacttgtctaaggactgactagttagttgaagagtcagaattcaaacctagatctgtccaatgccaagtttctcttgttcaccaggccacgttgaccaatgaacaaacggtgttgctggaggcgagtgtggatggcttgagaaccttgagtacagggcggtgccaggctcttcccagaactgcttgtgagtgcccccacgcaagccatttttcccagccactgtcccacccttgccagcccgggggccgctgagggggagctgggcacactgttcaccgcctgtctccatcccagaggctcccgctgtcctctgccagagtgcatttgtggcatatcgccactgaaacacacttccttgccacactccattagacctttgcagtttggctgatgcaatcagctcacgtgcaaaagaaacattaatttgtactcataaaaagcgtagataaaaatcaataccatgcaatgagtgaaaaagccatcagtctactttaaatggtagactcctggcattgaaacgatcttagactgctcgtccaggtcaccccttcaccctgctcgcctccacacacccactcctacgctctcaccacacacccacatacatcctcacactcacactcactcagtgcacactcacacatacccactcaccacacaccacacacacacataccccaacacactcacacctactgcacacacgcacacccacccattcaccacacacaccacacacccacacactgcacacacacacccactcaccacacacatacacccacacacccactcactgcacactcacacccacttaccacacattttctcacacactctcattctacacacacgagacatactcatgcatatacacacccacttataccacacacacccctacacccacttacacacacccactcacacatacacccacttacacacactgcacacctacacacacgcactcaccacacacacccctacacccattcacacatatacccactcacaccccccacacccacacgcacgcactcaccaaacactcccctacacccacttacatacccattcacacatacacccacttacacacgcactcaccacacacaccgctacacccattcacacatatacccatttacacacacaccccccacacccacacgcacgcactcaccactcccctacacccacttacacacgcactcaccacacacacctttacacccactcacacatacacccacttacacacacatcacacatgtgctctcaccacacacactcctacactcacatacacacgcccactcacatatacaccctctttacataccacacccccacacacgcactcaccacacgcacccctacacccactcacacatacacccacacacgcacccacacacgcactcaccacacacacaccctacccacgtgcgcacacacccactcacacatacacccacttacacacacacacaacacacccccacacatgcactcaccacacaccccctacagccactcacatttacacccacttacatgcacacccccagacgcacgcactcagcacacacacactccgtgtgtcttgcagccctggttccacacctccggagatgggaaaatccctcccttccaaagcagcatctttcgtcctcggccagccctgagtgtctgagcgctcctctccatattgggccccaattcatctccctatagcttttcccccttctaattcaggaagggtttagaaagttcgttcattaaacaagcaaacaaacacaacaagacaaaacaacaaatccacagccctcttgaaatgcctccgggcgctgagagcccagcaggggcctgaggctgaaggcaggctcccagtccctctgcctctgctcacaggtatgggtgtgagcgtggaccccatcccaggcctcaccaacccagccgcctgcgggaatctctagagctttctgagtgtcctcggggtcctgaaggtgccaaccctgcaacctcggtgggattttggccccggcagggctctgtacatgggaggagttcagggtcattttgtaatcttcagaggccttgccaaggccctctcccgtcctgtgaccctggtgacattctgggacgctggggccacgtgaggggaggaaccactgcctggaactttgatcagcgctggggctggattgagctgaccacaggccacaccagactcctctctgctcctgaggaagacagggcagcccggcgccacccgctcggccctcacggtaggctcccggggtcgctcaagggctccagggtctgcagggacgtgggggcaggaacgggaacttgcgatctcccccgtttcagagcattccgcagctccaggcaggctgcggttctggggggcccctgccccgggaggagaagtccctgaggtgctcagctagggcgctgctgggaagaggcaggaggaaggtggggcgggggtttgtgagatgaagatctgccagtcctggcctacaaggctggtagtgagtagaggataagcagggtgaccagatgtccaggttggcctggttctgcctagtttatacttgtcatcttggcataataataataaatagtattactaattacttattaatac

SEQ ID NO: 1558 - protein, 790 aa, Homo sapiens
MVLNQKRPNPPTNKAQGFEANYAFALIQADPSSVVLTLPPLLHLPAGYRVCGLTIFPQAMPLKHYLLLLVGCQAWGAGLAYHGCPSECTCSRASQVECTGARIVAVPTPLPWNAMSLQILNTHITELNESPFLNISALIALRIEKNELSRITPGAFRNLGSLRYLSLANNKLQVLPIGLFQGLDSLESLLLSSNQLLQIQPAHFSQCSNLKELQLHGNHLEYIPDGAFDHLVGLTKLNLGKNSLTHISPRVFQHLGNLQVLRLYENRLTDIPMGTFDGLVNLQELALQQNQIGLLSPGLFHNNHNLQRLYLSNNHISQLPPSIFMQLPQLNRLTLFGNSLKELSLGIFGPMPNLRELWLYDNHISSLPDNVFSNLRQLQVLILSRNQISFISPGAFNGLTELRELSLHTNALQDLDGNVFRMLANLQNISLQNNRLRQLPGNIFANVNGLMAIQLQNNQLENLPLGIFDHLGKLCELRLYDNPWRCDSDILPLRNWLLLNQPRLGTDTVPVCFSPANVRGQSLIIINVNVAVPSVHVPEVPSYPETPWYPDTPSYPDTTSVSSTTELTSPVEDYTDLTTIQVTDDRSVWGMTHAHSGLAIAAIVIGIVALACSLAACVGCCCCKKRSQAVLMQMKAPNEYGCERGPHPRPHQPSRLRESLELSECPRGPEGANPATSVGFWPRQGSVHGRSSGSFCNLQRPCQGPLPSCDPGDILGRWGHVRGGTTAWNFDQRWGWIELTTGHTRLLSAPEEDRAARRHPLGPHEHSAAPGRLRFWGAPAPGGEVPEVLS

SEQ ID NO: 1559 - DNA, 11223 bp, Homo sapiens
  source (1)..(11223)
  CDS (201)..(476)
  CDS (1279)..(1361)
  CDS (4006)..(4116)
  CDS (4459)..(4550)
  CDS (6347)..(6769)
  CDS (7294)..(7470)
  CDS (9257)..(9340)
  CDS (9521)..(9616)
  CDS (9825)..(9959)
  CDS (10809)..(11023)
accaggggcgggacctggggcgggggacgggacttaaataaaggcagacgctgtttttctacccatgtggcccacacgcgtctccgtttcagtggcggggctggcaaacgtcgttccctagccccgcggccctttaaagcccggacaggtgcagctcggtgccgcctctggttggctggcgtggggtgacgtaatggcacatggcccgtcgccattggctgggcggcaagctccgccccctggactgcggcgcgggtgggggttgtgcgttttacgcaggctgtggcagcgacgcggtgaggagacggcccacggcgcccgcgggctggggcggtcgcttcttccttctccgtggcctacgagggtctggatccttctctgccggctcgtgggccgtgcctttgcccttctgcgaggccctgaatctgatcccttcccttcatatccggatccgggctcctccctccaagcccggggttccggacacctcccccaagacaacccctctggcctcctctccttcagtacttggaatctgatctcttctccctaattctgcggatccggcccctaatattctttatcagaccctcagacaagaggctgacttctgcccccttgtcaaggagcgaggccactttcctctccaccccatgctagcgaggataacttatttctcttctggaattgcatcttatgcgcctttccccacccatccccacagcccctgcaatacccagtttggcctcttttgcttgtaataacgcagatcccagcgccacggcaccttagaacagacctttttctttctcgcgtggggcctgactccttcagtgaagcctctccacgccctctatctgcaggtccccagcctgggtaaagatggccccatggcccccgaagggcctagtcccagctgtgctctggggcctcagcctcttcctcaacctcccaggacctatctggctccagccctctccacctccccagtcttctcccccgcctcagccccatccgtgtcatacctgccggggactggttgacagctttaacaaggtgggtgcaccggcagcctcgttagaggggaacacagcgatttagagtggggaactctgggatgcaaatctgcgtggatttaagtttcatcttggtctcttactagttgtatggccctaggcaggttgcctttctgtgcctcagtttcctagtcagtagaacagtgaagtgctagcatgtgccaggcactgtacttagctattactaattttctgtttccagggcctggagagaaccatccgggacaactttggaggtggaaacactgcctgggaggaagagaatttgtccaaatacaaagacaggtaaggggctgctgggggaaggggtgtatattcccctccccgccaaatctctgctctgctggtgtagggctaggaactcttggggagcacttattcattcaacaaatagcactgaacatctatagtatagcagtaaacaaggcaagcaaaatgcccccttcctggagctcacattctagtagagaagacaagcagtgaatgagtaagtgaataatattatgtcagatgaagaacaaacagtgaagcacggtagactgcaggacggtgggaggcaaggtgttcaaggtttggcatttgaacagagagacaggaagtgaagaagcgagctatgtgacagggagggaattgggcagaggatgggactgagcttggtgtatttgagaagtggctggagtggagtgagccaaggggagagtgctagaaggtgaaggcaaaggcttaagcctcgagggctacagaaaagagtttagattttttttggagtgtaatgggaagctcttggaaggctatgagcagaaaaagtgatactgtcttctctacacctttaaagattactcacactgctatgtagcaaacggattgtaaggggcaagggcggaggaagcagggagaccagtttgggaggcaagtgcatcatctaggtacaaaggcaacacaagctagtgtggtatctagtggaggacatgatgaagaggtcacagtctgggtatattttgcagagagaacaataggacctggtgatagattcattatgggtatagagaaacagtagaataaaagatgcttactagattttgggcctgagcaactgggtgagtagtgcagctgttttctaagatggtgagatgcgaaaccgagaaggtttaggggaggggtgggatgtggtgttctttgaacgtattgggctgaaatgtccattagacatccaggtagactccatacaaatctggaattcagaaaagagtaggaattggaaacaggaatttgagagttgtcattatatagtcagtatgtaaagaaagccatgggaaggatacagaaagccattatatagtcaatatatgtaatacagaaagccatttatatagtcagtatgtaaagaaaggcatgggaaggatacagaaaggcgagccctgagccctccagcttttcaaagtcagatggaagaggagtcagcaaaggctcagagttagacctggttgtcggttcttaacctctcagagccacagtttcttcacctgtaaaatggggatattaatacctggtttgcctatttcatagaagtgtggaaaaggcttaactgggatgcccactagaaataaaggttttgttattatgtaacattggtcattttctcttttccttcgccgggcctgagtttcctcattcaggaatgaggggattggctaagacaaccccagaggcacttccagctttgtaatggctcctgcgttgcttgcttttttaaatcacctcctatatgccaggcactgtgccagaccctttaaatacaggatataagacatcaaatatttatatatgtgtgtatatatatgtgtgtgtgtatatatatatgtgtgtgtatatatatgtgcatatatgtctgcgtatatatatgtgcgtatatatatgcgtatatatatatatatatgtatatatttgtggtaaaatacacataaaaaatttcccattaaagacatttaataatatttacaatgttgtgtaaccatcaccactatgtagttccagaacattttcattacccccccaaaaaatcctatacctattacacagccactccctattctccccttccctcggctcttggcaatcactaatttgtgttagtcaagcagaaattatggatttgctgatttcattggaatcataaaatatgtggccttttgtgtctggctagtttcacttagcataatgttttcaaggttcacccataccgtagcatatatcaatacttattcctttttatggctgaataatattctcatttggctgtaccacattttgtttaaccatgcatcagttgatggacatctgcattgtttctaccttttggctgttgtgaatagtgctgctatgaacattgtctacaagttttcgtttgaacacctgttttccattcttttgggtctatatccagtagtggaattggcaggtcctatggcaattccatgttttacttattgaggaactgcttttccacagtggtgatgccattttgtattcccacctgcagtgtgggaggattctaatttctccacatccctgccaacacttgttataggatgtatttttagccatatctacccagcaagggtattatattccattgctcagatgcaggaactgatgtatgttacaacaaacctgcagggaaggtattgtcatccccattttacagatgacaaaacaaagaggttcagagaggttaagtgacttgcccactagatctaccactagatttgaacccaggtctctctgcttcccagaaccatgaccccttccattatacctcatggcctctcctttgatattttcaccgcacgaggaagggtggagagagacttgaggagggtggtgggtggggtggggcatgtttcccaccagccctgccctgtccgatcagtgagacccgcctggtagaggtgctggagggtgtgtgcagcaagtcagacttcgagtgccaccgcctgctggagctgagtgaggagctggtggagagctggtggtttcacaagtgagtggcaaagggccttccctggaagtgggtcacaggtgaggcctggtgataaggcctgatttggccgagaagcaggggggtgcatgctggggcccatgtcctggttgtgctccttccaaacccaggtctgctaagaacttgccgggggacttgcgctccactttgagcctcagtttacccttctgccaaatggggaaagggcattggtcagatggccttttgggtcttatgtccaagctgggttgaatcacagattcaggcatgggggaatgggaacagcacttatgacactatctcagcacctcctccccacctccctccaccctgcccctgcctcaggcagcaggaggccccggacctcttccagtggctgtgctcagattccctgaagctctgctgccccgcaggcaccttcgggccctcctgccttcgtgagtttttaagttgctcttggggatgggaggggaccaccgagtccagggatccagtcctggctctgtccctagttcgctgtgtgaactcaggctactcagataaacttctctggacctcagttcttgcctgcctgacagggctggggagatgggcaaatcagtggggaaaggcttggagaaagcacaggggctagactgagtcatatgcagtatagttatcatcatgtactaaagaaatgatagacttcccagccccttcatttcccatgccagatcggactatggtaccttcctggggaggggcgggtgctgacctggagcctccatgatcgccatccatcctcacacacagtcctggcacaagagctgaacttactaccagcctcttttagagcagtctttcctgaagctacagataaagagctagctacaaagatggcaaattcagtctttgtaaaagaaaatattggctgggcgcggtggctcacacctgtaatcccaacactttgggaggctgcggtgggtggatcatgaggtcaggagatcgagaccatcgtggctatcatggtgaaacaccgtctctactaaaaaatacaaaaaattagccgggcatggtggcgggcgcctctagtcccagctactctggaggctgaggcagaagaatggcatgaacccggcaggcggagcttgcagtgagccgagatcatgccactgcactccagcctgggcgacagagcgagactctgtctcaaaaaaaaaaaagaaaatatttggtccagtggctcgtacctgtaaacccagcactttgggaggctgaggcaggaggatcacttgaggccaggagtttgagagaccagcctgggtagtagagcaagaccctgtctcttaaaaaaaaaatagtggggcatggtagtgcagcctgttgttcccctaggctgaggtgggaggattgcttgagcccaggagttcgaagctgcagtgagctatgatcatgtcattgcctgggaaacagagcgagaccctgtcactaaaaataaataaataaataaataaataaataaataaataaataaataaaaggtctgtaaaatctaattgttccacaagaggaaattggttaagtaaatgtcagttttatgacaaaatattatgtcattaaaattaattttcttctccaaaaatgtttactgatatgcagagcagaaaatattatcttgttttttttgtttttttgtcttttttattgatcattcttgggtgtttctcccagagggggatttggcagggtcataggacaatagtggagggaaggtcagcagataaacaagtgaacaaaggtctctggttttcctaggcagaggaccctgcggccttccgcagtgtttgtgtccctgggtacttgagatcaaggagtggtgatgactctcaaccagcatgctgccttcaagcatctgtttaacaaagcacatcttgcaccgcccttaatccatttaaccctgagtggacacagcacatgtttcagagagcacagggttggggataaggtcatagatcaacaggatcccaaggcagaagaatttttcttagtacagaacaaaatgaaaagtctcccgtgtctacttctttctacacagacacagcaaccatccgatttctcagtgttttccccacctttcccccttttctattccacaaaaccgccattgtcatcctggcccgttctcaatgagctgttgggtacacctcccagacggggtggtggccgggcagaggggctcctcacttcccagtaggggcagccgggcagaggcgcccctcacctcccggacggggcggctggccgggcggggggctgaccccctcacctccctcccggacgggctggctgcccggcggagacacttctcacttcccagacggggcggctgccgggcggaggggctcctcacttctcagacagggcggccgggcagagacgctcctcacctcccagacggggtcgcggccgggcagagacgctcctcacttcctagatgggatggcggccgggcagagacgctcctcactttccagactgggcagcctggcagagaggctcctcatatcccagacgatgggccgccaggcagagacgctcctcacttcccagacggggtggtggccgggcagaggctgcaatctcggcactttgggaggccaaggcaggcggctgggaggtggaggttgtagcgagccgagatcacgccactgcactccagcctgggcaccattgagcactgagtgaacgagactccgtctgcaatcccggcacctcgggaggccgaggctggcggatcactcgcgtttaggagctggagaccggcccggccaacacagcgaaaccccgtctccaccaaaaaaatacgaaaaccagtcaggcgtggtggcgcgcgcctgcaatcgcaggcactcggcaggttgaggcaggagaatcaggcagggaggttgcagtgagccgagatggcagcagtacagtccagcttcagcttggcatcagagggagaccgtgtaaagagagggagagggagaccatggggagagggagagggaggccatggggagagggagagggaaagggggagggggaggggagggggggagggagggaaggcaagggagagggagagggagagggagaaaatattatcttgtatatcaaggttgtatagatgacctcacctggtttggtgtcttcccacagcctgtcctgggggaacagagaggccctgcggtggctacgggcagtgtgaaggagaagggacacgagggggcagcgggcactgtgactgccaagccggctacgggggtgaggcctgtggccagtgtggccttggctactttgaggcagaacgcaacgccagccatctggtatgttcgggtaggtagccaaaaggtgtggcactgggcaggggcagatggggcacctgcctgcccatcctcatgctgcccccattccacccagcttgttttggcccctgtgcccgatgctcaggacctgaggaatcaaactgtttgcaatgcaagaagggctgggccctgcatcacctcaagtgtgtaggtaagtggggccctagctaggtctgggaagatggtcaggggcctgggcttggtcctttattctctcaacacaagcctgggctagactagcctagtctccaccttcatggagatctcaacctggctgggaaggcagaaaagtaaccagatacttacagtccagtacacaggtactgtgtagtatagtccctgtgtacagtgagagatgcctctgatctagttcagtggaagtggtgatggggaatcaggaaaggcttcttggaggaggcgttactttggccaagtcctaaaaattgaggaaggggctgggcgcggtggctcacgcctgtaatcccagcactttgggaggccaaggcgggcagatcatgagatcaggagatcgagaccatcctggctaacatggtgaaaccctgtctcaactaaaaatacaaaaaattagctgggcgtggtggcgggtgcctgtagtcccagctactcaggaggctgaggcaggagaagggcatgaacctgggaggcggagcttgcagtgagccgagatcgcaccactgcactccagtctgggcaacagagggagactccatctcaaaaaaaaaaaaaaaaaaaaaaaaaaatgaggaagggttggctaggagaatgaggacactgaacttggggtcaggaaacctgggttcaagacttggtttggtcccagcctagccacttatatagactaaagtaaaggctaagctgctgtaacaaaaatccccaaaagactgtggcttaaagagtatagaggttggctgggtgtggtagctcactcacgcctctaatcccagcactttgagaggctgaagtggggtggatcacctgaggtcaggagttcgagaccagcctggccaacatggcaaaaccctgtctgtactaaaaatacaaaaatttagccaggcatggtggcaggtgcctgtaatcccagctactcgggaggcagaggcaggagagtcgcttgaatccaggaggcagaggttgcagtgagccaagatcacaccattgcactctagcctgggtgacaagagcgaaactccatctcaaaaaaaaaaaaaagaatctagagggtagaggtttatttttttttatcatattacagtcccaaagtgagtagtccaggctggcaggggagctctgctagtcataatcattccagtacccagattattcctgtaacttactgcacaatcatccccttgggcgttgtctgcatggttgaagctgagtcctgggcatctctgtgtcccacatgccagcactcaggaagggagaagggaaagaaagtgcattgaggagtccaagcattgttttaagaccaagctaacggtggagctcatcactcctgtttacatcctgttggccagaactcaatcacagggacacacttagcttcaagacaggttggcaaatgtggtctctggctgggcagcctgaagtccagctagtctgcttctgtgttggtagacagcttgcagtctctgccataccatttaatcccaggcaagaccattccccaacggctctggcttcagcttccctactaaatagggattgaaattctcaccctgctcacctctctgcagacattgatgagtgtggcacagagggagccaactgtggagctgaccaattctgcgtgaacactgagggctcctatgagtgccgaggtcagtgtctacttctgcagaggaggggacgtgaggagtggaggaagagctgctccacacctgtccctccaaaccttccccttctcaggcttcagagcacccccaggcctccgcttctggagcgtggctcccctgggcctaggtgcacatctcaccctcatctttctctcctctctccagactgtgccaaggcctgcctaggctgcatgggggcagggccaggtcgctgtaagaagtgtagccctggctatcagcaggtgggctccaagtgtctcggtgagtctcctgctgatgggacacaggcacctgggagtgcctcacccagcatgaatggtgaagaggctggaatatgggcaggtgggggaaggaagggtggaatgttgcctgggcaagggcagaggggagtgttgagagatggacaagatggagtcagggtgctgggtggggggccctagcaggactctgacccctccctcccctcaagatgtggatgagtgtgagacagaggtgtgtccgggagagaacaagcagtgtgaaaacaccgagggcggttatcgctgcatctgtgccgagggctacaagcagatggaaggcatctgtgtgaaggagcagatcccaggtgagccctggggcgggagaggggaggtcctcattcaaagagaaggcaggcaagccccttccccaggtagcagtggcagctccaggccctgccccatccctactgccacccagccccctggaggctgcactgagaccgggctctacatctgatctccaggttggctctcagcagccttataccttccagggtacaaagggaatcagacctggcatcaaatcagtctgcctccttaacctgtttcctcatctatccaatgggaccagtgtttgccctggcctgctgagagctgtcctaggccgggggtgtggtgagatgcagggtaatcacaacgatgatggcagggaccatttccccagcaattactgtgtcagatgctgttctaggtgcattccccatcttaactgatttaacccctgaaacaacccgacgctggaagttgggttctcatccccactctacatatgtaaaaatgaagatgcagagagatgaagctactttcccagggctatatggcaagcaagtcgcaaagctgggatcccaatccagacagtctgaccgtggaacgagactcatacacgtaataaatgctctgcccccaacttgtccaccacatggccttggcaagtccaacccctttacctctctgagcctcactttcccatttagtgagacagggatggtaactgccccttgcagggtggttttgagcagtaaatgtagtgtgcctggcttgctgggcaggcctggtggccatgatgatcaggtgtgtgggagttctggggagactccaagaactaccaggaacagggatacgagtgccaggctgcatctcttgctcctctgcagagtcagcaggcttcttctcagagatgacagaagacgagttggtggtgctgcagcagatgttctttggcatcatcatctgtgcactggccacgctggctgctaagggcgacttggtgttcaccgccatcttcattggggctgtggcggccatgactggctactggttgtcagagcgcagtgaccgtgtgctggagggcttcatcaagggcagataatcgcggccaccacctgtaggacctcctcccacccacgctgcccccagagcttgggctgccctcctgctggacactcaggacagcttggtttatttttgagagtggggtaagcacccctacctgccttacagagcagcccaggtacccaggcccgggcagacaaggcccctggggtaaaaagtagccctgaaggtggatac

SEQ ID NO: 1560 - protein, 563 aa, Homo sapiens
MARRHWLGGKLRPLDCGAGGGCAFYAGCGSDAVRRRPTAPAGWGGRFFLLRGLRGSGSFSAGSWAVPLPFCEALNLIPSLHIRIRAPPSKPGGLERTIRDNFGGGNTAWEEENLSKYKDSETRLVEVLEGVCSKSDFECHRLLELSEELVESWWFHKQQEAPDLFQWLCSDSLKLCCPAGTFGPSCLRAAGQRRPSPPGRGGWPGGGLTPSPPSRTGWLPGGDTSHFPDGAAAGRRGSSLLRQGGRAETLLTSQTGSRPGRDAPHFLDGMAAGQRRSSLSRLGSLAERLLISQTMGRQAETLLTSQTGWWPGRGCNLGTLGGQGRRLGACPGGTERPCGGYGQCEGEGTRGGSGHCDCQAGYGGEACGQCGLGYFEAERNASHLVCSDIDECGTEGANCGADQFCVNTEGSYECRDCAKACLGCMGAGPGRCKKCSPGYQQVGSKCLDVDECETEVCPGENKQCENTEGGYRCICAEGYKQMEGICVKEQIPESAGFFSEMTEDELVVLQQMFFGIIICALATLAAKGDLVFTAIFIGAVAAMTGYWLSERSDRVLEGFIKGR

SEQ ID NO: 1561 - DNA, 8581 bp, Homo sapiens
  source (1)..(8581)
  CDS (201)..(324)
  CDS (3922)..(4008)
  CDS (8038)..(8381)
catatcatcttatgaagaaagtcaactcagtaaaaatatccttcaaacaatagctcagggatatgcgtacagaacaatctagtcagctgacagaatatctggcttttcatccagttataaaatgctgcactttgcttaacatggtgaagagtgaaagctgctaacagctggtttctttctccaaaaatgtgagccctgctatgggagagcgcaaccagcagggggcgccagcgcctttccctgaacttcagggcaagcttgagaccggggtacctggagggtgggcagtggcctcaaggtaccaaacgaatgggtgggcgcaaggtgtgctgattggactccattggctgcgctgggttcccgtagcgtatgtgagagatacctgtcaccacttcccggctaagacccagccagttccagcaaggacgttccctccaccggacccaccaggacccactccctgcagggcactctggtccctctcaagaggctttggaggaacttgggggttacagggtgttcccctgatgggagagtccctggcatgctgggtgtgagtgggactgagttgggtgggggaggctggggaagctggctgggagggcacttgtgctgggtgtgatgggggaatgtaggcgatgttagttcctcctaagagtagccaccaagaggactctggggagggagagatgggcacagtgttttaacccacaaatgggagggtaattctggcatggtggtttcagcaatgttagtaacacacggaccaccataaccatgatagtgaagctacatgtctgaaaaatgtaaatcaaatcaagtcacctgctaaaaacgtttcagtatacagaattttgctgaaaggtcaagtttccaagagactttcaaagatgttaagtgaggacatactgtacatcaaattcatatcctctcccggagttcacgtggaatttctttataaactgcttctagagagtctgtttaggcaggttgtgtgtagagatccgcgtcacccgtcctcaatcttggctttgagtgaaatcacctgcggagcttacaaacgatgaggcctgggtctcgttacatgaaattctgatttccttgcacgtgtgtgagtatgtgggttttttttttgtttgttttttgtttttaagcaccagaggtggttccaatgatgaaatttttagaggaatcaagctccaatgagtaagaacagaagttaatagtaatatatcttcaaatatgattttcaaatgcattgtccatcaacactacacaaacgtttattatgctgttttttcttaccgtttagcatttcctatttttttctttttcttttcttttttctttttgtgtgtgttgaggcagagtttcactcttgttgcccaggctggagtgcaatggcatgatctcggctcactgcaacctctgcctcccgtattcaagcgattctcctgtgtcagccttccaagtagctgggattacaggcatgggctaccacgcccggctaatttttttttttttttttgtatctttactagagacagtgtttctccatattggtcaggctggtcttgaactcccgacctcaggtgatctgcccacttccacctcccaaagtggtgggattacaggcgtgagagaccgcgcccagccaccacttagcattttcattttacgtttgtcgaagttatacatttagacacacattgattgctgctttgttttacacttgcatatacataaaatgggaaatagaaaagaataaaatgggcacagtatccctgaagtttcacattccgggacattttaaaaatatttgctttttagaaattggtttcaattaagaaactgtggtatacacacacaatgaagtattattcagcctaaaaacgattaaaatcctctccactgcagacaaaatggatgagattgcaggtgtgtattgtaagtgaaacaagccaggcacagaatgacaaatatttcatgtcctcacttatatgtaggaacaaacaagaaaatcttggccaggtgtggtggttcaggcctgtaatcccagcactttgggaggccgagtcacacggatcacttgaggccaggagttcaagacccacctggccaacatggtgaaaccccgtctctcctgaaaacacaaacaattaacccggcgtggtgacaggtgcctgtagtctcagctactcagagggctgaggcccaagaagtgcttgaactcggaaggtggaagttgcattgagcccggattgtgcctgtatactcccacctgggcaacagaaagagactccatcacacacctacacacaaaaggaatctcaagaaggcggaaagtataaaggtggttttcctttatacttgaaaaggcttttcactaggaagaaaacgggtgggatggggaaggaagagaagtggataattgggtcccaaaatacagaaagatggaataagtgagttctagtgtttgatagcacagtatgaaaattttagttcacaagaatttcttgcatatttccagatgctttggtaagaagcttcctaactttctcattatgctggtttgtaagctattctctttctgttcttgaaatcgtgctgctttctttcttttttttttttttttttgagatggagtttcactcgtgttgcccaggctggagtgtaatggtgcaatcttggctcaccgcaacctctgcctcctgggttcaagcgattctcctgcctgcacctcccgagcagctgggattacaggcatgccccagcacgcccagctaatgttgtatttctagtagagatgggggtttcaccctattggtcaggctggtcttgaactcctgacctcaggtgatccacccgcctcggcctcccaaagtgctgggattacaggcatgagcaaccgtgcccggcccatgctgtatccttatctgtcatctgtcgttgtttgcttgttttggagcccagaaataacttctcacctatatgctcaaatgacttttaacctgagtgctaagaaagttcattggtggaaaagcagccttttcaagaaatggtgttggagaaacttgatttccacatgcagaagaatgaaggtggaccctatgtcacaccaggtgcaaaaattaacacaaactggatcaaagacctaatcccaagcgctaaaagtatactatgcctaaaagaaaacattggtcacactttcatgacatcagattgggcaatgctttctgggatctgacaccaaaagcataggcaacaagagaaaattagattccttggattacatctaaatgacaggaacttttgtgcatcaaaaaacactgtgaattgattgaaaagataacccacggattaggaaaagtatttgcaaatcatctatctggaaagaggctgatatccatcctatgtaaagaacagctagagctaaacaacaagaaacccaaagcatcccattaaccatggtcagaagactcgagtagccgtgtccctaaagaagatatagcaatggccaataagcatttttaaatgatgttcaagatcactaatcatagggaagcacaaatcaaaccaagaatgtgataccacaagttaggaaggatatgataaacaaacaagcattggtgaaactagagggaagtaggaatgctcgaatatgactggagggaatgcaaaatcgtgaaggaacagggaaaagagtatggcgtgtactggaaaaagtagaaacagaattatcagatgatctcacagatgcacttgtgggtacctaccaaaaagaattagaagccaggagtggaagagatatctgtacagccatattcatagcagcattattcacgacagccaaaatgtggaagcaacccaagggttcgtggacagatgaatgaaaaagcacactgcagttccttcatacagtggaagactattcggccttcaaaaggcaggcacttctggccggtgcggtggctcacgcctggaatcccagcatcttggaagaccgaggtgggtggatcacctgaggtcaggaattcaagaccagcctggccatcttggtgaaaccctgtctctactgaaaatgcacaaaattagacgagtgtggtggcgtgtgcctatagtccctgctactcgggaggctgaggcacaagaatcgcttgaacccgggaggcggaggttgcagtgagcccagattgtgccactgcactccagcctgtgcgacagagtgagaatccatgtaagcacaaaacaaaacaaaatcaaacaaacaaacaaacaaaaaaacccccgaaaaaccagacaggcacttctgacacaggctgcaacacggatgaactttgaagacattatcgtcagtgaaataaataaatcccaaaaggataaacacagccaggctcagtggcttgcacctgtaaccccagcactttgggaggctgaggcaggcggatcacttaaggtcaggatttcgcgaccagcctggccaatatggggaaagctcatctctattaaaaatacaaaaattagctaggcgtggtggcacacgcctgtaatcccacctactcgggagactgagacacaagaatcacctgaacccacaatgtggaggttgcagtgagccgagaccaggccactgcactccagcctgggtgacagagaacgactctgtctccaaaacaacagcaacaaaaaaaattaaacacagtataattccacttatatcaagggtctagagtagttaaactcatagagttgctaaatagaatggtggcccccaggggtgggcgagagagaggaacggagagtttggttaatgggcgtaatttccattttgaaagataaaactgttctggagatgacggcagcgatggttgctaaacaatgtgaatgtacttaatgtgattaaactgtaaactgagaaatagtggaaattgtcaatgttgatactggccattctatatgaaataaaatatatttataatttttaatatttatacgtggtatattttcccatcataaaagctgaaaatgaaagcagttggatctttaaaaagaaaagaaggaagcgaataatccacacaaactttctcctgatgagaggaagaaccccaaagcttctatggacactcacttttctcttgttcttcatgcaatattgaggaaatccttagagtttggggaacatgggtgactttggctaatgaggagctctgtgccttgagccccccaggccatagaatagtaaatagtcagtctgtgcctccagccctgcagtgtgagattccagtactgtgggctccacacccatcacctgtatcaggaggcttctgtctcaccctgtcttcttgccagccttgaggatggagtctgagcctccaacgtgcaccccgcagggaggacagtggacctgttctccgtggtcatggcccagccgaggggaagggcggttcagtgagtgctgagggatggtcgggagccttgtttggtttcctcctcctcaggacaaacaggagagtgtggtgggcagatgggaggagaccaatgtgcaaactgttagctcagcagagtgtggagattctgttcttggttgtggtggggggtctctctcagaaatcttctttaaaattttgctttcctctcccactggttgtccttttcatagacatctcacccatgatagcagggaatgagtccctctaaactgttccctcagaacaacaaaaagatgatgaaggtgatgatgaggatagaggatcatgacagacaccatggcatcatgaacccttaactgagggcttcctaaaggacaggctctgagctctgtgctctatgcagcttgtttcatttcatctgcgtagtctcccagttatgagtgcacatttcatgatgattttacagacaagaaaaggagcaacgcattttcatagaacttgcaccagatcttgaagtcaaaaagggtgaagtccaacttgaaccaggcagtctaaggccagacacatggcatttggccagtcctctccctgcatccaacctgccctctcaaatccttgtcactcaggacgatgcccctgctcactgtgcccttccctttgggggttccttggagaccacagctagaccagtgggtgccacaatcactgtgtcaaagattccagaaagaattggcacaggatcattcgggacgcatctctcccttgcccctgttcctggctttccttacagctctcgacttcctcaaaggagtcatcaattcggagtttggcttccattcctattgaggaagctggaaaccagttcaaaaatgctcctctgatgtgcctgtggttaagacctctgagctctgcttaaaacattttgaagctgggcgcggtggctcacgcctgtaatcccagcactttgggaggctgaggcaggcgaatcacaaggtcaggtgttcaagacaagcctggccaacatggtgaaaccccgtctctactaaaaacagaaaaaaatgagctgggtgtagtggcgagcgcctgtattctcagctactgggcaggctgaggcaagagaatagcttgaacctgggatgcggaggttgcagtgagccgagatcactgcactgcactccagcctggactcagcactctcatctgagttgatttctagttgatccaatggaagcgagcgatgattaaacagatcgtgggtgcccgctgcgtgatctctatgtgatggatgcataaagtcaaggcaaagtgaattttagatacattcgttaatattttaagcttcaactccacacaattcaacagaaatatcccctgagccaaagttctggtttccctgcattccagacaggacattttattttgtccttatctcagtaagtactgagtattgtgaggaacaagtgagtctcttttgtttctgattccccagagccgatatcttgcttggcacataggagatagcaaaagtaacaatcgatgtgaattattgaattgacgcttccttggttcacaaaaattggctgtcatccgtgtgacttcgacttacttgattctttttgttgtttgttttttgagacggagttttgctcttgttgcccaggctggagtgcagtggtgtgatgtcggctcactgtagcctctgcctcccaggttcaagccattctcttgcctcagcctcctgagtagctgggactacaggcgcatgccaccataccgggtgacgttttggtatttttaatagaggcagggtttcaccatgttggccaggatggtcttgatctcctgaccacgtgatctgccctcttccgcctcccaaagtgctgggatcacaggcgtgagccacggcgtccggccaaactttctgatgagaactccaagtccacctaagctaaggacaggagttatagcttccatgaattttaaaacaagacccacagattggaggaagcaattactctcttgaaagagaaaagtcagaaaacgtaatgacgaaatcactaggacctaactggcatgtggaactattttctgctgaggaactatcaactttcatttcatttccagatggcatggtctcagctgttatacagtgtttacaaatgttctacatcaagggaatttgtatcaatcttttcgaatcaaataaaatatttgagttcttaatttcctttaattaggataaccattttcttaaagtgaagagaacggtttcattacatatttttcttcggaaaacataggctgtattttctagcaattacgaatttgttagatatgatgatctggttcttggaacattcttgaatctagtgtctctaaggcaggtgtgtacagcaagtgaatagcacagaaatcaatgaagaaagcatgagaagacaattgagtttgtcagaactgcaaaatattgctgagtggattgctctgaaatctgaaaacatgacttgtgaattgcttctatccaaaatgcagacacaatgctgggtgttggtttacttgtttccgatttttcaaccctcttttctaggcaaaaggtgtccaaactctacagacccacagaatgtaacggatgtctctcgattcctcctcctcaaactctcagaggatccagaactgcagccggtccttgctgggctgttcctgtccatgtgcctggtcacggtgctggggaacctgctcatcatcctggccgtcagccctgactcccacctccacacttccatgtacttcttcctctccaacctgtccttgcctgacatcggtttcccctcccccacggtccccaagatggttgtggacatccaatctcacagcagtcatctcctatgcaggctgcctgactcagatgtctctctttgccatttttggaggcatggaagagacacatgctcctgaatgtgatggcctatgtccggtttgtagccatctgtcaccctctatatcattcagccatcatgaacccgtgtttctgtggcttcttacttttgttgtcttttttttttctcggtcttttagacgcccagctgcacaacatgattgccttacaaatgacctgcttcaaggatgtggaaattcctaatttcttctgtgatcct

SEQ ID NO: 1562 - protein, 184 aa, Homo sapiens
MGERNQQGAPAPFPELQGKLETGVPGGWAVASRYQTNGWAQVEDYSAFKRQALLAGAVAHAWNPSILEDRDPQNVTDVSRFLLLKLSEDPELQPVLAGLFLSMCLVTVLGNLLIILAVSPDSHLHTSMYFFLSNLSLPDIGFPSPTVPKMVVDIQSHSSHLLCRLPDSDVSLCHFWRHGRDTCS

SEQ ID NO: 1563 - DNA, 1888 bp, Homo sapiens
  source (1)..(1888)
  CDS (201)..(1403)
  CDS (1524)..(1688)
tttctgcagtaaatgaaaaataagttatatgcagtgaaatcttttgctataatgttggtggtggttgttttttttaaatagcccatatgttctgctgaaaaatatcctatcttcttgttttccttaaattatattctgcaggcttacatttcaagtggccattaggggcccctatgctggcagcaatatatgcaatgagtatggttttaaaaatgctgcctgccctgggtatggcgtgtccacccaaatgccgctgcgagaagctgctcttctactgcgactctcagggcttccactcagtgccaaacgccacagacaagggctctctgggcctgtccctgaggcacaatcacatcacagagctcgaaagagatcaatttgccagcttcagtcaacttacttggctccacttagatcacaatcaaatttcaacagtaaaagaagatgcttttcaaggactatataaacttaaggaattaatcttaagttccaacaaaatattttacttgccaaacacaacttttacccaactgattaacctgcaaaatttggacctgtcttttaatcagctgtcatctctgcacccagagctcttctatggccttcggaagctgcagaccttgcatttacgttccaactccctgcggactatcccagtacgcctgttctgggactgtcgtagtctggagtttctggatttgagcacaaatcgtttgcgaagtttggctcgcaatggatttgcaggattaattaaactgagagagcttcacctagagcacaaccagctgacgaagattaattttgctcatttcctacggctaagcagtctgcacacgctcttcttacaatggaacaaaatcagcaacttgacatgtgggatggagtggacctggggcactttagaaaagctagacctgactggaaatgaaatcaaagccatcgacttgacagtgtttgaaacgatgcccaatcttaaaatactcctcatggataacaacaagttaaacagccttgattccaagatcttaaactccctgagatccctcacaaccgttggtctctctggcaatctgtgggaatgcagcgcccgaatatgtgctctggcctcctggctgggcagtttccaaggtcggtgggaacactccatcctatgccacagtcctgaccacacccaaggagaggatattctagatgcagtccatggatttcagctctgctggaatttgtcaaccactgtcactgtcatggctacaacttatagagatccaaccactgaatatacaaaaagaataagctcatcaagttaccatgtgggagacaaagaaatcccaactactgcaggcatagcagttactaccgaggaacactttcctgaaccagacaatgccatcttcactcagcgggtaattacgggaacaatggctttattgttttctttcttttttattatttttatagtgttcatctccaggaagtgctgccctcccactttaagaagaattaggcagtgctcaatggttcagaaccacaggcagctccgatcccaaacacgactccatatgtcaaacatgtcagaccaaggaccgtataatgaatatgaacccacccatgaaggacccttcatcatcattaatggttatggacagtgcaagtgtcagcagctgccatacaaagaatgtgaagtataatatctacccatcatcaaaaatcacatcagataagtaacctattttacatagtagaggctaaatacatatctaatttttaccaatggtgacattaagcctaattttccaaactaagtggagacttagtttttgaagtgttgaagtatttttaattttttaaatgaaaccatattttaagtgttaaatgaatcaatgctcac

SEQ ID NO: 1564 - protein, 455 aa, Homo sapiens
MVLKMLPALGMACPPKCRCEKLLFYCDSQGFHSVPNATDKGSLGLSLRHNHITELERDQFASFSQLTWLHLDHNQISTVKEDAFQGLYKLKELILSSNKIFYLPNTTFTQLINLQNLDLSFNQLSSLHPELFYGLRKLQTLHLRSNSLRTIPVRLFWDCRSLEFLDLSTNRLRSLARNGFAGLIKLRELHLEHNQLTKINFAHFLRLSSLHTLFLQWNKISNLTCGMEWTWGTLEKLDLTGNEIKAIDLTVFETMPNLKILLMDNNKLNSLDSKILNSLRSLTTVGLSGNLWECSARICALASWLGSFQGRWEHSILCHSPDHTQGEDILDAVHGFQLCWNLSTTVTVMATTYRDPTTEYTKRISSSSYHVGDKEIPTTAGIAVTTEEHFPEPDNAIFTQRNHRQLRSQTRLHMSNMSDQGPYNEYEPTHEGPFIIINGYGQCKCQQLPYKECEV

SEQ ID NO: 1565 - DNA, 1423 bp, Homo sapiens
  source (1)..(1423)
  CDS (201)..(407)
  CDS (951)..(1223)
aagaaaacaagaagaggaggaagaggagcaagagcacatgggggaggaggaggaatatcaccaacagagaatggcacatcctaaagcagggacatgaaagctgtctgcagtcatcataagaaaggaagtggtgataatttaagcagtttatgtagtttgaaagtttgagcctaaatataccttggctatttttaggtagcatggagaatgtgtctgcattgtcactgttgactgtggagagtcccacgtccatgtttgactattgtgatgactctttggagagggtcaagtctgctcttgacatcttttccatgatcatctacacagtgactttcttcctaggcttggctggcaatggccttgtcatttgggtagttggattccacatgtcctgcacagtcaacacggtgtgggtggtacctcaacctgcccgtggctgacttcatcatcatcttcccactgcttctccagctggttatggtagctctgtaaccctttggccagctgctctgtaaactcaatagcaccatgtctatttttaactttctggccagtgtcttccttctgaccctcatctccatggaccactgacttgtgatcctgtggccaatctagtcctggaacaattgcacaccagcaaaggcaactctggggcccttgaggacctggcttttggcaatttgtttctctgttccctacttgatcttcaaggaaactcgtggtggaaagtgtcaccctctttgtacaaccagtatgatctgcagaatgaaactcaaggaagtcaccaactttggaaagagattatcattccatggcaccaaacgctggtcacaacagcccactttttctttggcttctttctccctctggctatcatcactggctactacatccttgtagccttgaagttaagagaaaggcagctggttaagtttagctgacccttccaggtccttgcgactgtggtaaccaccttcttcctctgctggttgcccttgcaagtgtccctgtggctggacttcacatcatttcgggaagacagagagggcctgaaccaggtggccttactcctaagacccctggccttgtctatggcctttatcaacagctgtctcaatccagttctctatgtcttcattgggcatgatttctgggagcacttgctccactccctgctagctgccttagaacgggcacttagtgaggagccagatagtgcctgaatcccagctcccaggcagatgagtcctttataacatgacccaatttcctactccattttcccaccactcaatcctcttcccaaacagctctaccataatccaacatccaacagaatttaagagaataaaccacaacttttaagtgagctctatgtgctaggtcatgttttagaatacaaccttaagtgcctggaagatgg

SEQ ID NO: 1566 - protein, 159 aa, Homo sapiens
MENVSALSLLTVESPTSMFDYCDDSLERVKSALDIFSMIIYTVTFFLGLAGNGLVIWVVGFHMSCTVNTVLATVVTTFFLCWLPLQVSLWLDFTSFREDREGLNQVALLLRPLALSMAFINSCLNPVLYVFIGHDFWEHLLHSLLAALERALSEEPDSA

SEQ ID NO: 1567 - DNA, 3022 bp, Homo sapiens
  source (1)..(3022)
  CDS (201)..(410)
  CDS (512)..(639)
  CDS (707)..(943)
  CDS (979)..(1315)
  CDS (1412)..(1766)
  CDS (2010)..(2243)
  CDS (2344)..(2822)
ttggcttggtgttagttaggaaaataggctcctaattcctaccttgagccccctaaatataggtctcttcatttatcatcaccaatcatccccccacaaaagaggtaaccataccccctggtgggggtggcacctggtggtggtaaaacagaccctgggtcttctggcccagataagggctggtgaggtcacttttaaccatgctgccaccagggactcgggtcctggtgcaactgtcccctcagttccgtggtcgcgtggctgggctgtgtggtgactttgatggagatgccagtaatgatctgcggagccgccagggcgtcctggagcccacagctgaactggctgcccactcctggcgcctcagccccctctgccctgagccaggagacctgccacacccctgcacggtgagtgcaggcgggaaagcaggaagggaggttcccagaggcagggctggggagggtgtccgctggtccactgtgctggagacgccaccctgtgcctgcagatgaacacacaccgggctggttgggctcgggcccgctgtggggcgctgctgcagccgctcttcacattatgccacgcggaggtccccccgcagcagcactatgagtggtgcctgtatgacgcctgcgggtaaggagaggccaacctggagtggggtagaggtgggggtgccgggactgaatgcttcctcccacagctgcgactcggggggtgactgtgagtgcctctgctcggccattgccacctatgcagatgagtgtgcccggcatgggcaccacgtgcgctggcgtagccaggagctctgctgtgagtgtgccccgccctcagtccccaatgctaaatcctgccactgccacaggctcagcttcttgaaagagcttctcctgtcccacaagacggccgttcattcattcaagggcaagctgtgcatcgagtgcttactctgtgccagacacttttctagataagccatatatgcaagaacggctgccgagtagagctgacatggtacacgtcggcccggggggtcttgcccaaggtctacaccagacaccctgtgccctccatggtggtcaccttggccagccagcctggtgtggttgcatccttttgcccttgtgcctcagtgatccaaggctctctcctctccacccagccctgcagtgtgaagggggacaggtatatgaggcctgtggccccacgtgtccccccacctgccatgagcagcatcctgagcccgggtggcactgccaggtggtggcctgtgtggagggctgcttctgccccgaggggactctgctgcacggtgtgtagagtgacaaagggcagaggggaggggcactgagactgggaaggggccactgtgcccttttgctctgagccctgcactctgtgacctcaggaggagcctgcttggagccagcttcctgcccctgtgagtggggccgcaactccttcccgccggggtctgtgctgcaaaaggactgcgggaactggtgagtggggaggtcatcttgggggggacctattgaaggagcactgggccaagcccagcctgtggctgatcccaggacgctgtgtgctcagcacgtgccaggaaggtcaatggcattgtgggggtgacggtggccactgtgaggagcttgtgcctgcctgtgcagagggagaggccctgtgccaagagaatgggcactgtgtgccccatgggtggctttgtgacaaccaggacgactgtggcgatggctctgatgaggagggtgagtgtctttgcccatgcgtggaagcgacagggttggtcagtccttgcacatgtaactgaatttcctggggccaaggcagctgtcctggagtggcttctttagctgctgctcccattgccaggggctgcctgtggcctggagggatgaggggaagggagggtgttctggtccctctggggttcagggcttctctgggcccctacagcagcgtcctgagcctgcctgtttgccccatgctaggttgtgccgccccaggctgtggggaggggcagatgacttgcagctccggccactgcctgcccctggccctgctctgtgaccgccaggatgactgtggagatggcacggatgagccgagctatccgtgcccccagggcttgctggcctgtgccgatggacgctgcctgccgccggccctgctctgcgatgggcatcctgactgtctggatgccgccgacgaggagtcctgtctgggtgagttgtccctgccctggacgccagcccacccagcactccctcccgcaaggcccatctcctcaagagccccgacttcacctccccgctcctttgccaggttcctgctatgaagttggtcctgagggtgtgggagttggggcaccccaaacagtaagagtacagggcagtgccccagagccagttcttcttttctgtgcagggcaggtgacctgcgtccccggggaggtgtcctgtgttgatggcacctgcctgggggccatccagctgtgtgacggagtctgggactgcccagatggagccgatgaggggccgggacactgccccctaccttctctgcccacacctcctgccagcaccttgcctggcccctccccaggctccctggacactgcgtcaagtcccctggccagcgccagccctggtgagtctcctggagggaagaggtgggaaagctggtggccagaagcctgggggagaggggcatggaagcctcagagagaggcatttgtggcgctgctctgggatgggaaggagcagggcgcagtgggagacacccgaagacgctggaatgaatgaagtggagggcgtttgaaagagtctacactctttcctggcgttcaaggcctccctcccagctgcagggagtctcatggaaattcttggcccaggggagagctttgggaaaaccaaccgggcagcaaaatgcagagggattgttctcgggaaggggctgcaggtgggttagggccaggcccaggaaatggccaagggacttg

SEQ ID NO: 1568 - protein, 659 aa, Homo sapiens
MLPPGTRVLVQLSPQFRGRVAGLCGDFDGDASNDLRSRQGVLEPTAELAAHSWRLSPLCPEPGDLPHPCTMNTHRAGWARARCGALLQPLFTLCHAEVPPQQHYEWCLYDACGCDSGGDCECLCSAIATYADECARHGHHVRWRSQELCCECAPPSVPNAKSCHCHRLSFLKELLLSHKTAVHSFKGKLCIDHICKNGCRVELTWYTSARGVLPKVYTRHPVPSMVVTLASQPGVVASFCPCASVIQGSLLSTQPCSVKGDRYMRPVAPRVPPPAMSSILSPGGTARWWPVWRAASAPRGLCCTEEPAWSQLPAPVSGAATPSRRGLCCKRTAGTGEWGGHLGGDLLKEHWAKPSLWLIPGRCVLSTCQEGQWHCGGDGGHCEELVPACAEGEALCQENGHCVPHGWLCDNQDDCGDGSDEEGCAAPGCGEGQMTCSSGHCLPLALLCDRQDDCGDGTDEPSYPCPQGLLACADGRCLPPALLCDGHPDCLDAADEESCLGSCYEVGPEGVGVGAPQTVRVQGSAPEPVLLFCAGQVTCVPGEVSCVDGTCLGAIQLCDGVWDCPDGADEGPGHCPLPSLPTPPASTLPGPSPGSLDTASSPLASASPGESPGGKRWESWWPEAWGRGAWKPQREAFVALLWDGKEQGAVGDTRRRWNE

SEQ ID NO: 1569 - DNA, 9631 bp, Homo sapiens
  source (1)..(9631)
  CDS (201)..(230)
  CDS (4089)..(4448)
  CDS (9336)..(9431)
  modified_base (3602)..(3701): a, t, c, g, unknown or other
  modified_base (9233)..(9332): a, t, c, g, unknown or other
ggattacagaggcccgccaccacgcctggctaattcttgtgtttttagtagagacagggtctcatcatattggccaggctggtctcgaactcctgacctcaagtgatctgcctgcctcagcctcccaaagtgctgggattacaggcgtgagccactgcgcctggcagtacttctatttagaagagtgctcagacttcttcatgagtggtgttaagtacttccatcagaaggtacataaatgtctgcatgtcttttttgttttaaaattttatctatttattattattatttttgagacaaggccttgttctgtcacccaggctggaggtgcagtagcatgatcatagctcactgcagcttcaacctcctgggctcaattgatcttcccacctcagcttcctgagtagctgcgactgcaggcatgcaccaccacgcctggctaatttttgtttgtttgtttgtttattttgtagagatagagttttaccgtgttgcccaggctggtcctgaactcctgggctcaagccatctgccagccttcgtcttccaaagtgctgggattacaggtataagccaccacaacgggcctattttaatttttattttacttttttgagtcagggtcttgctgtgtcacccaggctggagtgcagtggcacaattacagctcactgcagcctcaacctcctgggctcaagtgatcctcctgcctcagcctgcctaatagctaggagcacaggtgtgtgccacaatgcctagctaatttttaaattttttttgtagagatgggatctcactatgttgcctaggctcgtcttgaactcctgggttcaagcagtcctcttgccttggcctctccgagtgttgagattgcgggcgcaagccacctcgtccaacctgtctctttttgtgtgatgttagtaactattgatgatttttacttagatccattaaatcattaagagctatacaatgatgatattctagttctattattctttcatttattagctggaatacttctataaagagaaacctccccttttctaatcttcgatttacccagtggtataatacatattggaaagtcaggatgaatattttgttctttccccttgtttaccaattttcagaatactgtattggttcactagcattctccaattaggcattggttttggtgggggtttttttggtatcataaactcttgggtttaaacatttttgaatatgtttcaattcattgcatttttttccttttctagtgattttactgatatatttcttctttctttctttttttttttgagacggagtcttgctctgttgcccaggctggagtgcagtggtgcaatctcagctaactgcaacctccgcctctagggttcaagtgattctcctgcctcagtctcctgagtagctgggattacagccatgcaccacctcgcccaactaattttgtatttttagtagagatggggtttctccatgttggtcaggctggtctcgaactcttgacctcaggtgatcctcccgcctcggcctcccaaagtactaggattacaggcaccatgcccagtggcatatatatttcttctaataaactcagcttgatgatgaggacgtgtcttagacatctttctgtccatggtgcctagtgcgtggctttcaataaatgtcaaatgaatgagttgatattctgagcagcatttaaaaataagagctagtggctgggcacggtggctcatgcctgtaatcccagcactttgggaggccaaggcgggcggatcacgaggtcaggagatgagaccattctggccaacatggtgaaaccctgtctctactaaaaatacaaaaattagccgggagtggtggtgggtgcctttagtcccagctactcgggaggctgaggcaggagaatggtatgaacccgggaggcggagcttgcagtgagctgagattgcgccactgcactccagcctgggcgacagagtgagactctgtctcaaaaaaaaaaaaaaaaagttttggaggcatgacagaggagcaaagtccagtattactttcctgtgtgagctgaagaaagtgcagtataacagtaaaaaataatatggttgcaggtgaaagaaaaacatgttttttaaaaagtgaatgtggccgggcgtggtggctcacgcctgtaatccccagcactttgggaggctgaggcaggtggatcatgaggtcaggagttcgagaccagcctggtcaagatggtgaaaccccatctctactaaaaaatacaaaaattagccgggcgcagtggcgggcgcctgtaatcccagctactcaggaggctgaggcaggagaatcgcttgaacccgggaggtggagtgtgcagtgagccgagatcacgccactgcactctagcctgggcgacagagtgagactccatctcaaaaaaaaaaaacaaaacaaaacagttaatattatttaattgccatttgttaacagacgtggcattgtttccactattgtttccagtggatcttttaattatatttattaaaatataaaaaaaggagtaattcagagtccttgtctttacttcacttgctgtaagataagtaacatttaaaagccacctttcctcccctcaggttcttttctcttttaatataaatggcaaagagcatacatgtttatgacagacatgttccccataagtttattcatttattctacaaacccccccaaaattttgcagggaagtaaaacaaaactaagtacccacaatatgtgaggcaccgctctgaacatttttgcatggattatacatatcatttattcttaccacaactctataaagttggtaggattattatcatcgtctcctttttatagattaagtaattgaagcacagacattaagtaacttactgagggcatacaactagtgaatattagtgctaggattcaaatcatgcattcttttaccggagcctctgctgttaaattactttcagtgactttacccgagaccttttttttttttttttgcaggatggggtggtattcataaaagaattttataatcatgtgaataataaaatttattgccccaaagtcttttttttttctttttttttgagtcagggtcttgctgtgtcacccaggctggagtgcagtggcgtgatctcagttcactggaagccccacctcccaggttcacgccgttcttcgcctcagcctcccgagtagctgggactacaggcacccgccaccatgcctggaaaattttgtttttgtatttttagtagagacggggtttcaccgtgttagccaggatggtctcaatctcctgacctcatgatccgcccgcctcagcctcccaaagtgctaggattacaggtgtgagccactgcgcccggcccaaagtctgtcattttatgatgacaaatatggctaagtttttttttaatggaactttattcctccaaaaaatgacttttaatttttcccaggccatcatttcatggttggtattaagacaaacaattatgaagtgttgaagaattaagttcctattattactgtatcatgtattactgtaaaaaaattannnnnnnnnnnnnnnnnnnnnnnnnnnnnnnnnnnnnnnnnnnnnnnnnnnnnnnnnnnnnnnnnnnnnnnnnnnnnnnnnnnnnnnnnnnnnnnnnnnnggggtgggggggggttggggggtgggtgtgtgtggtgttttgtgcgttcgtttgttttgtgtgggttgtggtgtgtgtttggggggtgtggttttgggtgtgggtgttgggtggttgtttgtgttgggtgggggtgggggtggtgtgttggtggtgttgtgttggtgtgtctgttgtggtggtggtatggttggtggtgagttgtgtttctgtgtgtgcgtgtgtgtatggggtgttttctgtgggtgtggggtgggaggtgttgcggtatgtggcgtgtagcggatttggttgtttggtgcggctgagatttttgtggatgacaggtgcgttttgtctggcggtcaggttgtggagggtttttggtctggtgctccgatgatctagcgggggcccggggcttttgctgagttggcggggttgccatggccgctgtcgccatgctgggtgggtaccccgctcctggggctgctgctgctgctgctgctgggggaacccggccggggggcggcctcgagcgggaacgcgacacggcctgggcctcggagcgcgggcgggagcgcgaggaggagcgacggtgactggccctccgccgccgctgagccactgcggccggctgccccctgcgagccgctgcgctacaacgtgtgcctgggctcggtgctgccctacgggccacctccacactgctggccggagactcggactcccaggaggaagcgcacggcaagctcgtgctctggtcgggtaagtgcggagccgggtgctgtggcgccggaggtgccgcggtaagatgagggcacccttggaaagatacagctcaggcctgagttttggagagtgcggggacagcagcgcgagagagttggagggacagatcccgaaactttgggggcaggttacgtgcaggatggaccctcggtcatgggaaaaggagggcaaggaagttgacgaagcgggtcacaaagggcctgagctggtgggtgagcaaaggatggcggggatgaggggcccgtgaggagtggctctaagccacgggaaaagacattttgtaagaagaggagatgctccacctattctggaagcagggtgccgggggattcaaggaggtgttgaagaccctggggaaattggagttggagaggaaaaggggagggatgacggaggaagaggtttagacatttggagggaagggtagggggacatgatcgagtgaagttttgaaggaaaagaaacctccctagtgatgaattattaaaaggtaaccagaaagttctggaaatcttgatttgggagacaggaatgaagcctagagaactgtgatcttgtctggctttcacgggagatttcattcagtttgtgcatctgaaaaaccggccctctgacgcatgcaggaggttatgaaggaataagacctttctaacagttatttgtgttttctttggaaatttggttaccgaggctggtcagggctgtggaaggacgcttaagtctggagtgttgagagcctgtggacacttccatggtggtttgaagtcccaaagccccctcactggagtggcagagtctgaaaaactgcacactgaacccaaatgtccttccttagcagtgtggagtatactctcccccacctgtcacttttctagatgaggcttggagggtgctgaggaagggagctggccttatcagccctcgcttctagccagtatgattctaaaactgtcctgggaaaaagaaaagaaaaccaggagccaggagcagaactgggagcctccctcttttgacagggctggggtaccccatctcttagctctgcccagggggctggtgaggaccctaatgtagggagtgtatgtaggccgcctgtcattgacaagttctcggcctttgtcagatgttggacaaggccataaggttcctggcttggtgcagatgctggaggaggaacttggaggatggtatccatggtacccatgaggaagagctgcatcctttttggggatcaggttctaaagtcagcacagcacattagacagaaatcatgtgtaaacaacagtggctttgaaaactctgcagattaccatagtgtaaggtggatgtggttttgcatatacacttcttttacgatgtttgcatacatgtgttacatgtatactcatatataagaatgggtatacatagaagataaaataattgtaattttaaagttacattcatgcaaaagactgaaataataataataataataaaaagaacaccaaagtgagattaagcaagattgctttgagcaccacccaaaatgagacttgagtttaggagccagctgtgtggaaagtccaaatctctcagcactagaatctcacccagttctgagttgctcatgctgtcagaggataatctttctgtccctctctttattgattgtgcaaggacccatggtttaattttcccaagttaaatgcatgtttgatgttgcctctgtgtagttaccatcagatcaaggaggaagggtatgaacctctttccagcccatactcttgagagcagctgctgagcagacagaagtagtttaagctggaacatgtatcaattagtaccatctgcaggttgtgcaggttgaaatctcactatctgtgccttttggcagggcagggtcctacagagatgccagcactgagcccagcaccgttagttccattagttcactatgagttcttctctgccaccaaccaccatccctcagctcattcctgtttccatatgtgttctggttgcactctttctgcttgggacttgcaagtagggcagaagcaggtgttggcttgagctgggtaatgagtaggtagagtgaacccaagcctcgtgtgagaatcacagccaggtcagctggtagcctctggcaagtgatttatcatgtcccgagttaatgatcttgattttgcattagacagggtcagtgttacctggctcttaggggtgtttttgtgggtgaaggatgaaggtgatctaggttgtcttcatcggtaaactcttgaatgtaggaactgggtcttcactttttttcaaagcctgtgagtactgagtacacagccatgcttctattcatgcattcagttatgtattgaatgtttgctgtatgtcacatgctgcgcatgtaaggatgaagaatacagatatgatcctctgtcatcaagaagacaggctggacatggtgctcacacctgtgatctcagcactttgggaggccgaggcgggaagattgctcaataccaggagtttaagaccagcctgagaccttgcctctaaaaaaaaaaaaggaagacagataattcaacaggctttggaaatacctgtgaaaggtactgtggcattttagggtactgaaaaagcataaaggacccaaggaacatcccagaagaactggcatttaacccataacttgacacataagcaggaattgcctggccgagggagagttgaggtttgaagggataggaagaggaaatagcatgtacaaaggtgtagaggtaggagggcttggtgctttgaaagaaagtataagagttgcagtagaactggatcaaagcgtgtgaggggtggaattgtgagagataagacctaaagaattagaaaataaagggatttatacctcatattaagtttggatgttatccaggggatgataaggagccattgaaagattttaagcaagggagagatgtaattgtctttgcattttagctggatctctttgggtatggtgtgaagaagccataggagcagggaaagcctggagcctggcttcttgaccaggggatgttgaagtagcccaagtaagagacgatggcggttgggactgggtagcaggacagagggagtgggcagatcccactaactttcagaggtagtgctcatagggcactgatgagttagatgtggagcctcagtgagcaggaggcctcgggtttcaggcttggatggaaggtggtgccattccctttcactaagatagagaatgctagaggaagaagaagtttaggcaggaggtgtggctttgattttggccgtgtgaattagagatgctcattggacatctatgtggagattctcagcagatctggaaataggaattgctggagagaggtggccactgtgtgcttccttggccctgactactgaggctttggaaggatgccattgactgaggaagtttatagctcaggttggtccaatttctaggtctgtatagactcaggtctttcctctgtctttcatctctctggcctcaggcttcttcagtcacttagcatctctcccctttacagctggaaatgcctcctcccgggcattccaagctgaccagacaaacataatgtccaggccgtggtccaccttaggccaaacctggtttagtaagtggggcaaaaaagcagagaggcctgcagctggcagtggcgataggtccctgagagccagcacgtagcctccttaaccactgctgtgctctcgtgtggtacataagtgtgtggccctgtcaccttgcccacttgcaggtaagtaggagagagacaaaggctgggaggaatttcttgtttgcctctcacacattgaattgagggctgagaggaggaatgtttttggtgatggtgggttattttcagggacggatcaggaagaatttccttagagctatttccaaacttggctggtaatcagagtcagttaaaaagatatatatggccgggcgcggtggctcacgcctgcaatcccagcactttgggaggccgaggtgggcggatcacgaggtcaggagatcgagaccatcccggcaaacagggtgaaaccccgtctctactaaaaatacaaaaaaattagttgggcatggtggcgggtgcctgtagtcccagctgcttgggaggctgaggcaggagaatggcgggaacccgggaggcagagcttgcagtaagccgagatcacgccactgcactccagcctgggcgacagaccgagactccatctcaaaaaaaaaaaaaaaaaaaaaaaaaaaatttttaaaaaaaaaaaatttttttttttttttttttttttttttttttttgtgagtctctctctctctctcccctcgggcgtgtgcgcgggggctgaatcaataaaaacgctatttctaaaccaccctgggcaaaaaaataagaccccaggtttaaaaaaaaaattttgcggggcgtgtgtgacaaaaactgaggtgcaagaaataaagaaggcgaagggaaaaaaagatattaaacaaaaaagttgaggatgtacagcgccagaatataacagatgccgagaagatatgaaaaaaaggaagaacgttttgaagaaagagaaagagaaaagagaagatggggtgtgtaatcgaaccaagtataatagagggaagagtggacgacagaaaaacggaagggcataagggtttaaaaaagaaagacgattgattaaagattgaaaaaatggggattgagaacttagccaggactaaaggagatggtnnnnnnnnnnnnnnnnnnnnnnnnnnnnnnnnnnnnnnnnnnnnnnnnnnnnnnnnnnnnnnnnnnnnnnnnnnnnnnnnnnnnnnnnnnnnnnnnnnnncaggtaaaacaagtaggccgagctgctaacgcttgcaatgacactgcaggcctcgactctgagaaggatcccctagaggagaaggagaaggaagagtaaagaggatgttgttttacaactgtagataccagttcagccacagtaggaaagagcaccaggcaggatcataaggtcccattccaggccctagctcccggacatttctagacatatcttaggccagaagggaaacagtcctggcaggattcatcacctgctgactaaacagcccttgctcctacaataatcagcagcggcaa

SEQ ID NO: 1570 - protein, 161 aa, Homo sapiens
MSGVKYFHQKRGPGAFAELAGLPWPLSPCWVGTPLLGLLLLLLLGEPGRGAASSGNATRPGPRSAGGSARRSDGDWPSAAAEPLRPAAPCEPLRYNVCLGSVLPYGPPPHCWPETRTPRRKRTASSCSGRVKQVGRAANACNDTAGLDSEKDPLEEKEKEE

SEQ ID NO: 1571 - DNA, 15788 bp, Homo sapiens
  source (1)..(15788)
  CDS (201)..(282)
  CDS (2020)..(2105)
  CDS (2144)..(2262)
  CDS (2317)..(2452)
  CDS (2952)..(2993)
  CDS (3623)..(3740)
  CDS (4432)..(4709)
  CDS (5854)..(5920)
  CDS (15317)..(15588)
tgtaaggatggagacaaggccttggttgctaggtagatgaatggatagacggatgggccagtggatgggcagataaaagagtaggtggataactgaatggattggttattgggtaggtagatggatgggtagatggatgggtacgtggatggatagataaaacagtaggtggataattgaatgaattggttgttgggtagatggatggatggatggaaggaaggaaggatgaatggatgaatggctggatggatggatggatggacggatggataaaagtaggtgggtaaatgaatgaactggttggtaggtaagtggatagatggatagatgaataaagtgggtggataattgaattgattagtgggttgatggatgttggaagattaatattgaattcaagaaaatgtggcagaaatgagaatatattttgattccaacagtttctactctcagggaagtccggaagaatcagaaaaggtcaaatactttgtattacttgtatgagaaaattaggattcacttatatgttaaggtgacttgtgtcccatgatccaggggaatatgccagagacccaggagctggaaattaggtgagccctaggagaaagctgggggtatcaggtcatggcagccccgctgaaggctttccatccccagccctccctgggacccccaggccataccactatgtggtaagagagcagtagacagtggctgaggtggggtgtgagctctccctgcccctagggctacccgaaagcttgtggggagcatccagaggctacaggttgacagtctcaggatatctgtctgtatcctgtgtccctcctctcccagccaggattcagaacttgggagggttagaagggcccagcccaagcttaagaagcaatggattttcttgacagagtgtcagaggtgtgtgtgtgtgtgtgtgtgtgtgtgagtgggtgtgtgcacacgagccagcagacacccctgggctaacatgtgtctccctctggcccacgagcactttgtcaggaaacagccccactgtgtcaggccgacacacactcccttgcctgcctgcctgcctatgctcggaggcaggtgaagagaaacgcagatgtgcccgggccccagatccatgctcacacatgcacacgctctgtgaggcaaacacacttgcacaagtgcttaaaggatagacccacagacccacactgcagctcccaggggacaacacagtcatagtcacagccaatacagatgaacagacactcgcaggcccatggggacccacacccagcagggagcagctggggagccacacaggccagttccagggccaggtgctgggtggggaggctctggtgctgagggaaaactcagaatgaagataaatgaggcccttcctggggcctcagagccagccccacagcccatccatcttccctgtctagggtgcctacgaaggctctggagttcctgggcacaggggtgggatgctggcagattaatcactcattcggcaactgagttcttaatccctccatctggccttgtccgccccaccatggcagtgctgtcctcagtcagaaggacctcaggccgacctagagccagtgacagtgcaagggactcagagagccccgcagtcaacaagtagggaccccgtggcagtgaggggaagggggctcccatagggtccctatactggggagagggttgggggctttctcagcctcagagggcatgccccgtgctctcggtcacgacccacagaggctgccacctttcctcctcagtcctgggctggagacacaggccctggaaaatggggctgtctccccatcctggcgagggaggagcacaggccttgggatgctggcaggtgctagggggacaggtaggataggtgtgtgcgtgggacatcggtttccaggggtctgcggggaagggggctgcctctcggctcatctcaaacacgtgctccttccttttccctctttcccatgcccgccctccctccagatcaatttcgtatttctgttcaacatcgtcaggatcctaatgacaaagttacgcgcgtccaccacatccgagacaatccagtacaggtatgtgagggggtcccttgaccccacaatggggacaggaggaggtcatcgggccgtccccctgcttcctggcagagccctctgccccaggcctcacccagggagctcgctcaagctcccggaagaaacaccaccactgtctcccgccgcccactgggtgaggccctgcctgccgcatgggctcagacctgtgtccacctctcgcccccaggaaggcagtgaaggccaccctggtgctcctgcccctcctgggcatcacctacatgctcttcttcgtcaatcccggggaggacgacctgtcacagatcatgttcatctatttcaactccttcctgcagtcgttccaggtggggcctgtgaccagatgggggccccacagtgagctttcctgaggctgctctggcagccatgccctcactaagggggtcccgtgggactggcacacccatggctcagttacatccacagagttagaagcccgtacatgctcagcctgagcctggccagttatccccatcccagcctgggtcttcatcctaccagcccgcacctactgtcccagcacctgttctgaggatgcaggcagcccaaccaaatgccctgggacaggtcacacaatattgaggagaccggagtctgcctggctccaggcctgtgaccactgctcactcagagtggaccgtggaatatctgcaccctgaggctaggaccccacccagctctgactccaggggttcctgggtcaaattgtcccccccccaccatcttgtccccagtgccaccccaccaggcagaacagctccgcaggtaggtcactgaccactccctcctttccctcctttccagggtttcttcgtgtctgtcttctactgcttcttcaatggagaggtatgaagctgggccctcggggtggcctgggatatccaggtcctcagaccccactccagggcagctccattggtgctgcccggccttgctggagtgccagggagaggaagccttgagataccacccggccttaggggaacaggaatccttctcacaggggctggagccagtttagaaggtcaactatgcagccccgaaataacatgccagcaccccacatgtgcactcagagctgggtgagcaaggaagcccaggccgcagggcctcatggaagagagaagccagagcagaggtggtgacagaaggaagcttccagaaagagatgtgtgccaagcaatcaggtctgtatggactcagggagcagaagagagaccagcacattcccccgctacctgccacagaaaagcccacacaccaagagcaggctctggggagtcaggcggccgtgaagcttggcatgtgcaagccaatcatgaggcccaaagccccagtgcagctgacgcagggaagaagcgcactcgtacctgggctggggtggatgaggacatggagcaaagagcagacacagcccctagggcctgggagcttccgaacactccagaggaatacacttgcctgtctctgcacagggcactggcgaggtgtctatgcaggcctgtgtctctgtggatgatagcacattccacttgcaaagtccatcagcagagacgggtcctgtgggctggatgagaagaagagagggggccagtaaggcaaacaaacaagggatgtttatggagcatttattctgttcgaaccatgtgcaagctaggatgtgagagacaccatccaatttccaaaaaaattcaattaccaaacaaatgaagcttaaatggcaccgggtagagccaactttagaaatgaccaagacagagagctttccctttcaggcagtaaatgccatggttagtcaggcaggggagtctagcaggaggtagagaaggtggaggggtgcagaggggacggtcttcaggagggaggaggaggcgcaccaggtgtgtgagctgggcgcacaccaccaacgccctgcaaggagcaggggcccaagaaggctgagggggccaagtctccaagctgcgctctctggtcccaagatgctaattttgaggtggcagagtgagtcagggaagggaaggcagtgtgtccagaggaaactggatgatctgggaggacagtgtggagtaaaggaggtgtggagtcaagcttctccaggaaaaggataaggaagaggcccctggagagaggcaacagcatcagggaaggacctgttttggaagcagacagttccttgtcatgagggtggcagtcgacccatgagagcagaaagcagaggaggggatggtcccagaagcccagggttggtccctgggagccagctgagcctctgccttccccacaggtgcgctcagccgtgaggaagaggtggcaccgctggcaggaccatcactcccttcgagtccccatggcccgggccatgtccatccctacatcacccacacggatcagcttccacagcatcaagcagacggccgctgtgtgacccctcggtcgcccacctgcacagctcccctgtcctcctccaccttcttcctctgggttctctgtgctgggcaggctctcgtggggcaggagatgggaggggagagaccagctctccagcctggcaggaaagagggggtgcggcagccaagggggactgcaagggacagggatgagtgggggccaccaggctcagcgcaagaggaagcagagggaattcacaggaccccctgagaagagccagtcagatgtctgcaggcatttgcccatcccagcctctctggccagggccttactgggcccagagcagagaaggacctgtccaacacacacagctatttatagtagcagacacagggctcccctgccctactcatggagccagcagccaggcaatggtgtggccctgcactggcccttggcctccacactcagtggtgcccctgcagttgggtggggtacgccagcaaaggatcagtttggctgccttatcccaggggctgtcacctagagaggctcacttgtaccccacccttgttcctgtgtcccctccccagccatcctcccgccttgggggctccatgaaggatgcaggcttccaggcctggcttcctctcttgggagaccccttctctgcctagtccacagattaggcaatcaaggaagacgccatcagggaagccacatccttagtcaaccagttgcatcgtgcggggcaaaatgaggagcagaggcatggaggagggaggcgtgggatgggaatagcagaaaccaaccatgtcttcagtgattgaaactcataccccattgccctttgccctccagtctccccttcagaaacatctctgctctctgtgaaataaaccatgcctcttggaagtggcctcccctcaggtcaagtcacccaggcacccgaagagtggtgtgggccaaggatcgtggctgggtctgagggggccacatccatcttccttagtgggctcgggccctggcctcgggccagttctctctctctctgacctctggtaggtttggagtctttatggtcaaagcacctgcaggcgggtctgtcccttatcactccaaccaggctaatacctggccccagcccccaaccaagggcagcttgattcagcctggaggaggtgtgcagctcatccagcaagccagggcctgtcccaaaggccaaggctctggaatctggtgggcagggtagacatggcccctcagttgaccaccagggcagcttccaggcttggcttccgtccctgtgtccctgcagcggagccgcaggagtcagggagagagaagcatcaggccatttcttccaaaagaaaccaatgctctaggtaccccctacaaaaataagttttgaaaaatcatgtatcccgtcttgcacatttttaagttgacatgtagtattttttacttaagttttaaatccttcaaaggtgtgatttctgccattttgtaaatatttacatttttaaataaaactgctgcaacaatttaaaatacatcaaatgaattctgatcaccatggtgatttaacacccaccctcatctattttaaaaacacctgacccagctctccttcttcttcttttttttttttttttttttgagacagggtctcactctgtcatccaggctagggtgcagtggcaagatctcagttcactgcaacctccacttcccaggctcaggtgatcttcccaacccagcctcccgaatagctgggactacaggcacgcaccaccatgctgggctaatttttgtatttttttgtagagacagggtctggtcatgttgctcaggctggccagctccgctttaattgtgggaaatgttacattgtttctttcctctttaatgtgtagcttcattccattgccctatagaattttatactaatgcattacttttatggctgaaagtgttttattgctcactttgtcatacttctctgccacacaatatatgtatgaatgaaaattaaaatatttcattttctatgaccaaagtttcaagggattttaaaataatcttctgggttgaattattacaattattttttgatacaaaatacagtaagccactgattaaaacaacatagatacctaaagtttttataagtaactagttaaacctaaaaaggaaaatgtattgaaaacacagcttaatgaaatggataggaagttaatggctcatgaatctacaggtgaatatttattgctagaataaatcaggactcagcatcaattcttttcttttttaatgttttattgtttatagtggggtgtgctgagaagccttttcaattcagtagatgatctggcactccagatagtcaattctctatactcttgctgagatgtacagtcaaaactgcatagtgatctgtcaccaaaaatgacctatcagctggctgtttaattaagtgtcctttcaatttggctgaaaaagatgaactgaacgttatctgacttgcagtaggctttgggcgcccatgtcatcagctcattccatttttcaccaccagctgtgtgggaatgcactgcaggttaagtgtgagccctgcttctcttgtcaagagggcagggaggttggggcaccctgattttattttctcaagtgacagaactcagaactcagggtatcttagaaagtcttactgcatacccagtggcagcatgatggccgcatccattagcatcatcagggctcttgtagaacaaggagccgcaaatggtttggcccccaagaggccacttggagatttctgtggccagatgaggctgtgaacaagtgcttatcggagcagacgctgcagagcctggcaccaagtcccaggcattcatcactgcttcttaatgcagcccccggctcattacgccaactgtcctttgctccctggagggaccaagggcctgtgatccctgctgggaggccaggcctgccaaggccaacaccaggaagagcatcaaagttgctaacctttgttcagcaggcacttcgatatgctctctctccagttcagaggaggctcctccttgatccaaccccagccctgaatccctcattactccgtctcctggttgtggctcccactgagctctatccttaaaatgccaccagagccattaggccatctctctgggtccctacttgttaagctcgttaggcacctgttccttaagccaagccagtcctcattagcatctgcttcggcgctggcagcacctcgtggagctggccttcctggaaagtggcctcattagcagactctccttctccgtagcaggcaagttccagcacccagatcctggaggcccttagggtccctgtttaaccctttcacccaccctgatttacacaactggggaagacctgaaccagccacaggtcctcacaccagcctcttggccccactccaagagagagtaacaggcagagccctgaccccagcacagctccaagtccctgggtcatcatcaaagtgcggctagaaagtacctgctggggtacaagctggtaaatgacacacggcggcaggagtggcgagtggtggaacatctgtggggcaggaggtgaatggcagggacggcatttctctcccagtcccctgctgggagtgcccatggtggaggtgctacctgagggcctgaagcctcaagacctgtgagggatggcactcgcagaaagtcccttcagcatatagacttccctagagatggaggccgacattcccgcggccacagagagggaggcccagatggaaatgacacaagggcagggacacagaaagacttgtaggaacacacgcacagacccagagagggaggcgcacgcaccttcctccatcatttcccattcacagaacaccagggtgtgccagatatggaagtaacagaaagacaagtttcctgtttcaagaaactcataatctggttgagaacagcacaaggaaaaggcaggcaaaagacacatcggctcctgcagcctgcgcctgcccccagccccctgccctgtccatctcctagtccatgcccacagtggccccaagccagctggcttctaggcacaaggacctcagctgccctccccacttctttccccttcacccccatgcaggcccggatctccagatgccccaaaaacagaatagggaaagaggcccaactgtgccgcttgtgctttccccagcatcttcagaagccctgggcaggtgggggacgtgtgctgatgcagctggacgggaagggagctgtcctatgagggacaggtgaagggactagaaaatggcacgctcaggagaacaaagtatcccctgcacacgtcatgggtcatggaggcaggcctagggctgggaggcccaatgggagttcttccctagagtgacatttcagccagggtcggggagggtttggtggtaaacagctgtgcctcaggtggaacaagtggctggggtggccgagagcataggaggggcttgaagcagggggaccccttcagccagggagcccggccccctgttctgagagcacacctggaagcaaccgggtggcatgttgcacagcaggcttcagaagtcatacttggtggggtctaggaatccacacgcttcacaggcccccgggtgattctgacagctggggtgtgggccagcaaaaaaagacacatcccttgtctcttctttccaacacacacacgtgctgtagaaagcaacagcgacgccaggagtggtggctcatgcctgtaatcccagcactttgggaggccatggtgggcagatcacctgaggtcaggagttcgagaccagcctggtcaacatggtgaaaccaccccatatctactaaaaatacaaaaattagccaggtatggtggcacgtgtctataatctcaggtatttgggaggctaaggcaagagaatcgcttgaacccgggaagcagaggttgcagtgagctgagatcacaccactgcactccagcctaggtgacagggtgaggttcagtctcaaaaaaaaaaaaagaaagaaaacatgtgaatctactcatcaatatgcccaggatggcttccaggctctgcctcgaaggtgccgttaattttcctgagggggctgtgccacttagacatgttaattagcaggaggaatgggcagagggcatcactgccctgtgttgactgagtttctgccagattttcctcttaggtatttgtttgtttaggcctcggggccctcccatacagcgctgcagcaggcctccctcgtcacagaaccatcacccggcaaaacctatgcattagtcagaaatgtcccctctaggggctccttcagcagtctccacagactccactgctgggctggtcattccagggggcatgtgctgtttcttaggcccacagcaagagttctgcactcaggagaaaccctagaaacattcattaaataaaccagcctttcctatttgtcccacccagagctggttaacccacaagaatgaccaaaggcacaaagaagtcccagagatctattggctttgcacagcgggagaaatctgtctgtggctccataccctacccttaccagagcccagaggccagtcccagacagagggcatcacctcttctctacttcacatgagtgacagcagatgggagccggagggcctctatcacaccctgcagactctcctgcagctgtctccagattaacctcaccccaaggggccccaggcctcaatggctctcgacttcccactggcattggacgcaggctgctcttcagcagttctctaagctgggatgagacatggtttgcccccgttagtccaggatgattcctgtgacctcatgtaattaatagcatacctttcactctcacgaatcctggtctgaacaatgaattatatgatcaccctacttaaaccccatatttgtctgcatacacagcaggggccacagacgctacttggataaatgaatgatgaaagccagatccataggaaattctgaacgttagctaccgcactttggaaggagaacctgagtagaaaggattttctgaggtgatgtcctgagttccatctcagtgtctgcttggtggacaagtgattgagcaggggcaagtagtttatgattccggttccagaaaaaaactgtcctcagcttctgctgtgaatatgatgaagtaattaattgtgcttcttaattagctctgtagagtgccaagtaaggccccctctagctctctaaggcccaaccatgataaacaatccagcatcacgaatccccacagaggcccttccacccaggaaggtggagaaattctaagactcgtcatttcttccttcaaccccagttccagtctggtgttctctggggaaggccagtggggggcccatgagcgatcatgcagccacctgttttccctgtgcttcctgctcggcccaaatgctgtacctgcaattacaagggaatccgtactccctctggccattcagggactttccacgtgtgctctatggaggcccccaattcctaagcaaattaacacctcagcctggtgtctccagatccatctcatccttcagcttgaaagattctgggccacccccctcccccttcattgcagacttgaatgtgaagatctttgcatctgaagaaatgaggtgccaatgctggtggggttccccataaaggagctcaatctggaaagaggcccccatgacctgcaatcagacctggacttcatttgggcagctgaccccttggagatgggatagatccattcccctagaaaaacacagttgggtataaatagagcaatgacacctccacagaaatccttgaaggaactacagacccaagtttataaacccctaacatcaagataaaactaaaacactctaatttagctagcaagaattccctaagttggtggtgcttaggcctggctgtgttttagatgccccaccccaggccctgaaacacatcttgggaggcacggacccacatgtgaacaggctgcaggagtgctcacgaggccctgcgctcgccgtgtgtcccacaggacccacctcaccactgcacggggcgacgtcacctttctaggcccagggccaagcctcctccatggccaccctcactgtatgtgaggttaggcctcaccgtcaggtcgtaaagggctcgaaggcagggccacatctggtccaaccccgaaatgccaataccagttacccagtgatactgttcctttcagggtgccttgaccagcccaggaactcttgtccctaaaagaccttgaagtcttatagtttctctgcatggaacctcttctcagagtccaccagtgttataaagatttttaaatttacttttattttagtgataatctttaaaaatgcttaccagttacctctttttttggtgtcaaatggaagatggtcttagggtaaatatacaacattagctaaagtttctcaacatgaggactccgagtgtactacagaggcttttgatgtcttgtttccttcaaaaagggcaccactctattaagtttggaaacctgccttcgtgcccaaccattcagtggctgcaggccttttgcagagtacagacgtggggcttgagccaaggggtgagttgtgtgtgagtagccatttctaactaagccaatttttataccaaaatacagaatgtagagctgccctgcagggaaagattcatttgttcattaagtcattcatatatttactgaggacttactaagtgctaggcacttccctaggcaatgaggatacagccaagaacaaaacagacccaaatccttgtcctcatggaacttacattctaatgtggagaccaaaaattaaacaaaataaaaaagtaaaatacgtttaaagtgtttagtactcaagaggaaaaagaaaacaaggaaggcgatatgaaagggatgtgtctgaatgtgggggttgtggcgcacattgaaacttcagatgaagcagctgaggaaggcctcactgaggcaactgctgaatgacatcccgagatgagggagtggttgtgggaaccctatctttggaggaagcactgcaggcagacagaatataactgagtaccaaggtcctgtcctgggcatgctgggccactggaaaagggccagcatgggggtggttggcacgggggtggcgtagatctacgctattcttgcaggacaagaaaagctggaccagcgaggtggctcatacctgtaatcacagcactttgagaggccgaggtggtggatcacctgaggtcaggagttcaagaccagcctggccaacatggtgaaaccccgtctctactaaaaacacaaaaattagccaggcacagtggcaggcacctgtaatcccagctactcgggaggttgaggcaggagaatcgcttgaacctgggagacggaggttgcagtgagctgagatggcgccattgcactccagcctgggcgatagagcaagactccatctgaaagaaagaaaaagaaagaaagagaaggaaaggaaaggggaaaggaaaaaggaaaggaaaggtaaggaaggccactgagttttgaggaccaatgcagtctggtgccaggtggaaaactgctgatgaaggggcaagggcacgaacagggagttcaggcaagtcttttgcagtaaaccagatgggtgatgatggcagcttgccccaagctggtggccacgaaggtggtgacaagtaggcccaattctgatatagagtgcaggtggagttgacaggctggacaaaaaaatggaaaatctgggctcaagttttttttaaaaaacaaaagactttctaaagcttgccagtgggttttttctttcccacaatttcactgtacttaatctctctatcaattagttcacacttagatgcagaacagtgagttttgatgagcccaaaaagctttcaatttgcctaaattgttttcgttagcataactgcttttgtgctaattattggtgattgagttttaagacccagcaaacgcaggcataggctggcaaattctatgcaggctcacttgtgcactaagtcttgcacattaaaaaaaggagtgcagagagctttggctcccaaagagagaagggctctctcttcctagcctcaagttcctgaaactatcattaagttcagacactagaagagtcaggacaagaagccagcttactttatttctggcccagagctcacagcacccctctgctctttggcaccactaccctcatccagcaagaataaggttccctaaaattccccgggaaaacagaaatcctactgctcacttccccactctcacatctacttctctaactgtctcactggatacaatgtcctacacattcatattctcagaggaaaccccttttgagagagcaatgggtccagcctttcacacagctagaaagttcacaaggtgcaacagtggtagtggtgcttctcctaagagacttaatatactgatgcccaggctccaccctcaactcattaaattggtttaaggaggagcccagacatgagtttttttttaaagctcaagttactttaatgtgcagccagggttgagaaccactgccccaacatcttttactgaggcaacaaattttcaaaggtgtgtccttcaacacgaaaggaagatagcccatccagcaagaggggggcatgttgccagcaaaagtgaaggggctcttagccaagagggcgaagctgcaggctgcgcctctcaggcaacccctggtgatactcccaaatcacatcccaatttctagaggagacagtcctccagatatccacacagccttaactaaattactgcttagaggcagctcaataaccaagaattattgaacaggcaacaacaggcgaacattgaggcacagcaaaattagtcatccacttacttactgaatcttcaactaaatttcactttggtgttggccaaatgccacaaacacctgccttaaacattgtcagactatcagcaaagatgccggtgcaagcaatgctctcaaagcctctccatcctagcccagcccaagagatacagataatagttttcctttgggaaagaaggttcatttcagggcaactataaccagagataatttggatttatctctagggcatccagccctctcaaggaatagactccactgactaagacagttgctgccattaccctgcaattacactggttaagggagtagtaaataaaggtctagaatgaatctacttcatgtgacttctaatgaaaaaaacgattttgcaagttcttatcacaaagaacttgagacgtctgacatctttagtaccagctcatgaaaacagtaagattatttccatgttctttagacttggtgatgaattccttttctggaacaccatctatatccaccattttgctattatgagctgttgggcaatattaaggtggtggactcctgcagaagccaggcagatagcctctctgaagtaactccacattgcatttgactgaatgcctgaattccaacctaagtattaaaaatctaattcctgtgttcttacataacagtccatggaaattagttagaatctgaccttcctggaggagccaagatggccgaataggaacagctccggtctacagctcccagcgtgagcgacgcagaagacggtgatttctgcatttccatctgaggtaccgggttcatctcactagggagcgccagacagtgggcgcaggtcagtgggtgcacgcaccgtgcgcgagccgaagcagggcgaggcattgcctcacttgggaagcgcaaggggtcagggagttccctttccgagtcaaagaaaggggtgacggacggcacctggaaaatcgggtcactcccacccgaatactgcgcttttccgacgggcttaaaaaacggcgcaccaggagactatatcccgcacctggctcggagggtcctacgcccacggaatctcgctgattgctagcacagcagtctgagatcaaactgcaaggcggcagcgaggctgggggaggggcgcccgccattgcccaggcttgattaggtaaacaaagcagctgggaagctcgaactgggtggagcccaccacaggtcaaggaggcctgcctgcctctgtaggctccacctctgggggcagggcacaaacaaaaagacagcagtaacctc

SEQ ID NO: 1572 - protein, 399 aa, Homo sapiens
MDGWMEGRKDEWMNGWMDGWMDGWIKVDQFRISVQHRQDPNDKVTRVHHIRDNPVQEEVIGPSPCFLAEPSAPGLTQGARSSSRKKHHHCLPPPTGKAVKATLVLLPLLGITYMLFFVNPGEDDLSQIMFIYFNSFLQSFQGFFVSVFYCFFNGEGTGEVSMQACVSVDDSTFHLQSPSAETGPVGWMRRREGASALSREEEVAPLAGPSLPSSPHGPGHVHPYITHTDQLPQHQADGRCVTPRSPTCTAPLSSSTFFLWVLCAGQALVGQEMGGERPALQPGRKEGRSRRSQGERSIRPFLPKETNALGSARQWAQVSGCTHRARAEAGRGIASLGKRKGSGSSLSESKKGVTDGTWKIGSLPPEYCAFPTGLKNGAPGDYIPHLARRVLRPRNLADC

SEQ ID NO: 1573 - DNA, 1085 bp, Homo sapiens
  source (1)..(1085)
  CDS (201)..(461)
  CDS (652)..(885)
tgctggggatttccagtgattggggcattcaggtatccctcttcgccctgatcctggccatgtatttggtgactattttaggaaacaccctcattcttcttctgatcagactggacaacaggcttcatacccccatgtacttctcccttagtgttctgtcatttgtggacttttgttatacaaagagtattgtcccacaaatgctgtcccacttgctctcagcccgaaagtccatcccattctacagttgtgtgctccagctctatgtttctctggcattgtgtgggtctgagttcttcctgctgggggccatggcctatgaccgctacgtggccgtgtgccacccactgcactacacggtcatcatgcatggagggctgtgcctggggctggcggccagccgcctggtggctggcttctcaaattccctgatggaaacaattatcaccttccagcttcctgtgtcacggtgttatcaatcactttgtctgtgagaccttagcagtgctacagctagcctgtgtggatgtccccttcaacaaggtcatggtggccatctcagggtttctggtgatcttgcttccctgttccctggttctattctcctatgcttgcatagttgccaccattttgtgcattcgttctacccaggtacgctgcaaagcctttgggacctgtgcctctcacctcattgtggtttgcatgtgctttggggctaccatctgcacctacctggggccacagttggcctcctcagcagaggaagagaagatgattgctctcttctatggagtggtgtcacccatgttgaaccccttgatctacagcttgaggaataaggaagttacggctgctgtccggaaagttttagaaagatgcagataaagggtcaagactctaagaacctcttgttatctatcatcaaaaccaaaaaggagataagataattgtagacaggactcccacacttacactaaaagaagactattacggtcaaatccttgcatttgaaccaagtgttcctccaaatgcttaatttgttttatataggccaatatctgaagatatacatgttagggatcgat

SEQ ID NO: 1574 - protein, 164 aa, Homo sapiens
MLSHLLSARKSIPFYSCVLQLYVSLALCGSEFFLLGAMAYDRYVAVCHPLHYTVIMHGGLCLGLAASRLVAGFSNSLMETIITFQLPVRCKAFGTCASHLIVVCMCFGATICTYLGPQLASSAEEEKMIALFYGVVSPMLNPLIYSLRNKEVTAAVRKVLERCR

SEQ ID NO: 1575 - DNA, 1373 bp, Homo sapiens
  source (1)..(1373)
  CDS (201)..(521)
  CDS (664)..(1173)
cttccttgtgaggaggactgggggtggtgggctgggaatggacccatgaactgttgcgacctctctgcagccaccattcctggtccagcctctaccttccacccgactcctcctccacgcgcagggccagagcatgcgtacccgacaagctctgccctcctgtgcctctcttctacaggtgcctgtgggcgggctcgtgcatggacagtcccagcaatgccaccgtgccctgtggctttctccttcaaggcttctccgaattcccgcacctgagacccgtgctcttccttttgctgctgggggtgcacctggccaccctgggcgggaacctgctcatcctggtggccgtggcctcgatgccaagccggcagcccatgctgctcttcctgtgccagctgtcagccatcgagctgtgctacacgctggtggtggtgccccgctccctggtcgacctgagcacgccggggccaccgcaggggcagccctatctccttcctgagctgcgcctttcagatgcagatgtttgtggctctgggcggggccgagtgcttcctgctggccgccatggctaatgaccgctacgtggccatctgccacccgttgcgctacgcgccgtggtgacccccgggctgtgcgcgcgactggctctggctgctgcctcaggggactggcggtgtcgtggggctcacggtgccatcttccacctgcctttctgcggctcccgcctgctgctgcacttcttctgcgacatcacggcgctgctgcacctggcctgcacgcggactacgccgacgagctgcctctgctgggcgcctgcctggtgctgctgctgctgccctcggtgctcatcctggcctcctatggcgccatcgccgccgccctggccgcctgcgctgccccaaaggccggggcaaggccgcctccacctgcgccttgcacctggcagtcaccttcctgcactacggctgcgccaccttcatgtacgtgcggcccagggccagctactccccgcgcctggaccgcaccctggcgctggtctacaccaacgtcacgccgctgctgtgcccactcatctacagcctgcgcaaccgcgagatcaccgccgccctgagcagggtgctggggcgccggcggccaggccaagctccaggcggggatctgcgcgagctctgatggcaggcccgtaccaggcagagggggccgctccgctccgtagagttttccccatcatgaggggtctgcatggggaaagccaacaaggggactcaaggactgcatccaggaaagagaaagcctcccagaggttgccccatcctccactcttcccttgaatagctgggatcacagctattcgggaggctgaggcacgagaa

SEQ ID NO: 1576 - protein, 276 aa, Homo sapiens
MDSPSNATVPCGFLLQGFSEFPHLRPVLFLLLLGVHLATLGGNLLILVAVASMPSRQPMLLFLCQLSAIELCYTLVVVPRSLVDLSTPGPPQGQPYLLPELRLSDADGTGGVVGLTVPSSTCLSAAPACCCTSSATSRRCCTWPARGLRRRAASAGRLPGAAAAALGAHPGLLWRHRRRPGRLRCPKGRGKAASTCALHLAVTFLHYGCATFMYVRPRASYSPRLDRTLALVYTNVTPLLCPLIYSLRNREITAALSRVLGRRRPGQAPGGDLREL

SEQ ID NO: 1577 - DNA, 1997 bp, Homo sapiens
  source (1)..(1997)
  CDS (201)..(916)
  CDS (1578)..(1797)
  modified_base (1806)..(1905): a, t, c, g, unknown or other
ttttgtgatgaatttcccaggtgttatttgtgcttcttgtatttggatgtctaggtctctcacaaggccacggaagttttccttgactattcccccaaatatgttttcctagcctttagaattcacttcttcctcaggtacaccaattagtcttaggtttcattgtcttaggccccaccactggggccgttacacgtgacatgggatgtgggccatcaggcaaagggcgcggagatgcggcgctgccaggggagccaaggaggaaagagagcgctttccaaattgtcttccagggtttcaatgtgcattttattaactcagaatctgtcgggaataatactagggagctacctttccctggagatgggtcttgtcagtggagtgagataggctggggggaggaagaggaatgggaggctcagtttataaatattaagatcagcaagggtgtgctgctggcaggagcagagcgagcctggagatttgggtggctgccgttggtaagtggttgcaatccagagagtgggattgagttcctcccttgtcatgttagcatcccgtttcctgggcgcgggtctaatgccctgcaggtggtcatttcactcatggtggctttgtctctcttctgccatctccagactcagctttgcactccagggctgcgtaccaccagccactgtcatgttaaccccttcccaggccaatgtgtccttggcctggagcccaatctgctggacagcctgggaccgtccattttcggggtggtgggcaacctggtggccatcgtggtgctgtgcaagtcgcgcaaggagcagaaggagaccaccttctatacagttatgcggctggctgccaccgacctgttgttcactttgctggtgagccaggtgaccatcgccatgtacatgaagggcgggtaacctgggggccagctgctgtgtgagtacagcatcttcagcctgttcttcttcagtcagtccggcctcagcatcgtctgtgccatgatatctatacaggtaatttgtgttagacattcttagaagagtttcaaaagttttatgtttttatctgggttataaacagagtcctcaaatgcatacaaaggaaatcatgccatgattgaatttcagcaggaataagtttattttacctattcaaaattaaaatacttttgtgtttgaaaatctgttttaaagatatgtttttgaaaaaagtttaagtaaatatttaatcatgtccccttttctatcccaagaaataatttcatatatagtttatttaaattttttaacaaaaatgtagcataatttttttaaattgtatattttatttaacccaatatatatccaaaatattgggtcaatatgtaatcaatataaaaattattagagatagtttgcattcttttttcatatgaaatctttgaaatccattgtgtattttacattttaggatgtctcaactcaaatgtgaaattttcatggagaatatttgaactgtatttagattaatacaaattgcagttaaaacgtttaatatagatttaccagggggcgtgcagcccgcttgccaatcagatcgctgctgagcggtcccgcagccaacccccgaagagcagcctgctggcttccccagcgcccaggagttgggggatgtcctacaaacctaccacccctgcccccagcagcacccccggcttcagcacccctgggccaggcactccggtccctacaggaagcgtcccgtcgccgtcgggctcagggccgggagccactgcccctgcagaccgctgtttaaagactctgnnnnnnnnnnnnnnnnnnnnnnnnnnnnnnnnnnnnnnnnnnnnnnnnnnnnnnnnnnnnnnnnnnnnnnnnnnnnnnnnnnnnnnnnnnnnnnnnnnnnaaccggaaccgcaaccctcaccctaacccaaccctaacccctaatccctaacccctaacatctcttaaaccctaactctaaacgttgactcc

SEQ ID NO: 1578 - protein, 311 aa, Homo sapiens
MGCGPSGKGRGDAALPGEPRRKESAFQIVFQGFNVHFINSESVGNNTRELPFPGDGSCQWSEIGWGEEEEWEAQFINIKISKGVLLAGAERAWRFGWLPLVSGCNPESGIEFLPCHVSIPFPGRGSNALQVVISLMVALSLFCHLQTQLCTPGLRTTSHCHVNPFPGQCVLGLEPNLLDSLGPSIFGVVGNLVAIVVLCKSRKEQKETTFYTVMRLAATDLLFTLLVSQVTIAMYMKGGSLLSGPAANPRRAACWLPQRPGVGGCPTNLPPLPPAAPPASAPLGQALRSLQEASRRRRAQGREPLPLQTAV

SEQ ID NO: 1579 - DNA, 16815 bp, Homo sapiens
  source (1)..(16815)
  CDS (201)..(388)
  CDS (870)..(941)
  CDS (1497)..(1568)
  CDS (1687)..(1956)
  CDS (4564)..(4707)
  CDS (9933)..(9982)
  CDS (16030)..(16267)
  CDS (16483)..(16615)
  modified_base (6779)..(6878): a, t, c, g, unknown or other
accagtgcagttcagttcagattcaagttcagcaaacatctgacaagaacctgctgtgtgccaggcacccacagagttatatcaaagtccagaatcttatttcattagtgatcccctctggttcatccttatcgagagaaactgccagtgtacaccctatcccatccatcagtcggtatctgggctcaagggaggtgctgatgcatgacagcctgaggccacacccccctgtttctgcaggccagggagaagcggggcgcgtgcccacctgcaccctgtcctccggctcctgcccggccatgtgcacctgcagcaatggcatcgtggactgtcgtggaaaaggcctcactgccatcccggccaacctgcccgagaccatgacggagatgtgagtacggggcagggcagatgctggggcacagccctttggcaggcctggctctggagggccagtgaagagctggagtaggcgctgcctcagggcttgccccaacccctcagtggccgtagagaagacacagtttgcctctgctgggctgagctttgtgtccagggctgggaaactctggagggctggggagggagtgtccctctggggtcccacccagctgcgtgagtctgctagaatcaggttctcagcatcatttgtgggcccctttcagctacaaatgcctgtgataatggagcgcaagtcagcattttctctgtctgtcccggcgtccttaccccagacttcaacttctggaagtgggaagggagcaggggcaagaggggccaaaggattattcagggcaggtgagcccagcagataacacccagggctgggctgacctgggcccttgggcttcccctctcttttctccccgcagacgcctggagctgaacggcatcaagtccatccctcctggagccttctcaccctacagaaagctacggaggatgtgagtgcctcccactgcttcctggggagctggtacagggctgacggagatcctgggtggtcccacagccctggggcaggccctaactcagccccccacagctgagtggccttggccagccacctgaccttcctgcccttcaggctgcttggctgtgatgcggggacctccttgcagggctatcgtgaggcctgaagggagtgctgagcctgagcctggcctgtgatgggagctgcttgtcatcctcccgtttcagcttgggtaccaataggagcaattaaggatgggagggggctaggagactgccaggatgcatgggaaagctttgtccataacttcccaagctggagtgccccctcctgcccagccctcagactgcacagggaaatagcggccatgggcttttcaaatggaggagagatctggcctctcactattctcatttcaaagcactccaccctgctcctgtgacatctaggaggtggaggggactgggcagggcttagtggctgttgagggattcagacgccccctctccttctgctcaccttgcagagacctgagcaacaatcagatcgctgagattgcacccgacgccttccagggcctccgctccctgaactcgctgtgagtagcagtgccaaggcttcctcagtggcccagggcatcccctgaggaggctggcagggcccagggtcctggtggatgcaggaggaggagcagggctatgcccccctccacacagcccctgcccaccccagcctcagtgggtcatcctttggctgcaaagggtttgctgttccagctccctcttcctcactggtggaccctccgacgctgggagcgggagaagtgtggagaagctaggcagagctgttgcccctggcaactgggatgcactccctgccacagtgaggattttcccagcattctttgcacaaccatcttggccccgtcccccgcccgaagcccagcatgctgtgctcctgaggcctctgcagtcaccgcagggccagtgagcaccagctccagttgtgacatctgccacaacttgctatcttttatcccaaatgtaatgaatcccaagatgtggtgggtgctgctaggacagtgtttgcccgctcctccttcagtatttcccttccttcaggatctactggggaagtctgtcaataaaacatacaaaaggtagtgaagcacctccctctcccactcaccaagggcctcactacccgaggtcctacagcactttgtctgtacagagagcacactcagggtgccctggagttgggcgagctccctgtaggaggggccatttgttactctaggggatgagtgttttcacctgctccttggcagcacaggactcatgcttggcatagactagaggcctggcaagtacaacggaatagaactcccccggggagtgcaggagcctgccagctcagtgccttctgtgtatgccatcttttcttggagcagagtccaagtagagggtggggccaattatgaatggcacccctgaagttgtgcagtgtacaccctacacagctgtacatgatagcctggtgagggatcgttgtcattggctgaggagatcagattctgaaggtggcctgccaaaatgcagggcccttcctctgagaagtgaataaagctctcctaagttggaacatggcagtctaaaaaggtaaaagtgaataacccaaccaagtggatttctgttgttcatgggtacctggtcacagccacctccctgcatataggaacgtggatgattccagtacaccccatcaacagtgtctacctcggccagccctgaccttgcctccctgcttcagttcctgccccctctgctccatttcccacccagcagcttgaggggtgtttctgaaatgggaatctgatgctgtctcagtggcttcctgatgctggctgggtaaagaccaagttactgtcccatttgttccctccattccagccacactggccccgtcacctgtccacacacgacaggcacacacagctcccactgcagggcctttgctgttgctgtgcctcactccaggaatgaccttgaagccatgtttgaagaggaagtacccaggattttttactcagcttgaacgtttacgagggtagcttgtggggtccgattatgatattgggaatggcatacaacccccctccccaaacctcctggatgttttcactgtcctcctgaacccacccatgtctacatgtgtttttttgaacttttgtttttttaaaaaacctatacatggaattcatgctcaatgcagaaaactttgaaaatgctaaagtataaaaaaaaaatgcttgaagtcccaccatccggatctcacactgcatatgccgtctggcattctattttttcctgtaactctctgaaaatatgttaattattcctgcccatgggattttctcttctctcaacaatctccttttggattctggaccagatgaatttcccaggaagtgcccctttgcagccttctgtggggtccacgtgtgagggcggtgaagcaggagctgctttgttagtgattggagtcaggggcatctctagcccatagggcactttacgccaagaagcaggcaacgctttcttaagacactttactgtcatctgtggacaagttgctataacaaatatacaccattaggatgtgctccatgtaaatggcttaggggcagcgctgttgagctggggccgtctgcagagttgtgctattgccctggtgggctgtcctctaaccctcctctctgctgccttttctccagggtcctctatggaaacaagatcacagacctcccccgtggtgtgtttggaggcctatacaccctacagctcctgtaagaacgaatcctgggtgtcttgggtgggacccagggaagggccagctttcctctggcctgctagactgtccctttaggcctctcttgggtatgggactcaattgagacaatgagcttggaagacaggcagacccactagggctgagaaagtctccagggctctgcagaggctagagagggaggtagaggcagcttcagagctgctcacaggatgccaaagcagagaggctcctgagactcggcccgtgctcctgaggagcttggtgtggctggggacagagctttctcctgcaggggggacacccaggccagctcggcctccttgaaccatgaactttcaggcagggattgtctcccagggctcaagaggcatagaacacaaatgctccaactcagctgcctggggaacccaatggacctctgggaaggaggaggagccccccctaaaaatgccttcacaaggtggctctctgctttcccggaatcccacagggcatctctagcagttcttggaaagagagacgagtgggttgaccaagatgtccctatgcatggaggaggcagtcggagttccgggcccctctccgtggtgcagacatccagagggcagattccctgggcctgctccgatgggctcctccctgtaataacgcaggccgggactgaagaaggtgcccaggacctgagatgggtctcaggtcgagcctctctcctcaccacttggtcctggctctgcccacaggctcctgaatgccaacaagatcaactgcatccggcccgatgccttccaggacctgcagaacctctcactgctctccctgtatgacaacaagatccagagcctcgccaagggcactttcacctccctgcgggccatccagactctgtgagtgccctgatgccttcttcttctcccctcccagcaggtgggcctgggggaggttgcagcctccagggacaggcagctctccggctctgggctgctgtgctcactgggggtggcctcttacagaggaaggacacagacctgggttagaccgtcctaggttcaaagtccacctaggcctcttattggctgtgtgattctgggcagcttctctgggccttatttttatttatccgtaagatggggatgccttcccatagggttgttatgagattaaggaggatgtttgtatgaagcttagctcatcacaagtgcttgataaatgctgcctttagctaacaataatattgatggtgatgatgatgataatatatcgcgctgattctaagacacatgttgtttccacgttaacagctctgaaactgggatgcatgttataatcagtggtacatcacttagttggcagcattttgttctttattgatagtacaaaaaaaatagtagtgcctcttacaattcataatgtcaaatcagatgaaatacggtaatgacaatggtgactgtgaataaaaaaattagagagcaataaatctggtaatttgttgtaatattttattgtggaaaattataagcagattaagagtagtactgtgggccgggcatggtggctcatgcctctaatcccaacactctgggaggctgaggcaggaggattgcttgagcccaggagttcaataccagcctaggtaacagggctgggcaccccatctccacaagaaattttttttaaaaaagtagccaggtatgatggcacatacctgtagtcccagctacctgggaggctaaagtaggatgattgcttgagcccaggaggttcaggctacagtgacatgtggccacaccccctgcactcccacctgggcaacggagagaccctgtttcaaaaaaaaacagagtgctatgtatggtgaacccccaagttttcatcacccagcttccaatcctgtataattaattccttaatatcattgagtatctaattagtgttgaaatttccaagtgtctcttacatgttatgcaatttttttgattgttttttgttttttgagctggagtgtcgctctgtcacctaggctggagtgcaatggcacagtctcagctcactgcaacctccacctcccaggttcaagtgattctcctgcctcagcctctgaagtagctgggattacaggcgcccgtcaccacgcctggctaattttttgtatctttaatggagatggggtttcaccatgttggccagactggtctcaaactcctgacctcgtgatccacccgcctcgacctcccaaagtgctgggattacagatgttagccaccacgcccggaatgttatgcaattttttaatagtttgaatcaggatttaaataaagcctgtgcaatataactggctgatgttggtttatgttggttgatgtacctcttaagttgctgtttatctatgtgtcctctccatttctcttttccttgtaactgatttgttgaagacactgcatcattggttctgtagggtctagactttgttgattgcttccctgtggtgtagtttcacatgttcctctgtcttctctgtatcctgcagattgaaaattggatctaggagctcggtcaggttcagttttgattgatttatttggcaagatgattttatagatgggattgtggacttcccgtcagaaggcagacagatgtctggctgtctcccttttgtaataaaaacagccattgatctcagtgcttgaacccattaattcattagcaatcctgaaatggtgattttgaatttgtatcagtctgtttttgtgttactatcaaggaataccagagactaggtaatctataaagaaaagaggtttacttggctgacagttccgtggggtgtacacatacggcaccaacatctgcttggcttctggtgaggcctcaggaagcttacaatcatggcagaaggcgaagcaaaggtaggcccctcacctttagatcgggctgccagaaagctaaggagaatggtacnnnnnnnnnnnnnnnnnnnnnnnnnnnnnnnnnnnnnnnnnnnnnnnnnnnnnnnnnnnnnnnnnnnnnnnnnnnnnnnnnnnnnnnnnnnnnnnnnnnnttatacagtgtgttttgcatttctgaagttacatactcaggatatgttaccagtagtgaggtttctgggtggaggggtaagtgcaaatgtaattttattagatgttacaaacccagttttcctctatggtagttgtattattttgcacatctactaagacagtatcagggtagttgtcacaggattctagtccatagtaattctaaatggtatttctttctttcttttttgagacagggtcttgctctgttgcctaggctggagtgcagtggtatgaacatggctcactgcagccttgaacttctgggctcaagtgattctcccccttagccttctgagtagctgggaccacaggcatgcaccaccatgcccggctaatttttttgtaatttttttttttttgagatggagtttcgctcttgttgcccaggctggagtgcaatggtgtgatcttggcacactgcaacctctgtctcctgggttcaagcggttctcctgcctcagcctcccgaatagctgggattacaggcatgtgccaccacgcccggctaattttgtatttttagtagagacagggtttcaccatgttggccaggctggtctcgaactcctgacctcaggtgatccacccgccttggcctcccaaagtgctgggattacaggcatgagccactacacccggcctccttctcttcttttgacaaaggaccagaagtctgctgggaataaaggataccactttggccaagacaatgtcacctgggcggaaactcttataaatttcaacctgtaaagaaagaacaggaatgttaagtgaaagctctagactgggtctatatgaaactgtgaacgcttctggtaaagccaatctactttctaatcctggagggtagaaatcatcattactcatgtcaagtcaagaacttttaattgcttctacagtattatcatacaaatgaaaattttttttttttgagatggagtctcgctctgtcgcccacactggagtgcagtggtgcgatctcggctcactgcaacctctgcctcccgggttcaagcgattctcctgcctcagcctcctgagtagctgggattataggtgcatggcacgacacaggctagtttttatatttttagtagagacggggtttcaccatgttggtcaggctggtcttgaactcctgaccttgtgatccgcccaccttggcctcccaaagagctgggattacaggtgtgatccactgcacccggcccttttttctttttttttaagaggtgggatcccactgtgtcacccaggctggagtgcagtgatgcaatggtagctcactgcagccttggactgctggaccaagggatcctcctgcctcagcctcccaagtagctaggactacaggtgcgtgccaccacttaacctcaaactcctgggctcaagcaatcctccagccacatcctctcaagcagctgggactacaggcatgagctaccatgcctggccaatttttgaatttttaaaatttttgtagagacagggtctcgctatgttgccagggctggtcttgaagtcctggactcaagtgatcctcccgcctcagcctcccaaagtactgggattacgggtgtgtgtgaccatgcctggcctgagataatacttttaagggattgagatacgtaaagccattaaaaaaaaagaaccaaccaacaaccttgtctttttcagttgctcggacatcttccttgctataaaaaaagaattaacagaaagattaattacctgtgagaaagaattttttttttttttttttttgagacagagtctccctctgtcacccaggctggagtacagtggcgcaattttgctcactgcaacctccgcctcctgggttcaagcaattctcgtgcctcagcctctcaagcagctggaattacaggcacgtccgccatgcccagctagttttttgtatttttagtagagatggggtttcaccatgttggccaggctggtcttgaactcctgacctcaggtgatccacccgcctcagcttcccaaagtgctgggattacaggcatgagtcaccttgcccagcctgtgagaaagaattattctgtagattcctagtaaataaagagctacaagaacagacagaacaagttgtaaatgggacacagctgctacccagaggagcagggtggagaagcatcctcagaccacatggagaggcagtatcaatacctctgattagataaaggcagatcggatttggcaagaaaggataaggaatttcgttgcctcagggcttgaacagaagcactatagcaagggcccccaacttctggtggcctgtgaggaaccgggctgcatagaaggaagtgagtggcaggcaagcttcatctgtatttacagctgcttcccaatcgcatacattactgcctgagctccgcctcctgtcagatcgaagtgggcattagattctcatagaagtatgaaccctattgtgaactgcacatatgagggagctaggctgcccactccttatgagaatctaatgcctgatgatctgtcactgtctcccatcacccccagatgggaccatcgaattgcagggaaacaaactcagggctcccgctgattctatattatggtgagctgtataattatttcattatatattacagtgtaataataacagaaataaagtgcaccataaatgtaatgcacttgaatcattctgcaaccaccccctccatggtctgtggaaaaactgtcttccaagaaactggtccctggtgccaaaaaggttggggactgctgcactacagaaccacatcaaatcctgaggctggaaagggcctcaaaagttagattatctgcctggcaagaaatgtttgtcctttctcaaggaagccacacgaaatcaccatctcacccacaaatcttttcaatgttttataacctctgagttcaatctatattaaattttaaagtgcttcctaaaatgccttctactttttttttttttttttttgagacggagtttcactcttgttgcccaggctggagtacaatggcacgatcttggctcaccgcaagctccgcctcccaggttcaagtgattctcctgcctcagcctccctagtagctgggattataggcatgtgccaccacgcctggctaattttgtatttttagtagagacggtgtttctccatgttggtcaggctggtctcgaactcccgccctcaggtgatccgcccgcctcggcctcccaaagtgctgggattacaggcatgagccaccacgcccagcctgccttctactttggtttgagtcatcctgacactgctaaacttcagcttcactcaattctttttgctttaccttttatttatttatttgttttttgagacagggtctcactctgttgcccaggctagagtgcagtggtgcaatctcagctcactgcaacctctgcctcctaggctcaagtgatcttcctgcttcagctccacaagtagctgggagtacaggcacgcaccaccatgcccagctaattttttttttttttttttttaaagacagagtctcgctctgtcccccaggctggagtgcaatggcgcaatcttggctcactgcaacctctgcctcctgggttcaagcgattctttggcttcagcctcctgagcagctgggattacaggcacacgccaacatgtccggctagtttttgtatttttagtagagacagggtttcaccacactggccaggctggtctcaaacccctgactttgtgatccacccacctcagcctcccaaagtgataggattacaggtgtgagccactgtgcctggctaatttttgtattttttacagagatggggtttcaccatgttggctaggctggtctcaaactcctgatctcaagagatccacccgcctcagcttctcaaagtgctaggataacaggcgtgagccaccgcgcccagcctttgctttacttttaaaccctctcgttaatattttccttttgtcctagatcatccatgtattttttggatactactaggggagaatcaaagcacaaagaagaaagaaaaacgggcaaaagaaaaataggaattgtaactgttgctcaaaattctggtgtcctagtctatcctaatcttattccagttgctaaggtatatgtgaaaaggatacttcttaccggatagttcctcgaaaagagttcttaagaggcatggaccccacatacaggatgtgtactttggcaaagcgtgaattgatgctagagacctgcggaatagagaaaagatcagcatcagagtataagcagttgtcagctcaaggaggcagcaataaactggggattactagggcttcagtgcaagcaaccctactaagtagagaatttaagacaaattaactcctacttctctctgcgtaagtgacacatgtaaagaggaataagagccactctggccacctggtagagttactatgggaaacaaaggtggtatgggtttttttttttttttttttttgagacggagtttcactcttgttgcccaggctggagtgcaatggcgcgatcttggctcaccgcaacctccgcctcctgggttcaaataattctcctgccttagcctcctgaatagctgggattacaggcatgcaccaccatgcccagctaattttgtatttctagtagagacagggtttctccatgttggtcaggctggtttcgaactcctgatctcaggtgattcgcctgcttcagcctcccaaagtgctgggattacaggtgtaagccactgcatccggctgggtttttttttttttttttaaatcttttcacactttgcccttcagagaggtatagactttttaaagtatagatggctaacaattaaaaaaaaaaaaaaaaagaggctggacacagtggctcatgcctgtaatcccagcactttgggaggctgaggtgggcgcatcacttgaggtcaggagttcaggaccagcctggccaacatggtgaaaccccacctgtgctaaaaatacaaaaattagccaggcgtggcagcacatgcctataatcccagctactcgggaggcagaggcagtagaattgcttgaacccaagaggccagaggctgcagtgagccgagatcgtgccagtgcactccagcctgggtgacagagcaaggccctgtctcaaaaaaaaaaaaacaggaatggcaaaaaataaagtcttttgcttctctgcagaaaaagaactcagcttcagatgttcaaaaataggcctcctaatcatcctctggcatccctgtttcccagacacaggtagaactatgtattcagggaatcagctcagtgaaggaactatgcatgcctgaacttggctgccttgattattatcctagaaatctgtaagcctgcacagtccagtaaaactttctgtgatgacagaaaagtcatgtgctgaccagtatagcaaccactagccacaagtggctattgagtacttgaaatgtggctaatgtgactaaggaaatcaattttatttttttcttgagagacagagtcttgccctgttacccaagctggagtgatcatggctcactgcagcctcaaccccctgggcccaagcgatcttcctgcttcagcctcccaagtagttgggaccacaagcatgtgctaccatgcctggctaattttttattcttcttcttctttttttttgagacggagtctcactctgttgcccaggctggactgctgtgacgcaggctcactgcaacctccacctcctgggttcaagcacttctcctgcctcagcctcccgagtagctgggattacaggcatgcaccaccacgctaagctaatttttgtatttttggtagagacagggtttcaccatgttggccatgattggccaggctggtcttgaactcctgaccacaggtgatctgcccacctcggcctcccaaagtgctgggattacaagcatgagccaccatgcccggcaatttttgattctttttgtagagatgaggtttcactatgtttcccaggctggtcttgaactctgggctgaagcaatcctcctgcctcggcctcttaaagtgctagaattaccagtgtgagccactgtgccctgccagaaataaatttatgtagcttgtggctatcatactggacactgcagttctggtatggtcatgatttcagtattgaatgggcattctaagcatggaggtcaggaccaacttaccttacaggttacaatagctcccacatctggcagtaactgggactctgtttctctcactacagacaccactggaagctacagagggaacaacaaaaaactgaaatgtcctgactaacccttgggtcaaggcatttgtggcttgagagtaatataggaatgtcttggtataaaggtgagagttggagtatggattcatttatagcccagagcagaaggccttagaaattttaggaaataggaggaccagcaggctacagaatgctgctagaagacatacatctctaaacttctttttttgttgttggagacggagtcttgctctgtcgcctagactggagtgcagtggcacgatctcggctcactgcaaggtccacttcccgggttcacgccattctcctgcctcagcctcccgagtagctgggactacaggcacccgccaccatgcccagctacttttttttgtagtaaatctctaaacttctaataagttttttggtgattctctcagaatttcttggtatacaactatattgcctataatcattgacaattttactttttttgtttttttttgaaatggagtttcactcttgttgcctaggatggagtgcaagggtgccatcttggttcactgcaacctccacctcctgggttcaagtgattctcctgcctcagcctcccgagtagctgggattacagaagcctgtcaccatgctcgggtaattttttgtatttttagtagagatggggtttcaccatgttggccaggctggtctcgaactcctgacctcaggtgatccacctgccttggcttcccaaagtgctgggattacaggtgtgagccactgcgccctgccgacaatttactctttcctccaaagttatactgcttccttctgtttcttattttattgcacaggctgaaatttccacaaaaatgttacataatagcggctatgcttggtttcttctattttaagtgaatacttgcagagttttctctttgagcatggtattggctgttggtataagacagatattttgagcctcatcttttatcaatctctccgttgctcacaatgcttcagctctcctggccttctttcagtttccccaacttactaaattcttcccactttcagatctctcttcaacctattctttctgccagagctgcactctctccacccacctgactcttacctactctttagatgattcagcttaaatgtcacttctgctgactaggatgggtttgcctgttacatgttctcaaggtgccctgtaatattctttcaaagcaccaccacatatgtaaccatatgctcatttgagcatttatttgtttacaatttgtgtctgtgtcctttgatagcagaaaccaagtcagcgctgtgcctgacacatgaaaatactcaagtgatatctatgaaatgaacaaactcaggactgttaagaacattcccaacaatgactgaatagaaagccccttgaatcagacagcttaagttacttactcaaagcagaatcaaagtcaagttagccagaacgtaactgttctaattctgaatcctctttctattgtgctccttcaaatattgcttatatgatcctgagctaatcctggatctatctctgaaactagaaaggtaggtattactcacacattcaacatttattgaggagctgccttgtgctatatacggatggtatggtggtagggcctgctttcacggacttagatttaagcaggggagaagtctagtaggaaacatatacctgagtgtctcatcatatgctgacatagtgcttggaagaaaaggaacagagttttttgtgagtctttaacaaaacaaacaaaaacaaaacaccccacaaaactcctttcctcaattagtgggtccagaaggacttctctgaggtgatagtagagaagctatctaaaggaggtaggaattaaataggcctaggaagatagaagcgttccagatagatggcatgttacaaaggctctgtagcaggagaaagcttggcgcattaccgacactgaaagaagctagtatgttataaaaaatttttaaagggcaagcagagactgtgattataacttttaaacacagaaaagacagtatgactagattgcgtcagtgaggtggagatagtggcgctagataaagtcggaaaggtaagcaacattcatacagtatgcaactcactgctgggctgagctgggctgggatgggatactgagttcgcatctgcttttgtcccaacttccctccccgagggtcagcagcacaaccaagcgagatcaacacaactagtgtgtggtggctaagtgcaccacagcggcgatacggctagaagaaactaagagaccaacattgtaccactgaggcactaaagacgcgtccgcagtgcccatgcctaaggactggaactcaagggcagcctaagggaaaaacagaggggagatggcatgccgcttcctttaccgcgccattctcgctgctcttcatcagacagccggcaagcgacgaaaagatgtagccgtggcgggtgtaggtgccgctgcccgggctgccctcctccaagttacacagacgttcgcctgcagaaaaaatgctgcatcggtcacgggcccccagaagctgtaggccgtttagccttcttgcttcagcccctatccaggactctgtacgggaagcgctcacttaccggggatgcagtatctcacaggtggcgccatgattgccgctgtcccaaaaccaggatgaaaacgaagtcgatttctcattggccaaacccaggcacagttccgcagtaagacacgtgtcaattggtactctttatccttgcgagtaaactccatttcccaggttaccccgggacaaatccgggggcggaacttcagaggtccacgctggcgcctgcgcgtgtggttgaggatgggctggcggcgggtccgggtccgctgcctggcgctgcgggcggcgggccatggtggtttggattgagccgggcccggccggggcgccgagtcggagggggtggcagtgagcggcggcagaggctacggggctcggtttggctgactggggagtcggcaggcggcaggtaagggcgaagcctcggcccttgctccccatcctagtccctttttctgggtagggcactgccctggggccttgtcttgagtgcgggttcctgctctctcctcgccccgccctgcggggccgtgccctcctcagcccgagcgcaccttccgagcaatcgttacgctcagagcaggagggaaggaggtcaagcgacccaactcgtctgtttcacagatatggaacctcagattcagagacagggtttgacttgtccaaaatgatcaagatagttaagatagagcccaaactggaacccacggtttttgacttccagtccatcgcagtttcacctcgcggctgtcattgagaaataaaaccttttcccggtttttttgttttgtttttgaggagtctcgctctgtcgccaggctggagtgcagtggagcgatctctgttcactgcaacctccgcctcccggcatcaagcgattctcctgcctcagcctcccgcgcagctgggacttacaggcgcgcgccaccacgcccagctaatttttgtagttttagt

SEQ ID NO: 1580 - protein, 388 aa, Homo sapiens
MHDSLRPHPPVSAGQGEAGRVPTCTLSSGSCPAMCTCSNGIVDCRGKGLTAIPANLPETMTEIRLELNGIKSIPPGAFSPYRKLRRIDLSNNQIAEIAPDAFQGLRSLNSLPCPPQPQWVILWLQRVCCSSSLFLTGGPSDAGSGRSVEKLGRAVAPGNWDALPATVRIFPAFFAQPSWPRPPPEAQHAVLLRPLQSPQGQLLNANKINCIRPDAFQDLQNLSLLSLYDNKIQSLAKGTFTSLRAIQTLLEYNGTILAHRKLRLPGYPGTNPGAELQRSTLAPARVVEDGLAAGPGPLPGAAGGGPWWFGLSRARPGRRVGGGGSERRQRLRGSVWLTGESAGGRYGTSDSETGFDLSKMIKIVKIEPKLEPTVFDFQSIAVSPRGCH

SEQ ID NO: 1581 - DNA, 13830 bp, Homo sapiens
  source (1)..(13830)
  CDS (201)..(486)
  CDS (4460)..(4952)
  CDS (5748)..(5918)
  CDS (6811)..(6954)
  CDS (10095)..(10238)
  CDS (10541)..(10707)
  CDS (13494)..(13630)
  modified_base (2697)..(2796): a, t, c, g, unknown or other
  modified_base (13826)..(13830): a, t, c, g, unknown or other
gcccaccccacccagccctgacttcacaggtctttaatctgttcccaaaactgaaacaaagggagttgcatgcgactatgtgtgtgtccctataggccttgtcctattaataaaaagtgaaagccagataaaagtaataaaaccctggcttaggctacatgttctaatatgggttggaaaactgtgaggcagcccttcccatggggaaggaacaggtaggcaggggcaagggctcccccagtgccccaggctcacttgtggccatggcaggggccgtcagcgggctggtcacagtgcaggcccacccagccagcctcgcagtggcacatgggccctggggtggcattgggctggcagatgccatgcaggcagtagagcttgcggcagggttcgcagcctggcaccacgcctggcttcatctgcgtcttggtgaagtcctgcagctcgttgttgatgtacaggtttcggatgcaaccgtggaagccggtgccgttgaggatctgccacaggcggaaggcagctgagttgacatccacgggcatccctggggtaggggagggagcagagctgggctgagtaaagctcgggctatgccgggcacccacccctgaggtctgggcagctccatggccttccctcttgcctgcggcctctgtccttcatctctgcaaccctgatccaaggtcctttgccaccttggagggcccaggctccttgcccagaagaaagggaaaagctgcttcctctgtgattggagctggggcatcaggcctggtggtggccagctgctgcgtgtggctctgaggtgcctgttcctaaagtctggcttccctcgccaaggcgccttctctccctgggacgctagcttttacctcccagagaccccagccgtagcaaaggggcaggaccgagacatcacgtgtggcgctaggtcactgcttttgtggctgtcccttctcagcagccctctgaagtagggcttgctaagccccatttgacagatgctcatgactggcctgaagctgcacaaggagtaagctgcggagctgggctgaggcccagggccatccctcacctctgccccagcctcagcacgcctcccacagggtggagatggccccactgcatccagcagcctgctcatcaataccgagaaatgcttgcaggtggtagacggggtcatctagcctgcaaagcctctaaggccagccgaggcagtccctggttgatacagggactctgtgcctgagtctcttgcagtggttctgggtctcagagggccccaagactgggaatggacctgaagccattgaaaagccccttctagcccaaaaccaagaggaaatgtgcccaaggtgttgcagatagctcggacagtcccagggcctcccctaagccagaccttgcacccaacccaagcatccatcctccttggtcagtctgggctaggcagagagcagctgggctccaggcagcgaggccagtccacctgcagcttggccaccaccaggatcatcttcccacttggcatttcccacagtgcagtccctaggcaccagctctcctggctggcctcaggccagacagcaaaagaggccccgccagggccaggtcctcacctcccacatagagtggcgcctcgctgttgagcgtgtaatgtttgccaaagttgtccatggtcatggggctcccgccatcaatggagagattcaccatctggtcaaaggcaaccagctcaacggtgtggaattgcccatcgttgatcgtctcagcactggaggaagagggggttccccgttccagggagtgggcatcagtctggaccatccctgcctgggcacttccccagaaacaccagtagctgcttcccaggagaccaaatatctaaggaaaaggactgtgggggctcaagggtctatcgcatgatccctttcactccccttctttgactccctggggaaggctgagaggtttgaggcaggggtctcaaacttacaagtctccccctccccattaaggagcctcctctaaggtggtggtgggatggggaaggatggggccactgcacaggcctcagagacctcagccccaagctggggctaacccagatggttcaagtgtccttcaaactcaggcagcccaggtttctagaggtctcgataaccacctgcttttggcccaggagacctcgccctggcagtcccgtacccctgagggcagctggggggcataaggaagccctacctgtagatggcagagctggggtagctgcctgggtcgtagctgacacgcacatggccctggtacagctcaactgcaatgtggtcgttgtccccgttgtacagaaggatcccattgtcctctgccgtggagacctgatgggcagtggcactttctctcccaccccaccccatgcagcagcggcacaggctagcagatggggcagagagggcacccaagattggaagagagatgctctgtgcagagcgctcttcccccacctggccagcctccccaaggccattcctccagggggcaccaataggggctgcagcctctggttcaagccccatccactgccagcctggccaggtccaggcaggggagggtgatggggtccctcaggcctggaaactctgtgccagaacaatacagccagcactctgcaccatgatgtatttccagttggagtaccannnnnnnnnnnnnnnnnnnnnnnnnnnnnnnnnnnnnnnnnnnnnnnnnnnnnnnnnnnnnnnnnnnnnnnnnnnnnnnnnnnnnnnnnnnnnnnnnnnngagtattttaatacatgcctaaacaacacaattggattgactacacagttttctgccaagatggtaataaagggaagcaattggttcaggcaggggctgaggcactgaggcacagccagatgtggatgggcagctggggaggagtcataagcagtccttaaatcctggtatgttttaaattagctacaaactctgcccccaggatatcagcaaacacatcctctctgtgcaaactgaaagtttaaaaggggaaatgaatgttgagcttgatgcagaagaggtgggagggacctggtccacctggtggagctgagaggagcaagaactcaggtgggaaatagggaaagacactgcaaaggagaggtggcagggacccagctcccaaccggggggccagagggcagagcccaggaggtgatggacggcagagagcaccgccaaggtctgagctgagctgggcacagaccctgggcaagggtttactcatctgcttggagagtcctgcagccccttgcaggggcctgggctgagaccagtaagtcagatggcctgaactgatggcacttagatggaggaaaagtggccatggcagggcaagtctctttgagttggcctgttgctctgtctccccgtacttctttttttttccttttcgagacagagtttcgctcttgttgaccaggctggagtgcagtggcacaatctcagctcaccgcaacctctgctccctgggttcaagcgattctccagagccaggacaggtgtaggaatgctcttcccaggctgcctcggtttgtacagccatgagcagggcatgcccagtgctgtggtggctcagaggtagctggtctgaacctgctgtttgtcagagcccacccgtgggcatgccagcatggggtcgcacacagcaacccatcacggccatctgctccccgccaccatccccgtatttatcctgctgacaacacaggcagcctgggagagaatctgagtgaatccccagcaaggggctgctcagtcatgatttccgagttttctttgtgttgacagacagctgtaaaatggtcaaggagaggtcactcctgtggcctggggtggggatggtgactccctgtgaagcccagggactccagcaggcctggccaccctggcctcatccctctctataggagacaggctgctacctgagtctgaaggaaagggcacaaaccagggcccatggccactggggagggtcagaggctgtggcctgggcgcctgcagtcctgggttttgttaccctctctgggctttggcttccttgcctgtgaaaggccaggggtgctctggccagcctctgggtccttcctgtctccgctcgtgctcgtgaaatgtcccagggcagagagagggaaaggtgagtggaaagagagggggcagaatgaggcttgatggggagtaggacagcaggaagctctgggtggcagagacccttcacctgtagtgcgctggcaggacctctcaagggtgggtggggctgcaccctgggggttcaccccactctctctttccccccgtggctgaccctaggctccaggccacaggcagcctccttggccccagccacaacgaggccctgtcccggtggaggtcagcgcgggtttgcagcccttgtttctcatagctgatctgcctgctttggacaggcacctggcccagaaccctttcatttgcgactgtaacctcaagtggctggcagacttcctgcgcaccaatcccatcgagacgagtggtgcccgctgtgccagtccccggcgcctcgccaacaagcgcatcgggcagatcaagagcaagaagttccggtgctcaggtacctgcccgcctgcccacctgcccacctgtccacctacctgcctgcccacctgcccaccggcctacttgtccacctgcatacctgcccacctgcccacctgtccacctacccgcctgctcacttgcctgcctgcctacctgtccacctgcatacctgcccgcctacccacctgttcacctacctgcctgcccacctgttcacctacctgcctccctgccggcctgcctgcctacctgtctgcttgtctgtctgtattcagcctgctcagggaccccctgatgtttcctggatggctcccacaaaggtgtctttcattactgtgaacccagactggagggtgtgggcccaaaattctagacttgatctgaatggtagttcagtcccacctcattttattgaggcctagggaagaagcaaggcttgctgaaggtcccagagggaggactcaggtccctccacttttagccagttctcttttatgcctttgttgtcaagccttttaagacactcaggaggcctgggaaccctccttagtgagataggagcctcctccaggctttgggatgcagaaacagccttagcaattgtagtccacgtggcatctggctggggacagtgtggggcagcttctgagcctacatcctggtcaaggtcctgacgccacctgtaccccgtccccacctgtaaaattagcacagtccccacctcgtgccattgcgagtgagagctcgatggttttggcactccttgcgagaggtttaactggatgcgacacccccagtgtcagcctgggcaaggaacatgcgtgctctgtagctcgcccttctgcacacagggactgggcagatgggctcctcagccctgtctggggtgccttcagctgagcagtggggctggggcctgggctgttactgcaggtcctggctgattcctgcattatggtatttctgcttctcttcccagccaaagagcagtacttcattccaggtaggagagtggggggatccaaggccagcctggcgggaatggtggtagtgggtgggcaggctgggggccttggttgacccaaactgctgggagccggccccgggctcctcagcctctgcccccaccctctcatggcaggcacggaggattaccagctgaacagcgagtgcaacagcgacgtggtctgtccccacaagtgccgctgtgaggccaacgtggtggagtgctccagcctgaagctcaccaagatccctgagcgcatcccccagtccacggcagaactgtgagggtccctggcccccccagccctcccctgtccctaactgccactaaccctccttggcctactccaggattttcttggtccagccctgtctggggctgaaccactggagcctctggctcaggacataccaactgctggcttgggcaggaagaaaccccacccctgctgccctctgcttcattcacagcccccctcacccatcaaaagcagatgccagtctctggcactcagggcaggtcaccagcctgaatcagggatggcttttctcaacgatgcgtttgtcttattctgtgggacatgattccaaaactctttgttatttttattcctctatctaaaaatatgaatttgtgtacacatatgtctatgtgcatagatgcctgcaagcatctgtcatttacgtctgtaaatttttcatggcatttttaatgttaaaaatatccccattcatatcctctcccagtactaggcccagccttcctttgaaataggatcaatttgctttgccagataaattcttctgggagtcttctctgtttgagtcccaaatattctcagtttggaagggatttgaaatgtccatcatttgtgaatgtgcaagttcattcttgtctcttacaggcgattgaataacaatgagatttccatcctggaggccactgggatgtttaaaaaacttacacatctgaagaaaatgtgagttacccattggcgagaaggtgtctgttgggatgctggccagggatggacaagggaaatgccagggtgggggcagctcccacggcggggggccaggactctgtgtgtgggggtgttgcctgcaggaagggaggggcctgagctcctggctgctggccatatgtaatcctccccccgcctcttctcccagcaatctgagcaacaacaaggtgtcagaaattgaagatggggccttcgagggcgcagcctctgtgagcgagctgcacctaactgccaaccagctggagtccatccggagcggcatgttccggggtctggatggcttgaggaccctgtgagtgtgcagggctggggagcagggtgggccagctgcaggaggcaggcaaagccaagggaaaggaagagagaggctggaggagcccctcccctgggcccagcttgcaggagggtggggagaactgaggatcctgactgtgttgggacaggtaatcaagttggcaactctatggtgagacctgttctcttgtaccctggggcatggggccaatgcccagttggcctcaagggatggagacatgtggacccttctaggggtcccttcccattgccctctggtcaggctgcaagagcacagcatgagttcaggagtggctggcactgctgcaggcaggaggggctggatgaccttgccaaggtgattcagtgggtgtagataggggagcagggatgctgcactgtccctgagatgctaggatcccataacccacagcccagcctgagctgaccagaatctggagctcagtgggatcctggggtcatctgctcctccatgatgcaggacaccccctccatctgccccaggagggctggctcttcagatgatcctgagggtgtgtatcgtgtcccatagacagggcagtctgtcggatctcccacagagatggaaatgtttcaagtctacgctgtccagaccagtcacttcatgtggctgtggagcagttgaaatgtggctagtgctactcagtgactgaattttgaatttcattttattttaatgcatttaaatctaaatagctacatgtggctagtggctactatattggacaccacagctctaggaagccacttgcccgggtataagtcccaaatctgcagcaggatgtagagttgtctctgagcaagtaaatgaatgtgtgacaggactccctgtggatttttgttcctttattttacaaaaagcaaattttattatgcactatgttttgcagcttgctgttttcacctgtgaatacagcattgccttctttccaggctgttcctataggctgcctcatttttctttatgcttacctagtattccttaaatgtgggtgtgggggctgtccagtcagctgcattctttccaaggaagacttagataaggacagaggaaaagagaagggcccataccccatcactatccagaaatgaccactgttaattgttggtataaacaactgtctttccagtcttttacatatctctaaacctgcatacacatacatatacacacatacatacatacaagcatgcacgcatacagaaatattctaatggactcgtacattttatttagtaacctgctttttccttaaacttaatatgagcaccattacatattaaaatttttttccattccacatttaattcctaatacaaaaaaagtgctctgcatcagtttgaatgactaggtattatataattattggcaatgtaggctgtttctatttttttttttttataagcaatgttgtattgatacctgccttagtgggttcaggctgctataacaaagagccacagactggaggtttatagacaacagaagttctggaggctggaagtctgagaccagggtgccagcatggatgggttctggcgagggccctcttctgggttgcagacttctgacttctcattgtgtcctcacatggtagaaagagggcaagagagctctctgggatctccttgataagggcactaactccattcatgagggctccacccttatgacctcattacctcccaaagaacccccatcctgatcccatcacactggggattaggacttcaacatagggattggaggggatcacattcattctgtgacaatatctttattgtgaagttcacgtataatgcatgataatactcttgttaggaattcctaaagatggagtagtcgggtgaaaacacaaagtgtcattttggggattttgctacatctcaccaaatgcacttccagggaggtataaaggcatctcctgccagtgtgtggaagtgcccagtcactcacactctcagagatcctggatgtcattattattattattatatttttcattcttttttaatttggcaggcaaaaaatcaatattgcgtaagtgtctttgattagtagtaacattgaacatttttgtgaatgttgataaaccattttaatttcttttgtgagttggctaccctgtgttgacttggtttttgtttttacttttggttggcaagtgaaattgagctgggtttttgttgttattgttgttgttgtttagggagacagggtctcactctgtctcccaggcagctggggtgcagtagtgccatcatagcttactgtaaccttgaactcctgggctcaagagatcctcccacctcagcctcccaagcagctgggactacaagtgcacaccaccatgcctggctaagttttaaatttttttgtagagacaaggtctcgctatgttgcccaggctggtctcaaacccctggtttcaaataatccttggcctcccaaagtgctgtttttacaggcatgagccactgcatcaggcttgggctgggtttttgaagatgaacagcagcttttccagatgtagatgaggcaaaagagtattctagaaaactgtcacagcggtgtagcaggctgagggctggtccatctctagggaggcaggcaggtgccagggctgagatggtccgggtctgggtagacatggtctcaggtcacagtaaggagttcgagcatgactcggtgggcagtttggaggctgttagtggactttaagctggagagtgacatgatggattaggtttcaggaagtctcctgggcactgatgtggagcatggcctaaagacgggcaggaactctgggcacccagggcacggaggcaaggccagcatgggggacagggcagtggcagggagagagagacagagcctcgaggcttctcagaggcgggggcgggtctggagtgggcacaggtgtgtaaaactcgcctcacctggccggggcctggctggtgcgtgttcctggctctgcggctcgcagcctatggaggagaactgtgaacgagccacgatggcggaagctgcgtggcccaggtggatggctggcagggcagcaagggtcccctcctccctcccccgttcctccccagaatgctgcggaacaaccgcatcagctgcatccacaacgacagcttcacgggcctgcgcaacgtccggctcctctcgctctacgacaaccagatcaccaccgtatccccaggagccttcgacaccctccagtccctctccacactgtgagtccggcctccaggacaggcgggcgggggctctggagcaaccgtcccaaccgtctcggccagccactttgaaagagctcaccctgggggtgctgggtcttcgtggtttgctgaaacgtgggttccacatttcgaagtctccctccggtcctcagagccggtcctcttggtgatgggtggtggtctgggagacagtgccatgtggccatgtggccctgtgtccgtggtacaggaggggtttgctgggacctctgagaggggcagagtgtctccatggccgcctggcctgcctcttccaggaatctcctggccaaccctttcaactgcaactgccagctggcctggctaggaggctggctacggaagcgcaagatcgtgacggggaacccgcgatgccagaaccctgactttttgcggcagattcccctgcaggacgtggccttccctgacttcaggtgtgaggaaggtaactcgtggccccccggtggcaagggagagggcgccctgggtccaaccagtggggtggggcaggtgaggaagatgggagtggacaggcagcaccccctggcatgcccctgagaggagaggttaggtggggaggggaggccctgttttcaggaggagacgcgcctgcctggtggtgtctttgtgtggttataagagcaataaagttcctatccttaaaaaatgggaaagtatggataaaagaaggaaataaactttacctattattccatcgctcagagaaaacagttcccattttagtgtagtttctttctgtaagtttggtgaactcagacctgccttttggctgtccctaagcactctagactcatggggtcaccttatcttaatatgcaatggaacccttttgagtcccctcccccatatgtaggaaaccctgaccctggtcactctttgctccaatgccttgtttcctgggacttctcagggtagccccatccctcattttttcgccacagcaccaagcacggaaggtcactgtaggaagcagatttttctctgtgcagccatcccatccttagtgtctctcagcaccctgccgcagggaatttctccctggctgacctcagcttccagcccccttctccgcttctgggtgctaaggtgcctcccttctccctggtctctccctttcttgccttctaccccctgcagcctactcccagtggcagctccaccctcagctggcctggccaggccacgtggcagtggagagctttgactttcaccccaagaaacaccatcagggtattttctaaacaaaattaatgaattctctaagaatacttttgcttctgacttctaaaatttaaaaaagagtctatactatttacatatatattttattaatttatataataatagcttgcaagtctttttaaaaatgtctgatttgtttaaaacctaactatatattttgggcattttctcatgccattaactatcctttggaaacattattttttccaagatacggtttccttttatccttctttttacaaaagaaatgcatcctcattccttaaaacaacaacaaccaaggacaaccagaaggaggatttaaaaaagttactgacaggccaggcgcggaggctcatgcctgtaatcccagcactttgggaggccgaggcgggcagatccctgaggtcaggagttcaagaccagcctggccaacatgctgaaaccctctctttactaaaaatacaaaaattagccaggcatggtggcgcatgcctgtagtcccagctacttgggaggctgaggcagaagaatctttagaatttgggaggtggaggttgcagtgagccgagatcacaccgttgcactccagcctgggcaacagaatgagaatctgtctcaaaaaaaaaaaaaaaattaacgatttgcccactaccccccggcccccatgccccaactctggataactcctgtcgacatttgctatgtggctttccagatctttgctgtgtgctcatgtgcacaagtgtggcacacagaggatcttgcagggccacctgtgaaaacctttcaacaggatggaccgctatctggaaggctccacaattgatgtaagcagcccccagctgctggacattcagacaacctcccaagtcccgctccaatgcatcgtgctgccaggagcaccctcgtagatgctccctacgtatatattccactctcccctagaacagcttcctagaggtgaaaggatgtgaatatttctaagatgttgctgctgagagcctggtggccaatcgagcaggttctggaggcaggctgcttgctccaggctggggcaagtttctgaaccactctgcctttagtttcctcattgctccaatgggctaatagtaacacattcactagagagctgttctgaggattcagtgagttcacccttatcctgtggggcctgcacacaggcgacctgcataactgatggtcactgtcacccgggagcatgtgctaccagcatcccagtgtcctcaagaactccgaccgtggtgatattatcatctctctgacacccaatcagcagaaaggaaggcacagattttttgaatagatgaatgaatcaatgaagggatggtgtggtatcgagggctcggattttgcggcagccagacctgggctcagactctgcattgccttggacccactttatgattcaagcaaggtgcctaacgtctccagacctcaataaaatggaaattcatccacttgttcattcattcactcaactcatctgttttgagggctgctgcgtgccaggcactgcactaggcactgggctctatcagtgaaaaaaagaggagaaaagaggcccaggtctccatcctcctcatgcctgcattctaggggcgatgctgcacccctaactgtactgttaaggagacaatgtcgatccagtgcccggagtagcaggcactccggggatgggatggtgcgcggccatccttctgttctactttgaccaggtccactttgagtttgaggagaaagagaccaactaaagacctattttaacctcaaaactgctccagggggcttcattcctggtggcggtggtggctggcggggaggtgtagtgcacagacttactgatggccaaggtactgtcagaggggtcttctgttctgagaggccccagagcatggccctgactgtaggaggccctacagcggcccgtccacctccctgacaggggcttcgtgccttcttccctaggccagaaggaggggggctgcctgccccccccacagtgcccacaggagtgcgcctgcctggacaccgtggtccgatgcagcaacaagcacctgcgggccctgcccaagggcattcccaagaatgtcacagaactgtgagtagctcaaggccttgccccctttacgtgggtccacaggacggggacagtgggggcatttactgtagggctggtgcctagccatgggaggaggaggtgaccaagagcaggcattagctgactaagagctgaagttccggctttgcagaaacactggctccagaaagctttgagctttctctgattctcctctgcgnnnnn

SEQ ID NO: 1582 - protein, 513 aa, Homo sapiens [sequence omitted]

SEQ ID NO: 1583 - DNA, 877 bp, Homo sapiens
  source (1)..(877)
  CDS (201)..(677)
agaaaaaagtaatctctttggttgtgttgcccagttatggttttttggccattttgtagtaactgaatgtttccttctggctgccatggcatatgaccggtataggctatctataagcctttgttgtatacactcattatgtcccaacaggtctgtgtgcagctggtggtgggccttatgctgtgggccttataagcaccatgacccatatgactttcacctttcgcctactctactgtggtccaaacatcatcaatcacttcttctgtgaccttctccctgtcctctccctggcatatgcagatacccatattaataaatgtttactttttatcttggtgggtgccctgggagtactcagtggtgtgatcatcttggtctcctacatttacattgtcattgccatcctgagaattcgctctgctgacgcgagacgcaaagacttctccacttgctcttcacacctgatggctgtctccatcctgtatgggacactcttctttatctgtgtatgtccaagctctagtttctctatcaacatcaataaagtggtttccctgttctacacagcagtgatccccatgttgaatccccttatctacagcctgagaaacaaggaggtaaaagattcattcagcaagaagtttgaaagaaagaagtttcttataggtaggtgaactagaataccaattatactgcagattgagaagtgatacttaatagaggcaagacactggactgagtgatattttgtgtttactgctttgttttgagattctacaatctggtatatagtaagagttcaatgtatatttgttgattgaaaggtaaatatgtggccaatactaaattatttgtttaatggacattaaagttg

SEQ ID NO: 1584 - protein, 158 aa, Homo sapiens [sequence omitted]

SEQ ID NO: 1585 - DNA, 1006 bp, Homo sapiens
  source (1)..(1006)
  CDS (201)..(806)
ctctcatctgtgctgattcttggccctacacacccatgtatttcttcactggaaaccggttccttctggatctctggtattcctctgtccacatccccgatatcctgctgacttgcatttctgatgacaaaaccatctcctttcctggctgccttgctcagttcttctctgctgtgttggcctaaaatgagtgctatatgatggcttccatggcttatgaccgctacatggcaatctccaagcccctgctttattcccgggccacattcccagagttatgtgccagtcttgttgaggcttcacaccttggcggctttgtaaactcaaccatcatcaccagtgagacacctaccttgagcttctgtggcagcaatatcattgatgatttcttctgtgatctgcccccacttgtaaagttggtgtgtgatgtgaaggagcgctaccaggctgtgctgcattttatgcttgcctccaatcatcactcccactgcacttattcttgcgtccatctcttcatcattgcagccatctcgaagatccgttccattaagggccgcctccaggtcttctccacttgtgggtctcccctgacggctctcaccttgtactatggtgcaatcttctttatttactcccaaccaagaactagctatgccttaaaaatggataaattggggtcagtgttctatactgtggtgattccaatgctaaaccccttgatctatagcttaagaaataaggatgtcaaagatgccttgaagaaaatgttagatagacttcagtttcttaaagaaaaatattggtaaacaatttttaacagattatctccacgtcattgttttcagcttatattctcagaaataaataaaagataaaataattttataacttggaaacggaagtctgcatttttgtttttaagttggagctaaggtattggaatgtattttttaaataaatgaggctggggcatttgcaaaagctactatgcatggtagcttggaac

SEQ ID NO: 1586 - protein, 201 aa, Homo sapiens [sequence omitted]

SEQ ID NO: 1587 - DNA, 874 bp, Homo sapiens
  source (1)..(874)
  CDS (201)..(359)
  CDS (420)..(674)
tgaactgagtcttatttagaagttctccactctatatacttattatcagtttgcgataggctctataaagagttttttgcaggaaaaactcatctcagtgaggccattgtttgatgttccaggactaatttgacatgaagataaagaatcacactccagtaactgaggtccccctgatgggaatccctcatacaaaggggatggaaaatgtgctttttgtcttatttctggccttctacctcttcaccttgctggggaacctactcattcttctggccgtcctcactttctccaacctccacacccccatgtatttcttcctgggaaacctgtctgtgtttgacatatttttcccttcagtgagttcccccaaaatgatgctctgcttagtgggacaaagctgcaccatctctttccagggttgtgcctcccagctcttctttcaccatttcctgggttgcaccgagtgtttcctgtacactgtgatggcctatgaccgatttgcagccatctgccaccctttgccatacacggtcatcatgaaacgcagggtgtgtgccctcctgacgctaggcacctggacggggagctgtctgcatgcatctgtcctcacactcctcatctttaagttatcctactgtggccccaatgaagtggacaatttttttctgtgatattccggtggtgctgcccctggcctgcgcagacacctctctagcacggacagtgagtttcatcaacgtaggtgttgttgcgctcatgtgttttcttcttatcctcacctcttatgcttgcattgttatctctatactgaaaatcagttcctcagaaggtaggcgcagagccttctcaacctgcagtgcccatctgacgt

SEQ ID NO: 1588 - protein, 137 aa, Homo sapiens
MENVLFVLFLAFYLFTLLGNLLILLAVLTFSNLHTPMYFFLGNLSVFDIFFPSGCASQLFFHHFLGCTECFLYTVMAYDRFAAICHPLPYTVIMKRRVCALLTLGTWTGSCLHASVLTLLIFKLSYCGPNEVDNFFL

SEQ ID NO: 1589 - DNA, 4137 bp, Homo sapiens
  source (1)..(4137)
  CDS (201)..(617)
  CDS (3429)..(3662)
  CDS (3887)..(3937)
gaaagttctgagatgtatctgtgtatcccatatttcagggatcctggggtcttttactgctaacatgaggaacaggcagagaactgcaactacctagttgaaaaacttgaattttgtttcacattttatcgtgttagtgggataatgaatacctaactcaaattttcttcttctctttctacataaaatttccagagaaaatggtaaaaggaaatcattccacggtgactgaatttaatctcgctgggctaacagacaaaccagagctccagctgcctcttttcctcctcttcctgggaatctatgtggtcacagtggtgggcaacctgagcatgatcactctaatagggttcagttctcacctgcacacccccatgtaccatttcctcagcagtctgtccttcattgatctctgccagtcttctgtcattaccccaaaaatgctggtgaattttgtgtcagagaggaatattatctcctacccagcatgcatgactcagctctacttcttccttgttcttgtcatatctgaatgtcacatgttggctgcaatggcttatgaccactacattgccatatgtaacccactgctttaccatgtcgccatgtcttatcaggtctgctcctggatggtagttgaggtgtattttatgggctttattggtgctacgtgctcacacagtctgcatgctaagagtgcttttctgtaaggctgatgtaatcaaccattacttctgtgatcttttcccactactggagctctcccgctccagtatttctatcaatgaaatagtagtttgtgcttcagtgcatttaatatccttttccgcagcctcaccatccttagctcttacatcttcatcgttgccagcatcctctgcattcgctccactgagggcaggtccaaaaccttcagcacttgcagctcccacatctcggctgtttctgttttctttgggtctgcagcattcatgtacctgcagccatcatccgtcagctccatggaccaggggagtgtcttctgtgttttatgctactgttgtgcccatgctgaacccccaatctacagcctgaggaataaagatgtcaaagttgccttaattaagttccttgaaaaaagaagtttcctgtgaaagttgccttaaataagctccttgaaaaaagaagtttcctatgaaggggggtattttgctttagcaaaaacttttaatttctggaaaaggtttgataaggaaacaatctagagacagtaaggtatgtccacaagtaatgagatggctgctactacttggttatttggaagaaagatgccaaggataaggctgaattcataggatcagttacatgttgggagcatttatgggatgccacagagttcatccactcagagtaacacgtatcacttctaaacatttaaaaaaaattcataagcctccgtgtgtgattatactttataagtatggaatatggcactttttaaggcaagacttatttaccttactttaaggaataaatatatcttgtcagtccccatgatattctcaatacctgtgtacctgggtttttctactaagtgtataggtaaacacttctcaaagtgtgatctccaaaataaataattgcaaccattttgaataccagattcaatcactaattcttactaagcatgtagaaatatattagggaatatggaggcatatgatgggtaataaaacagtttctacccataaggagataatacttagtggaagagattgacagcaataaatattgctaaatacattttgtgtattttgacatatatttatggcaaggcccccactaccggcctgggtctcacaccttcaagggagactgtgcgtcaggcgtggaatagtggggggtgtgtgagtgagcatggggtctggccattgcttacatcagacacaccagctgctgttgcgggatgggcagctccaggtgctgacactctctgcaaggctgcagctggactaggtgcactgcaagcagcttcctcagctggcaccggggaatgtggtggcacctaaaagcttggagacaccaggaactgcagggccccaaagaagaagtcacagtgctgtctcggggagctcccaggtctgggatccccaaagggccgcagctcttctctcctgttcacccacaacatggtgagcaaggggcatgtttcagccctatttctgttgcagctcttttagccttgccattcagtgggtcccaggttctcgtcctgagaccagaaagaataaggcacgcagacaagtggaaggtaagcaagacacagaggagctttatcgcacaatagaacagctcagaggagacctgcaatgggcagctcctctccatagcagggtttcccaatgagtgtcaagctctcagcagagagggtagttcctctctgcaggtggtcacccagtcatctcttcagctctcagcagagagggtatctcctctctgctaggcaggtcatcccgtcaagtgcccagctcttagcagagagggtagtttctccctgcagctggtcgtcctatcatctccttggttctcagcagacaggaaaccctggggtggtcagctcctctctgcagctggtcatctcatcatctccctttgtctctccatcctctgctccagtttggccgactctggggtttttatgggcctcagaggggagaaaacgtgtactgattagtccatgagtcgccgtagggaaaagcaccataagttccccctctggtctgtgggactggtgaccccatccccaagcttcaggccctctccagcttggaggtagggcttcaccaaggacccgccaccttctgcccaggagcctgcctgagcatgtgcacccccggctgggctacaacaatgcccgggcttggtcctgactcagagctggcaccaacagcagagagaagccaggcagagggagcaggcaccctcatcccaccgagggccaggggagccttcccaggcccccaagtctgcagagatgcctgggcctgcagccacagcagacatggcaggatggctgcagctgcacccagggagttcccaccctgccagcttggaaggggccggactcctgcttatccttggccctgcagcatgcagccccagccacgcctcctttaagcctggggcaggggctccaagtccttgctgggcctgggctggcatccagggcaggagtgacatcaacataagttcttcccatggccctggtgctcaggggtggcccagggctcccacttggtcagcttgtgaccctgcctcaggggcacctctaggagccgatttcaggtcctgggactagaggtcaggagtgtcaggcttggtggttgtccagatgcagggcagacccctgagactcaacccccagtgcagagccttttctcagggcacaggaacctggcaccatcagcaaggtgggcatggtggccatgccactggccaggtccccaaagcagatgttacctctggcccatcctccacactccatctccaaccacagcaccatgctgggcccagctctgcctcggggccatctctgccaggcctccatgcccaaccgtgctgctcccccaccaggaaactcggcccagccccttcgtggtggtccccaccatgacaggctccaggtggcttccaggggcggggtccagagactgtctgcctcctccccagcccctccccacagcagtggcaggcaagagtggtgacatggggccagggtcaggagccacagagtctctaggcctaggggtgggtcttacctggtcatgcaaaggtgggggtggctcagttgcctgccttggagacatgggggacaggggtcccaccaccgttattgctgcccctgcagcctctcctgccacaaccgctggcctccccactgcagctggcaccatggtagcggcggttctggatggcctacttttgccatcaatataacgtttaacaaaacatgaaatataattttacttccaaaataatttagttttatataagtacaaaaataacttctgtaacacatatgtctttattgttcctcaatatcattcttattttttgatgaaaaaagtcatcaactctccttgttaggcttactaggaa

SEQ ID NO: 1590 - protein, 233 aa, Homo sapiens
MVKGNHSTVTEFNLAGLTDKPELQLPLFLLFLGIYVVTVVGNLSMITLIGFSSHLHTPMYHFLSSLSFIDLCQSSVITPKMLVNFVSERNIISYPACMTQLYFFLVLVISECHMLAAMAYDHYIAICNPLLYHVAMSYQEPGTISKVGMVAMPLARSPKQMLPLAHPPHSISNHSTMLGPALPRGHLCQASMPNRAAPPPGNSAQPLRGGPHHDRLQPLLPQPLASPLQLAPW

SEQ ID NO: 1591 - DNA, 985 bp, Homo sapiens
  source (1)..(985)
  CDS (201)..(547)
  CDS (719)..(785)
cactcccaagtactttttcctttctaaattgttcttcacagacctctgttattcttctgtgtttatactccaacttccgaggaagtgtatttcagaggagaatgttatctcctacatggtttgcatgatctagcttttctttttctttttctgtttttttttttttttaatttatttctgaatgttatatgctgacgtcaatggcctatgattgctgtgtggccatctgttacccacttctttatcacattgccatgtcccctaaagtgtgtttcagccttatgcttggttcctacttcctatccttttctggggccatggcccacactggatgcatgctgaggctgacctgtgatgcaaacaccatcaatcattacttccgtgacatcctccctgtgttccagctctcctgcaccagcacctacatcaatgaactggtggttttcattgtggcaggcatcaataccattgtgcccactgtcaccgtctttatctcttatggtgacatcctctccaggatcctccacatcagttccaatgagggaaggtccaaagccttcagcacttgcagttcccacataattgctgtttctctgttctttggattaagtgcatttatgtatctcaaaccatcttctgctgggtctatggatgagggaaaattctcttctgttttttatatgaatgggcttcccatgatgagctccttaatctacagcttaaggaggaaagatgttaaatttgccatgggaaaatctctgagtaggagaatgtttttgccataaacaacatttctctgtgtatgtagttacaggatggggattctctgtattttattataataattgaggaggaaataatttttcctatttgttatcatgatgatggttagttgagtatcatcctgtcaatttgtctccaattttttatagtagatttttcccctcaccctttgcacatctttccccttttcatcatttttcct

SEQ ID NO: 1592 - protein, 137 aa, Homo sapiens
MAYDCCVAICYPLLYHIAMSPKVCFSLMLGSYFLSFSGAMAHTGCMLRLTCDANTINHYFRDILPVFQLSCTSTYINELVVFIVAGINTIVPTVTVFISYGDILSRILHISSNEGSLRRKDVKFAMGKSLSRRMFLP

SEQ ID NO: 1593 - DNA, 1133 bp, Homo sapiens
  source (1)..(1133)
  CDS (201)..(739)
  CDS (828)..(933)
caagaactgggtttaaatctggagttgaggactcctcaacttttaataggttacttattctctgtgagcttgtttctctcctctgtaaaatggggacagtacttcccaagtagcagggtggtggtgagaatcagagatcatacagctgctgatcacatcttgtttgtgttcccaggggcaccagactagggtttctgagcatgaatccaaccatcccagccttggatacagaaattgcaccaattagtgatacagaggagacccatcctcatcgttgtggcatggaggtcctggtcctcatagtgctgatcctcatcattgacctggtcgggctggcaggaaatgcagtcatgctctggctcctgggcttctgcatgcacagtaacaccttctctctctacatcctcaacctggccagggctgacttcctctgcacctgcttccagattataacattcattaatttcttcagtgactttgttagttctctctccatccatttctctagatttgtcaccacggtgttgttctccgcctgtattacaggcctgagcatgctgagcaccatcagcaccgagcaccgcctgtccgtcctgtggcccatctggtactgctgccactgccccacacacctgtcagcggtcatgtgtgtcctgctctgggccctgtccctgttgcagagcatcctggagtggatgttctgtagcttcctgtttagtgatgttgactctgataattggtgtcaaatattagatttcctcactgctgtgtggctgatttttttaatctgtggttctctgtgggttcaccctggtcctgcttgtcaggatcatatgtggatcccagaagatgccgctgaccaggctgtatgtgaccatcctgctcacagggctggtcttcctcttctgcagcctgcccctcagcattcagtgattcctattatactggatcgagaaggatttggatgacttaccttgtgttgttcgtttaatttccattttcctgtctgctcttaacagcagtgccaaccccatcatttacttcttcatgggctcctttaggcagcttcaaaacaggaagaccctcaagctggttctccagagggctctgcaggacatgcttgaggtggatga

SEQ ID NO: 1594 - protein, 214 aa, Homo sapiens
MNPTIPALDTEIAPISDTEETHPHRCGMEVLVLIVLILIIDLVGLAGNAVMLWLLGFCMHSNTFSLYILNLARADFLCTCFQIITFINFFSDFVSSLSIHFSRFVTTVLFSACITGLSMLSTISTEHRLSVLWPIWYCCHCPTHLSAVMCVLLWALSLLQSILEWMFCSFLFSDVDSDNWIICGSQKMPLTRLYVTILLTGLVFLFCSLPLSIQ

SEQ ID NO: 1595 - DNA, 934 bp, Homo sapiens
  source (1)..(934)
  CDS (201)..(734)
gtagagatctgctacaccaccgttgtggtgcccttgatgctttccaacatttttggggcccagaagcccattccattggctggatgtggggcccaaatgttcttctttctcacacttggtggtgctgactgtttcctcttggcgatcgtggcctatgaccgctatgtggccatctgccaccctttgcactacccctcatcatgacctgcaatctgtgcgtgcagatgctgggcggcgctgtgggcctggccctcttcctctccctgcagctcaccgccttaatcttcaccttgcccttctgcggctaccgccaggaaattaaccacttcctctgcgatgtacctcccgtcctgcgcctggcctgcgctgccatccgtgttcaccaggctgtcctctatgtcgtgagcatcctcgtgctgaccgtccccttcttgctcatctgcgtctcctacgtgttcatcacctgtgccatcctgagcatccgttctgctgagggccgccaccaggccttctccacctgctcctcccacctcaccgtggtcctgctgcagtatggctgctgtgccttggcatacttgcatccccagtccagctcctctgcagatgaggatcgccagtttgcccttgtttacacctttatcacaccattactcaaccctttgatttacacccttaggaacaaggatgtcaaaggtgcccttgaaaaaagtgctcagtaccaaagggacacctgagtccttctgaaggctccgagagactgaaaggggcacctgggcatgggacaatggtaaaactcttccatccaaatgctagatttgcctttattgtatcagaatttggactttcattaattctctgtgcctgatgtacttagttgctacagatcattctcatttttaaaaaaggtctcccaaaaccttaaaactccaaaaag

SEQ ID NO: 1596 - protein, 177 aa, Homo sapiens [sequence omitted]

SEQ ID NO: 1597 - DNA, 16256 bp, Homo sapiens
  source (1)..(16256)
  CDS (201)..(306)
  CDS (760)..(918)
  CDS (1009)..(1194)
  CDS (1602)..(1618)
  CDS (1692)..(1764)
  CDS (1837)..(2040)
  CDS (3954)..(4181)
  CDS (4272)..(4457)
  CDS (4863)..(4879)
  CDS (4953)..(5072)
  CDS (5184)..(5294)
  CDS (6999)..(7197)
  CDS (7651)..(7809)
  CDS (7900)..(8085)
  CDS (8493)..(8586)
  CDS (8742)..(8932)
  CDS (14104)..(14223)
  CDS (14326)..(14487)
  CDS (14579)..(14707)
  CDS (15950)..(16056)
  modified_base (3847)..(3946): a, t, c, g, unknown or other
  modified_base (6897)..(6996): a, t, c, g, unknown or other
  modified_base (10323)..(10422): a, t, c, g, unknown or other
aggtatggccagctaggagattctgtgggctggaggggcaggccagccatcactgggggtggggagggtcccaaggtgggcgagagaggaggtggggctggggcaagaccctgaggttcttggagcagcctgctgtcaccccatggccccagaccagaggggccaaacttccacttaccacagacatcaacgagtgcgcaatgccgggcgtgtgtcgccatggtgactgcctcaacaaccctggctcctatcgctgtgtctgcccacctggccatagtttaggcccctcccgtacacagtgcattggtgagacctggggctcaggttcctgggaggtcacaaggcatgggtgggagcaaggatcagagatcgcaagagatcagagtggggttaagggttgactgcaggaggaacaaggcccagagccaataggatcagggatcagcagggtccggggtcacatgagatctgccattagcagtcacatggggtcagggattacatagagtcagagtcatgcagaacataggcttgatgagtaggagtggtgaagtccaggatagctagaatcgggagtcaatggggtcagtggtcacataagtttcaggggtcacatgagttcagggtcatatggggtcagagaccacatgggggatcaagggttgtctgggccggagaggcaaggtctgcagcagctgggcagagggacgtgggcaatgtgcaggctcagatgcccatgccccccactggcccctgcagcagacaaaccggaggagaagagcctgtgtttccgcctggtgagccctgagcaccagtgccagcacccactgaccacccgcctgacccgccagctctgctgctgcagtgtcggcaaggcctggggcgcgcggtgtcagcgctgcccaacagatggcaccggtgagtcagggttacccggggataggggttcataggtccatgcacctgtccaggaaatgctcacttttgtgtctgctgtcttgactgcagctgcgttcaaggagatctgcccagctgggaagggataccacattctcacctcccaccagacgctcaccattcagggcgagagtgacttttcccttttcctgcaccctgacgggccacccaagccccagcagcttccggagagccctagccaggctccaccacctgaggacacagaggaagagagaggtctagcctgaccccttctgatccctgacccatgccaagcccctaggcctgaccccttgacccgtgatccacagatctgacctcacagtctaacccccaattccttatccctgacccatccactgacctcccacctgaccctctgacccctgacccagatatttgaccctgagctataacctcctaagccttctacagcctgacctgtaacccaaggccattcaacctgatcatgtgactactatgcaaacacaccctaaccccagaatctaacccctgacccttgacctggagacatgattgttgaactcccagagaccctaactgcaaatactcagctgctgatcccagatctgactcccttctcccgccccaacacttcatggccccatcttcttcccttttaggggtgaccacggactcagtgagtatgagaacccagatgggaggggtgggcaggcgagggacaggagggctcatgctgctgtcacccgcagccggtgagtgaggagaggtcagtgcagcagagccacccaactgccaccacgactcctgcccggccctaccccggtgagctgggcactgtagggatgagtcctcaagggctaaatcactgggtgggcggggagttcacagtttaagtactcggggacagtcaagctggggtggggcgccgggccaagactgaagtggaaagggaggcttcagtcaatatcgtctctgaccagagtgcactgccgcccgcagagctgatctcccgtccctcgcccccgaccatgcgctggttcctgccggacttgcctccttcccgcagcgccgtagagatcgctcccactcaggtcacaggtaaggcccgcccagcaaagccacccctgcctaggccacgcccccactttagttttctctcctccctcccgcccccaggcattccctagcgctaataggctagcgtgtatccagggctgggcactggggaagcctggtgagcaccagagatcccactgccctaaacgatccaggtagcatggtggttagcccattctgagggatttcattcattcaacaaatacttattgagtgttacaggtcttttagattgtctagcaggtttcccagtttttttttgttttttgttttttgttttttttgagacggagtcttgctctgtcgccaggcgggagtgcagtggcgcaatctcggctcaccgcagcctccgcctcccgggttcaagcgattctcctgcctcagcctcccgagtagctgggattacaggcatgcgccaccacgtccagctaatttttttttttttagtagagacggggtttcaccatgttggccagggtggtctcgatctcttgacctcgtgatgcgcccgtgtcggccttccaaagtgctgggattacaggcatgaaccactgttcccagcccataaccatctttcaaaatctgttcagaaagccttctatcattgccaccctactatattatacaaaaccctcagaactccttccttctactctgattttatcattatcattttaatttttaatttttagaaattgcaacggagtctcgctctgtcgcccaggctagattgcagtggcgcaatctcggctcactgcaagctctgcctcccgggttcacgccactctcctgcctctgcctcccgagtagctgggactacaggcgcctgccaccacgcccagctaattttttgtatttatttttagtagagacagggtttcaccgtgttggccaggatggtctcaatctcctgacctcgtgatccgcccgcctcggcctcccaaagtgctgggattataggcgtgagccattgtacccaggcccataaccatctttcaaaatctgtacagaaagccttctatcaatgccacccaaattataatcacaaccctcagaagtccttccttctactctgattttacacgtagaactaaaatattaaaatatacggagattgagacggagtctcgctctgtcgcccaggctggagtgcagtggcgcgatctcggctcactgcaagctccacctcccgggttcacgccattctcctgcctcagcctcctgagtagctgggactacaggcgcccaccaccacacccggctaatttttttgtgtatttttagtagacatggggtttcaccatgttaatcaggatggtcttgatctcctgaccttgtgatccgcccgacttggcctcccaaagtgctgggattacaggtgtgagccaccacgcctggccctgatttagtttttcatagcatttataagacataggagattctgcttattgatcggcttgttgcctgtctgctctgcgaggacaggaaatttttgtctgtttttgttcatgcaatatccctagcacctcaacagtgcctggcacatagtaggtgctcaagaaatatttgggttcctttctttctttttatttgtttagtttgttttttgagacagggtctcaccttgtgacctaggctggagtcagtggcaggatcatggctcactacagccttgacctcctgggctcaagtgatcttccagccttggcctcccaaagtgccaggattacaggtgtgcgccaccatgctctttttttttttttttttttccccggccggggaattttcnnnnnnnnnnnnnnnnnnnnnnnnnnnnnnnnnnnnnnnnnnnnnnnnnnnnnnnnnnnnnnnnnnnnnnnnnnnnnnnnnnnnnnnnnnnnnnnnnnnntctgcagcagctgggcagagggacgtgggcaatgtgcaggctcagatgcccatgccccccacctgggcccctgcagcagacaaaccggaggagaagagcctgtgtttccgcctggtgagccctgagcaccagtgccagcacccactgaccacccgcctgacccgccagctctgctgctgcagtgtcggcaaggcctggggcgcgcggtgtcagcgctgcccaacagatggcaccggtgagtcagggttacccggggataggggttcataggtccatgcacctgtccaggaaatgctcacttttgtgtctgctgtcttgactgcagctgcgttcaaggagatctgcccagctgggaagggataccacattctcacctcccaccagacgctcaccattcagggcgagagtgacttttcccttttcctgcaccctgacgggccacccaagccccagcagcttccggagagccctagccaggctccaccacctgaggacacagaggaagagagaggtctagcctgaccccttctgatccctgacccatgccaagcccctaggcctgaccccttgacccgtgatccacagatctgacctcacagtctaacccccaattccttatcctgacccatccactgacctcccacctgaccctctgaccctgacccagatatttgaccctgagctataacctcctaagccttctacagcctgacctgtaacccaaggccattcaacctgatcatgtgactactatgcaaacacaccctaaccccagaatctaacccctgacccttgacctggagacatgattgttgaactcccagagaccctaactgcaaatactcagctgctgatcccagatctgactcccttctcccgccccaacacttcatggccccatcttcttcccttttaggggtgaccacggactcagtgagtatgagaacccagatgggaggggtgggcaggcgagggacaggagggctcatgctgctgtcacccgcagccggtgagtgaggagaggtcagtgcagcagagccacccaactgccaccacgactcctgcccggccctaccccggtgagctgggcactgtagggatgagtcctcaagggctaaatcactgggtgggcggggagttcacagtttaagtactcggggatagtcaagctggggtggggcgccgggccaagactgaagtggaaagggaggcttcagtcaatatcgtctctgaccagagtgcactgccgcccgcagagctgatctcccgtccctcgcccccgaccatgcgctggttcctgccggacttgcctccttcccgcagcgccgtagagatcgctcccactcaggtcacaggtaaggcccgcccagcaaagccacccctgcctaggccacgcccccactttagttttctctcctccctcccgcccccaggcattccctagcgctaataggctagcgtgtatccagggctgggcactggggaagcctggtgagcaccagagatcccactgccctaaacgatccaggtagcatggtggttagcccattctgagggatttcattcattcaacaaatacttattagtgttacaggtcttttagaatttgtctagcaggtttcccagtttttttttgttttttgttttttgttttttttgagacggagtcttgctctgtcgccaggcgggagtgcagtggcgcaatctcggctcaccgcagcctccgcctcccgggttcaagcgattctcctgcctcagcctcccgagtagctgggattacaggcatgcgccaccacgtccagctaattttttttttttagtagagacggggtttcaccatgttggccagggtggtctcgatctcttgacctcgtgatgcgcccgtgtcggccttccaaagtgctgggattacaggcatgaaccactgttcccagcccataaccatctttcaaaatctgttcagaaagccttctatcattgccaccctacttattatcacaaccctcagaactccttccttctactctgatttttttatttttatttttattttttattttttgagattgagacggagtctcgctctgtcgcccaggctggagtgcagtggcgcgatctcggctcactgcaagctccacctcccgggttcacgccattctcctgcctcagcctcctgagtagctgggactacaggcgcccaccaccacacccggctaatttttttgtgtatttttagtagacatggggtttcaccatgttaatcaggatggtcttgatctcctgaccttgtgatccgcccgacttggcctcccaaagtgctgggattacaggtgtgagccaccacgcctggccctgatttagtttttcatagcatttataagacataggagattctgcttatattagatcgggctattttcctcgttgtctttcgcgaggacacaggggaatcttcttctccttgtcgttggtctcatggcaataattcccttacacgacttccacaggtgcctgggcacatatgtaaggggcttccaagaatatattggggttcccttcttcttctcgtttatatggtataagtgtagttttatgtagaacaggggatctatcaccctgtgaacctaaggcccggggtcatggggcagggatcatgggttcactacagacccgtagctctacctcggggatcaaaagatttcttccaacccttggctccccaaagtcccgggataaaagggtgggcccccaaggtttttttttttttttttttttttcccggcctggggagttttcctgtgaaaactgggaaactgtggcagggtgcagtggctcacggctgtaatctcagcactttgggaggctgaggtgggtggatcacgaggtcaagagattgagaccatcctggccaacatagtgaaacccagtctctactaaaaatacaaaaaaannnnnnnnnnnnnnnnnnnnnnnnnnnnnnnnnnnnnnnnnnnnnnnnnnnnnnnnnnnnnnnnnnnnnnnnnnnnnnnnnnnnnnnnnnnnnnnnnnnnagaccctgaggttcttggagcagcctgctgtcaccccatggccccagaccagaggggccaaacttccacttaccacagacatcaacgagtgcgcaatgccgggcgtgtgtcgccatggtgactgcctcaacaaccctggctcctatcgctgtgtctgcccacctggccatagtttaggcccctcccgtacacagtgcattggtgagacctggggctcaggttcctgggaggtcacaaggcatgggtgggagcaaggatcagagatcgcaagagatcagagtggggttaagggttgactgcaggaggaacaaggcccagagccaataggatcagggatcagcagggtccggggtcacatgagatctgccattagcagtcacatggggtcagggattacatagagtcagagtcatgcagaacataggcttgatgagtaggagtggtgaagtccaggatagctagaatcgggagtcaatggggtcagtggtcacataagtttcaggggtcacatgagttcagggtcatatggggtcagagaccacatgggggatcaagggttgtctgggccggagaggcaaggtctgcagcagctgggcagagggacgtgggcaatgtgcaggctcagatgcccatgccccccactggcccctgcagcagacaaaccggaggagaagagcctgtgtttccgcctggtgagccctgagcaccagtgccagcacccactgaccacccgcctgacccgccagctctgctgctgcagtgtcggcaaggcctggggcgcgcggtgtcagcgctgcccaacagatggcaccggtgagtcagggttacccggggataggggttcataggtccatgcacctgtccaggaaatgctcacttttgtgtctgctgtcttgactgcagctgcgttcaaggagatctgcccagctgggaagggataccacattctcacctcgcaccagacgctcaccatgcagggcgagagtgacttttccctgctcctgcagcctgacgggccacccaagccccagcagcttccggagagccctagccaggctccaccacctgaggacacagaggaagagagaggtctagcctgaccccttctgatccctgacccatgccaagcccctaggcctgaccccttgacccgtgatccacagatctgacctcacagtctaacccccaattccttatccctgacccatccactgacctcccacctgaccctctgacccctgacccagatatttgatcctgagctataacctcctaagccttctacagcctgacctgtaacccaaggccattcaacctgatcatgtgactactatgcaaacacaccctaaccccagaatctaacccctgacccttgacctggagacatgattgttgaactcccagagaccctaactgcaaatactcagctgctgatcccagatctgactcccttctcccgccccaacacttcatggccccatcttcttcccttttaggggtgaccacggactcagtgagtatgagaacccagatgggaggggtgggcaggcgagggacaggaggggctcatgctgctgtcacccgcagccggtgagtgaggagaggtcagtgcagcagagccacccaactgccaccacgactcctgcccggccctaccccggtgagctgggcactgtagggatgagtcctcaagggctaaatcactgggtgggcggggagttcacagtttaagtactcggggatagtcaagctggggtggggcgccgggccaagactgaagtggaaagggaggcttcagtcaatatcgtctctgaccagagtgcactgccgcccgcagagctgatctcccgtccctcgcccccgaccatgcgctggttcctgccggacttgcctccttcccgcagcgccgtagagatcgctcccactcaggtcacaggtaaggcccgcccagcaaagccacccctgcctaggccacgcccccactttagttttctctcctccctcccgcccccaggcattccctagcgctaataggctagcgtgtatccagggctgggcactggggaagcctggtgagcaccagagatcccactgccctaaacgatccaggtagcatggtggttagcccattctgagggatttcattcattcaacaaatacttattagtgttacaggtcttttagaatttgtctagcaggtttcccagtttttttttgttttttgttttttgttttttttgagacggagtcttgctctgtcgccaggcgggagtgcagtggcgcaatctcggctcaccgcagcctccgcctcccgggttcaagcgattctcctgcctcagcctcccgagtagctgggattacaggcatgcgccaccacgtccagctaattttttttttttagtagagacggggtttcaccatgttggccagggtggtctcgatctcttgacctcgtgatgcgcccgtgtcggccttccaaagtgctgggattacaggcatgaaccactgttcccagcccataaccatctttcaaaatctgttcagaaagccttctatcattgccaccctacttattatcacaaccctcagaactccttccttctactctgatttttttatttttatttttattttttattttttgagattgagacggagtctcgctctgtcgcccaggctggagtgcagtggcgcgatctcggctcactgcaagctccacctcccgggttcacgccattctcctgcctcagcctcctgagtagctgggactacaggcgcccaccaccacacccggctaatttttttgtgtatttttagtagacatggggtttcaccatgttaatcaggatggtcttgatctcctgaccttgtgatccgcccgacttggcctcccaaagtgctgggattacaggtgtgagccaccacgcctggccctgatttagtttttcatagcatttataagacataggagattctgcttattgatcggcttgttgcctgtctgctctgcgaggacaggaaatttttgtctgtttttgttcatgcaatatccctagcacctcaacagtgcctggcacatagtaggtgctcaagaaatatttgggttcctttctttctttttatttgtttagtttgttttttgagacagggtctcaccttgtgacctaggctggagtcagtggcaggatcatggctcactacagccttgacctcctgggctcaagtgatcttccagccttggcctcccaaagtgccaggattacaggtgtgcgccaccatgctcttttttttttttttttttttcccgggccgggggattttcccggnnnnnnnnnnnnnnnnnnnnnnnnnnnnnnnnnnnnnnnnnnnnnnnnnnnnnnnnnnnnnnnnnnnnnnnnnnnnnnnnnnnnnnnnnnnnnnnnnnnnttttttttttgagacagagtttcactcttgttgcccaggctggagtgcaatggcatgatcttggctcactgcaacctccgcctcccgggttcaagtgattctcctgcctcagcctcccgagttgctgggattacaggcatgcgctaccacgcccggctaattttgtattgttagtaaagacagggtttctccatgttggtcaggctggtctccaactcctgacctcaagtgacctgcccgcctcggcctcccaaagtgttggaattacaggcgtgagccaccatgcccagccagtaattttttaaaaaatgggagtcttgctctgtcatccaggctggattgcagtggtggtgtgatcatagcccattgcaggctcgaactcctaggctcaagtgattctccctcctcaggtcccccagtagctgggactacaggcacacaccaccatgctcagctaattttttattttttagtagagaagaggtctcactatgttgcccaggctcatcttgtactcctgggctctagcactcctcttgcctcagcttcccaaagtgttggaattacaggcatgagccattgtgcccagcctagctggtaatttttttttttgagatggagtcttgctcattcgccaggctggagtgcagtggcgcgatctcggctcactgcaacctctgcctcccaggttcaagcaattcccctgcctcagcctgctgagtagctgggactacaggcacgcgccaccacaccctgctaatttttttgtattttagtagagacggggtttcaccatgttggccaggatggtctcgatctcctgtcctgaccttgtcatctgcctgccttggcctcccaaagtgctggaattacaggcgtgagctaccgcacctggctgtaattttttttaaatacgaaatgcatcaggagttcatactaatgtttcatattcaaatttagaattatagggtttttaaattttatttatttattattattatttttttttgagatggagtcttgctctgttgcccaggctcactgtaacctctgccttgtgggttcaagcagttctctgcctcagcctcctgagtagctggaattacaggcacctgccacaatgcctggctaatttttatatttttagtagagacggggtttcaccatcttggccaggctggttttacactcctgacctcgtgatccacgtgcctcagcctcccaaagtgcagggattacgggtgtgagccaccgcgcccagctagaattacagggttttaacttaaccttagtcactttacatgtttctcccatgtcaaaaatcttgattttcttttgagggaatagaaaagtccactcttaaattaagtccatatggagtctcaagggacccaaataaccaaaacaatcttaaaaaaaagaaacaaaggtggaggactcatacttcctgatttcaaaacttactacaaagctacagtaatcaaaacagtgtgattctagcataaagacagacatataggccgggcgtggtggctcacgtctgtaatcccagcactttgggaggctgaggcaggagttcaagaccagcctaactaacatggagaaaccccgtctctactaaaaatacaaaattagccgggcatggtggcccatgcctgaaattacagctacttgggaggctgaggcaggagaatcgcttgaacccgggaggtggagattgcagtgagccgagattgagccattacactccagcctgagcaacaagagtgaaactctgtctccaaaaaaaataaagacagacatatgaccaattgtacagaatagggagcccataaaaataaaacctttccatatacggctgaatgattttcaacaagggcgccaagaccattcactgggggaaaggacaatcttttcaacaaatggttttgggaaaattgggtatccacatgcaaaagaatgaagttgacccttacctaacactatatacaaaaattaactcaaaatggttcaaatggctggacctggtgactcacatcagtaattcccgcactttgggaagccaaggcgggaagatcacttgagcccaggagtttgaaaccagcctggtcaacatagtgagatcctatctctacaaaagaaaaaaaaaaaaaaaaaaaaaattagctgggcgtgtggtgcatgcctgtagtcccagctactcaggagaatcacttgaacctgggagatagaggttgcagtgagccaagatcgtgccactgcactccggcctggggacagagtgagactccatctcaaaaaaaaagaaagatggttagaaatgccagagacatgaggaagggaggggcattcaggttgggaaaaggatatcacaagggaagttaagttgggcaaaggcatggaagcatgaaacactggtggaggagggagaacccacacacaggccagtgtctctgaaccaggggaagtccagtgcactgagccttgtcaaggaggcttgagtttaatgccagaggctatgggcagtgtctgcaggattttgagcatcataattgctagctcagactgagcagtccctctgtgccaggtactgtctgaagagttttacgttctaaataccatttaaccttctcatactctgcaaagtgagcgttgttagcctcgttttccagatgagaaagctgagcctcaaagaggttcagtaacctgccccaggtcacacagctgagccgtgttcaagcccatgcctgtgtgggcttcaaaagcacaagggaactgccaacccagctgaaaccctgatcctccatgagctcctggggttagggctcaggtgggagatggctgttcttgggggctttgggaatgtggacaaggcccctcaaaggaggggctgttaaggaagcctaaggagaggtactccaggcaaagagaacagcctgcaaagcccactggccaggtgagtttggggcagagcagagttcactgttatggcccaggctgcatggcaggagtgagggggaaggggtgtgggaaatgaaactggtgagcagtgaggatccaaaggaggggagaggctggaggcagggagtcctgggcttggtgacaaagagagtgaggggggtggttcctggatctgactgcctgtgcacagctttggcactagttaggattcccaggaaaccagctcctgctagtcttgggagggggtaatcaacccttctggaatagggggtcgggtccctggggcaagggcttatggagtcactgggctagaggacactggtgtgaccgaggctatagagtttaaggtattgaggcgactggggagaaaggagttttagtcccttgggtgggagtactgggacgactgaggggccctgaggggatgtggtttggtttgaggtgagtggggtcagggtcttggagtgaaccgggaatggaagtatccgggcctgggtgtggggtgatacggctgtcaggggcctggagtcctagtttggagctttctggggtcttgatattggggttatctaaaagagagaaataggacatcctggagttggagtatgggcgtacaggaacctgaggtcatggtgtgactggggtgttgaggtctgccctggggatatggcagaaggtgagcgctccctgctctgccgcttgacctggccatgcccgcagagactgatgagtgccgactgaaccagaacatctgtggccacggagagtgcgtgccgggcccccctgactactcctgccactgcaaccccggaccggtcacatccccagcaccgctactgcgtgggtgagcgcagggcaggcggcgggcatgcaggtgggtggggggggaccccagataacgacgcttcctttgacttttcttggcctacccgttcttctcagatgtgaacgagtgcgaggcagagccctgtggcccggggaggggcatctgcatgaacaccggcggctcctacaattgccactgcaaccgcggctaccgcctgcacgtgggcgccggggggcgctcgtgcgtgggtgagcgccgccagggcggaggcggcctgggtgggacgggctctcctccagaccgccgtgtaatccctccccttgcccgccgcctcctacacccccttcgtggccccttcctcccgcacagacctgaacgaatgcgccaagccccacctgtgcggcgacggcggcttctgcatcaactttcccggtcactacaagtgcaactgctaccccggctaccggctcaaagcctcccggcctcctgtgtgcgaaggtgaggggaccccattcagaccaaagaaggagctccttagctgtctctccacctggggtggggctggggtgcctgcatttttttttttttcccccgagacggagtctcactctgtcgcccaggctggagtgcggtggtgagatctcagctcactgcaaccttcacctcccgggttcaagcgattctcctgcctcagcctcccgagtagctgggattacaggcattcaccaccatacccagctaatttttgtatttttagtatagacggggattcgccatgttggccaggctggtcttgaactcctgacctcaggtaatctgctggccttggcctcccaaagtgctgggattacaggtatgagccaccgggcccgggccaatccaccagtctttcacggtaaaaagaaaaaagaaaccagccaggcatggtggcacattcctgtagtctgaactggggcgtgaaggtcacctgaacctggccaggcacagtggctcacacctgtaatcccagcactttgggaagccaaagtgggcagaacacatgaggtcaggagttcaagagcaaccaacatggagaaaccccaccgtctacttaataaaaaaaaaaaaaatatagccaggcatggtggcatgtgcctgtaatcccagctactcgggaagctgaggcaggaaaatcactgtgaacctgggaggcgaggttgcagtgagtcgaaatcgtgcccctgccccccccagtaggggctacaaaagggattccccgggtaaaaaaaaaaaaaaaaaaaaaagaatgttttcagattgttcgctgctatagtgatttttgtatgttgatcttgcatcctacaaccttgctgaactcattaattttaatagctttcaaagactccataggattttctgtatacaagattatgtcatctgtgaagttttacttaggtgagccaccacgtctggctccatttttaataacataaagaaagaataaattactaggaataaatctaagaaaagaagttcaggccaggtgcagcggcttatgcctataaccctggcactttggagggccaaggcaggagaatggcttgagcccaggagttcaggaccagcctgggcaatacagtgagatcctatctctaaaaaaaaaaaaaaaaaaaaaaaattaaaaatcagctagttgtggtggtgcatgcctaaagtcccatttccttgggaggccgaggcaggtgtattgctcgagtccagtagttcaggctgcagtgagctatgattacggtactgcattccagcctgggcaacagagcaagccattccagatcctgtctcaaaacaaaacaaaactggccgggtgaggtggctcacacctgtaatcccagcactttgggaggctgaggcaggcagatcacatgaggtcaggagtttgagaccagcctggccaacacggcgaaacctcgtctctactaataatacaaaaatgagctgtgcgtggtggcaaggtgcctgtaatcccagctactcaggaggctgaggcaggagaatcgcttgaacctgg

SEQ ID NO: 1598 - protein, 917 aa, Homo sapiens [sequence omitted]

SEQ ID NO: 1599 - DNA, 1370 bp, Homo sapiens
  source (1)..(1370)
  CDS (201)..(619)
  CDS (996)..(1170)
acaagaactggatttcaaactggatttgaggacccccaccttttgataggtgacttattctctgcgagtctctgatctctcctctttaaatgaggacagtaaatcccacatggcagggtggtggggagaatcagagatcaaacagctggtgatcacatctggtttctgtttccagggtcatcagactggggtttctgagcatggattcaaccatcccagtcttgggtacagaactgacaccaatcaacggacgtgaggagactccttgctacaagcagaccctgagcttcacggggctgacgtgcatcgtttcccttgtcgcgctgacaggaaacgcggttgtgctctggctcctgggctgccgcatgcgcaggaacgctgtctccatctacatcctcaacctggtcgcggccgacttcctcttccttagcggccacattatatgttcgccgttacgcctcatcaatatccgccatcccatctccaaaatcctcagtcctgtgatgacctttccctactttataggcctaagcatgctgagcgccatcagcaccgagcgctgcctgtccatcctgtggcccatctggtaccactccgccgccccagatacctgtcatcggtcatgtgtgtcctgctctggtgcctgtccctgctgcggaggatcatggagtggatgatctgtgactacctgttgagtggtgctgctaatgctgggtggtgtaagacagcagacattacaacagcgtggctggttgttttatgaggggttctgcgcggggggtgcagcgtcgtcctgctcatgaggatgcgcggatgatcgcggaagatgccgctgaggatgttcgagcgtgatcatcctcctcatggtggtggtcctcctccgcggtgtcctgcctttggattcagtgggccctgttttccaggatccacctggagtggaaagtcttattttgtcatgtgcatctagtttccattttcctgtccgctcttaacagcagtgccaaccccatcatttacttcttcgtgggctcctttaggcagcgtcaaaataggcagaacctgaagctggttctccagagggctctgcaggacacgcctgaggtggatgaaggtggagggtggcttcctcaggaaaccctggagctgtcgggaagcagattggagcagtgaggaagaacctctgccctgtcagacaggactttgagagcaatgctgccctgccacccttgacaattatatgcatttttcttagccttctgcctcagaaatgtctcagtggtccctcaaggtcttcgaatagatgtttatctaacctgacagttgcagttttcacccatggaaagcattagtctgacagtacaatgtttgga

SEQ ID NO: 1600 - protein, 197 aa, Homo sapiens
MDSTIPVLGTELTPINGREETPCYKQTLSFTGLTCIVSLVALTGNAVVLWLLGCRMRRNAVSIYILNLVAADFLFLSGHIICSPLRLINIRHPISKILSPVMTFPYFIGLSMLSAISTERCLSILWPIWYHSAAPDTCHRSANPIIYFFVGSFRQRQNRQNLKLVLQRALQDTPEVDEGGGWLPQETLELSGSRLEQ

SEQ ID NO: 1601 - DNA, 2894 bp, Homo sapiens
  source (1)..(2894)
  CDS (201)..(324)
  CDS (2261)..(2694)
acaagaagcagccgcaagtactgatggagaagctacagcaggttacccagaagatctagctaagatcattgatgaaggtggctacactaacaacagattttcaatgtagatgaaactgccttctattgaaagaagatgccgggcaggcacggtggctcatgcctgtagcggggtgtactccccctgcgatattgggagtaatgtcgtcctccccaaacctggatgttagcgacgagatcacagaaagggtgtacacaccctgcgacattggaagtaatatgatcctctccccacctggatactgggaaagataccacagcacgggtatacgtttcctacgctgttgggagtaatatcattctcttcctttctggatattagggagactatcccaggggtgctgtacaattacctcgacattgggagaaacatcatcctctattttcctggatattgggcacaaaaacacaaaagggtgtacaacccctgcgatattgggagtaatagcatactctccttccctggatgttagaaaacaatatcataagggctgaacaccccccgcgataatgggagtcatgtttactctttcacaggccatttggaacaatatcacaggggtgtttacaaacaggggtggtgtacacctcctgtgatattgggagtaacatcattctctccacctccggatattaagaacaatatcggggcgggaggtggtacacccccagtgatattgtgaataatgtcatcctctccttccctggatattaggaacaatatcacaggggggtgtacaccttctgtgatatgggaagcaatatcatcctctcccccgctggatattagaaaaaaatatcactcacggtgtacacccactgtgatatgaggagtaatatcttcctagggtattacgaataatttcacagtctgtacacacatggtgtacactcactgtgatattaggagtaatatctacctagtagataacaaataacatcgcagtgtgtacacccactttgatattacctgtaatatttttctaagttgttacaaataagatcacagagtgtacaaacatggtgtacactcactgtgatatcaggagtcgtatctctgtaatatattatgaataatatcacagggtgtacgcccactgtattattaggagtaatatctctgtaggatattacaattaagatcacagggtgtagagcgaccgtgatattaggagcaatatctttctaggatattacaaataatatcacagggtgtacgcccactctgctgtcaggagcaatatctccctaggatatcaaaaatcctatcacagggtgtccaatgtctgccttccaggttctaagggattctcctgcttcagcctcccgagtagctagggttagccgccaccatgcccggctaatgtttttttattttcactggagacggggtttcaccacgttggccaggctgttctggaactcctgacctcaggtgatccatcagcctcggccgcccaaagtgctgggattacaggtgtgagccatggtgctgggccaagagttatagattcaattcatttggaaacacagctcccatttttgagtgtgcatgtacttttatgaagaaatgatgtcagaaaaccgaaggatgataataaatatgaaaaataacaggcatgtgaaaaggtcttccgattgagaactataaggtttgatttcgttttcagataatggggtcctagctcttgtgttgtccttttacatgttctacatcaatggaagttgtagcaccgtgtcagaataaagtagagtgtatttcacggcttcttaatttctttcagttagactgagatctttttcttaaagagagaaggacattgtcattgcattgtattttttctgaaaagagtaggccgtattttactgagatcacggatttgttatatatgacgttttggtcttctaatattcttcagtggattttctctaaagtagtatgtacagaaagccttgtatagcaaaaaagtaaatcacgtaataattctgagatttttggaattgtcataactgagaaacattgctggcggtgtatggtccacaagtgtgaagatgttccttgtgaattgcttgcatccagcattaagggctggtttttatcttttatttttccaatcctctttccttctcaaggtgtccaagacacacagagccatggaatctcacagatgtctgagaattcctcctcctgggactctcagaggatccagaactgcagccggtcctcgctttgctctccctgtccctgtccatgtgtctggtcatggtgctgaggaacctgctcagcatcctggctgtcagctctgtctctcccctccacacccccgtgtacttcttcctctctaaactgtgctgggctgacatcggtttcaccttggccacggttcccaagatggttgtggacatgcagtcgcatagcagagtcatctctcatgcgggctgtctgacgcagatgtctttcttcatcctttttgcatgtatagaaggcatgctcctgacagtgatggcctatgactgctttgtagccatctgtcgccctctgcactacccagtcatcgtgaatcctcacctctgtgtctccttccttttggtgtcctttttccttagcatgttggattcccagctgcacagttgaattgtgttacaattcacaatcatcaagaatgtggaaatctctaattttgtctgtgacccctctcaacttctcaaacttgcctgttctgacagcgtcatcaatagcatattcatatatttcaatagtactatgtttggttttcttcccatttcagggatcctatggtcttactgtaaaatcgtcccctccattctaaggat

SEQ ID NO: 1602 - protein, 185 aa, Homo sapiens
MSSSPNLDVSDEITERVYTPCDIGSNMILSPPGYWERYHSTEDPELQPVLALLSLSLSMCLVMVLRNLLSILAVSSVSPLHTPVYFFLSKLCWADIGFTLATVPKMVVDMQSHSRVISHAGCLTQMSFFILFACIEGMLLTVMAYDCFVAICRPLHYPVIVNPHLCVSFLLVSFFLSMLDSQLHS

SEQ ID NO: 1603 - DNA, 17588 bp, Homo sapiens
  source (1)..(17588)
  CDS (201)..(386)
  CDS (660)..(873)
  CDS (2637)..(3270)
  CDS (3360)..(3460)
  CDS (12023)..(12329)
  CDS (17307)..(17388)
  modified_base (6225)..(6324): a, t, c, g, unknown or other
  modified_base (12380)..(12479): a, t, c, g, unknown or other
cagcgtgctgcgccagctgtagctctgggcaaggatggttgccaggatagggcccagccctccagccaggttcatgctggttgacaggatggcccaccaagtgccaaactgagatggctcaaaccactgtggggcagagggcgacacgtaggtgtccagcctactgcccatgttgagggtggggtcaagaggggcccctcatggcctccttcaaggccgtgttcgtgcccgtggactacagcctcatcttcctcctgggcgtgatcggcaacgtcctggtgctggtgatcctggagcggcaccggcagacacgcagttccacggagaccttcctgttccacctggccgtgtccgacctcctgctggtcttcatcttgccctttgccgtggccgagggcagccccagaagctcacattacagggaagagggagagggcgcttctgtttggcagggcagtttcctcctctgccacctgatcccaccactctcagcctcctaaaatatcttgacaagcaataggagctggccaggaactgctcaggaacctgctctgggttgggtgtggaggtggtgggtaagaaagggcgctcccacatgctctttaggcatcctctatgacaatccaaacaggctctttggaagcactcaccttccgcaggaccttcccacatgggggccagcccagcccctgggccaggccattaaggaaccagagggcagcaaagacaggtactgtggagctccaggcaaagaatatgttgaccaggccaaccaggagcagcccagaagagaagagccagcgagcactcatctggtcagacagcaccccactgacaaacttgctgatagcataagctgccgactggctgctggtgatgaaccctgcagggaacattacacttaggggttagggaccaggggagaaacacaggagcaatgaaagaaggcatggggtcaggtgtgcaggggtgcccagtggggtgagacaggttacttcccagaggaacaggaggagcctgtgctgcaatctgacactcatggggccctactacttcggccacttctcctgcctcaccatcggcactagccccagactgacccatgattctcagctacagttgtcagggaacaaaaagggagcaggacgtggcagttccccctgcctgggatttgcatatgggatttcccacctcactctggatgccagtcccgggcctctagcagttctgttgctccaccacccaacatggggcaaagggctcaggattggagtcagggaccttgtccctcctgaagggtagcatgccaggccacatgaagtcgttgtgccaactttttagttcccagtgctcaacagtgtcagtagccagcactcaccctgaagcctccacatgcacccacacaggtgtgaaaaccatgctcagaagcccctcaaacactctcggaataaacagtgcctccagggcatgcacacacacgtcaaataagcagccctccttagccccgcaggcacccatgtccatggatctcagagcttctttatctggcatatgcagagccctggcctctactgtgcagacaatccacccacaccacatgcctgtacacaaacacccagtgtgtctggctggttctgtgtccccaggtccaccaccctgctgtttcagggctcacccaaatcatccttgtccaaagggatctcttccaccaatgatggcatgacaaaggagaaggtcttgcgattgaagtaatacaggctgtagcccccaaacatggctgagaagatcacagtgcgataatagccatagccctgggctgccatggtagaaaagagcaggccctaccagccaagacgcacagcctctgaccacagttcctgcttgccgctctcacagttcccagatctgctgagttgggttttttctgctccctcctccacccagcctcccaggctccctttatagccgccttctggacaatcattaagcctggggaggctccaaggggacccagtgtcctgagggagacaagaaaacaagagattactgagcgccaaactgtagggggtggaggaggtcccggaaggaggcatgcctgtgagccaggccagcaccctgtgtccccaggatttctgcctttacctcctctatcatgtctgcttgcctgtgaaaccagctttgattaaaggttcaacctaattacttttgtctgcctgagcccaggggaggcaggggtgggatgagcagagatgccctctctagcctgctccctcagtcacagaaccttctcattcattcacggaagtttattaacttactagttgacaggcactgcacttggcactattagtttctacacccactcaccaccaccgcaccaaaacacaaagtcagacacataccccggctaccccacttctaagccttctagagagggcctcaatccgtggaactctcaatacttagcacataatagatttaattgtttcctacagttgccccttgtaattctgtgcaagggggacctcccccagttcaggtcccacggtgtcaacacagaaagccccgctaagggctgaggtcctgatggggccccacagagctacctctgggtccccattaccctgcgacgtcagtctgggcttccttcgggctagctgggggctgcagggtctggtttccaacctgtgggacgttggcaggggccgcaagcagagggactgggcagctcgtgggcgggaaggtgccccggcgggcttcgggctgcagggcacaaccgtcccgcccagggccccggcaacatgccccggcttttccgctcaattgggaaagcaactggagcagaaggcgtaggcgcacgcggagcgggcgaccgcacgtattctcccggaggccccgcgcttctggcacccagaggctcagcctggtaggggagggccaggcggcgggcgggagaggaggagaggcggcgggcggcgaagaggcggcgggctcgtggcacctgcccagccccgtgggtcctcacgctacccaggacacgctactgtgcggctgggaaccacgggggccgggggtgcaggagctggagaggtgcggagaccacaggactggcgcgatagaaaggggtctcgtgctggtggtcagggacagcgcctcggtggccccaagacccatgaattgtctctggaactgcaggaacagctccgggtcgtatcggaagttggggttcgccaacaatggctccccaagacctgagatccccgccctcaggtgactcccctcccccgcataccgcctcctacctgaacagaggcgggagcccgaataggacggggcggggctagcgaaggctgcgcaagcgcggccggcgggggcgtggtcttcgcctgctgcttcgcttgccggccagtggagttccccgccccacatgccggggacgtcgacttactccctcccgctggtcacgctgctccttggacgaacgagcatagcgccccttaggggctgggcacggcatgtccaattcttaagtggttgcattcaacaaaccagtttttagtgagtgccctcctctacaaaacacaccgaacactaaggtgataatcattgttcccaagttgctcacagtctgggaaaggtgttgtaggaacacacagtatttctttttttctttttttttttttttgagacagtctcgctcagtcgcccaggctggagtgcagtggcgcgatttcggctcactgcaagctcctcctcccgggttcacaccattctcctgcctcagcctcccgagtagctgggactacgggcgcccaccaccacgcccgggtaattttttgtatttttagtagagacggggtttcaccgtgtttgccaggatggtctcgatctcctgacctcgtgatccgctcacctcggcctcccaaagtgctgggattacaggcgtgagcaccgcgcccagcccacaatttggaatttaacttgtggttagattgttggggacagagacggggcctggagtaaatatcaaattctagtcctagacccacagcattctaactgtatgaccttggttaatctctatgagctcccgtttcctaccagcctggtagatcattgtgaagactcaacagatgatttagataagagctcagaaattctataagagttctcaacaacaatggttttcactgatcccagttaagagttgtgaggagtaacagtagtgatgctattttacaacaatgatgactgtgttctcagaaacagagcaaatgttaaccctgcccatagcttcaacagaaggtaacatagcctaacaaagtccccaacagtcccaatcagccagcacttcccgacctctccccaatagaaacgatattataaaagcctcagcttgtaagcgatcagggtctcagccagactcctgactggaactccttgcaggcttattcctgtgaataaacctgtttggccgttgagttgcctcctgtctctcgctctcttcccttatatcttcctaacaagagtggctgaaggaattgtaagtgttccaaaattgagagcaaagatcttttactccagagaagatggtcagggaagggaggaggaggagatgagataaaataggatgacaggccggacgcgatggctcatgcttgtaatcccagcacattgggaggccaaggcgggcagatcacttgaagtcaggagttcgagaccagcctggccaacatggtgaaaccctgtctctactaaaaataccaaaattagccaggcttggtggcacacgcctgtaatcccagttactggggaggctgaggcaggagaatttcttggacctgggaagcagaggttgcagtgaggccgagatcgtgccactgcactccagcctgggtgacagagcccgagagcctgtctcaaaaaaaaaaaaaaaaaaaattaaacgggtataaaacctgtctcacaaccatctgatctttgacaaacctgacaaaaacaagaaatggggaaaggattccctatttgataaatggtgctgggaaaactggctagccatatgtagaaagcggaaactggatcccttccttacaccttatacaaaaattaattcaagatggattaaagacataaatgttagatctaaaactataaaaaccctagaagaaaacctagacaataccattcaggacataggcatgggcaaggacttcatgactaaaacatcaaaagcaatggcaacaaaagccaaaatagacaaatgggatctaattaaactaaagagcttctgcacagcaaagaagctaccatcagagtgaacaggcaacctacagaatgggagaaaatttttgcaatctacccatctgacaaagggctaatatccagaatctacaaagaacttaaacaaatttacaagaaaaaaaccccatcaaaaagtgggccaaggatatgaacagacacttctcaaaagaagacatttatgcagccaacagacatgaaaaatgctcatcatcactggctatcagagaaatgcaaatcaaaaccacaatgagataccatctcacaccagttagaatggcggtcattaaaaagtcaggaaacaacagatgctggagggcatgagccactgtgcctggtcgatggtgtttatttgtttgtttgtttgtttgtttgtttttgagacagagtcttgctctgtcggccaggctgaagtgcagtggcaggatctcggctcactgcaacctctgcctcccgggctcaagccattctcctgcctgagcctcctgagtagctgggattacaagcatgtgccaccacgcccagctaatttttgtatttttagtagagacagggtttcaccctattggccaggctggtctcgaactcctgacctcaggtaatccgcccacctcggtctcccaaagtgctaggattacaggcgtgagccactgcgcccggtctgttttttttttttgtttgtttgtttgtttgtttgtttttgagacaggcttgctctgttgcccaggctggagtgcaatggtatcttagctcactctaacctcaaattcctgagcattgagcgatcctcccaagtagctaagactacaggaccaggccacctgggttcaagcgattcttctgcctcagcttcctgagtagttggtattataggtgcccgcaaacacgcctggctaatttttgtatttttagtacagacaggtttcnnnnnnnnnnnnnnnnnnnnnnnnnnnnnnnnnnnnnnnnnnnnnnnnnnnnnnnnnnnnnnnnnnnnnnnnnnnnnnnnnnnnnnnnnnnnnnnnnnnnttgagaaggagtctcactctgttgcccaggctggagtgtaatggcatgatctcttctcactgcaacctccgcctctcaggttcaagtgattctcccgcctcagcctcccgagtagctgggattataagcacccaccatcatgtccagctaatttttgtatttttgtagagacagggtttcaccatgttggccaggcttggtcttgaactcctgacctcaggcgatcttgctttggcctcccaaagtgctgggattacaggcatgagccaccatgcttggccaataacccaatctttactcaatattaccattgtgcattattgcacataattagtgtattggtttagtatctttacatctagactgaaaactgtgaggaaccatttgggtttctttgctgtatccctaacacctggcaagggcctggtatagtgaaaatgcgtaacaaataattgttgaagtctaggcacggtggctcacacctgtaatcccaacactttgagaggctgacgtgggtggatcacttgacctcagggagggtacaagaccagcctgggcaacatggtgaaaccccatctctactaaaaatacaaaaattagcaggacgtgatggcacatgcctgtggtcccagctactcaggagactgaggcagcagaattgcttgaacctgggaggtggaggttgcagtgagccgggattgcgatcctgcctaaaaaaagaaaaataacaaaataattgataagtgaaaactaggtgcaagtataggagttgagagcaaagtgggcaaaggcagattttttcttagtaaacgctgtattgttttgtactttctttctgatctgctgcattttgggatccacttgcaacttaaacctgatgttggccaggtgtggtggctcacacctgtaatctagtactgttggaggccgaggcgagtggattgccagagctcaggagtttgagaccagcctgggccacatgatgaaacttcgtctttagtaaaatacaaaaattagccagatacggtggtgcacgcctgcagtcccagctgcttgggaggctgaggcaggagaatcgcttgaacctgggaggcggaagttgcaatgggatgagattgctccattgcactccagcctgggcaacagggtgagactccatctcaaaaaacaaaaacaaagcaaaaaaatccctgatgttaacaagaatgtgcacagcgataaggctgtatacgaagtgcagatgatggggacaaattgaggccaaatcagatgaaagcagagcttgggactcaggacccctccttcctgggagctgaatagactcgggtggcaggaaagaggctctggctgccggatagctctgggtgggcccagagcaaatgacctgacctggtccccctcacccactcctgcagtggctatcacttagaaatcagcatccaggctgggtgcggtggccacgcctgcaatcccagcgctttaggaggccgaggcaggtggatcacctgaggtcaggagtttgagaccagcctgaacaatacggtgaaaccccatctctactaaaaatacaaaaaattagccgatgtggtggcgggcgtctgtaatcccagctactcgggaggctgaggcaggagaactgcttgaacccaggaggtggaggattgcttgagtccaggagttcaaggctgcacatgaactgtgattgtgccactgaagggccctatctcaaagacaaaacgaaaaataaataaaaatttaaatgaggaggcgggagctacatcagattggagttaccagcaaggaaagcagggaggaaaaatgaaaaagtgagactacctcaaccctggtcagttgcagagacctgggagccctctggacaagggagccactctctcaagagtgaagcaccacccactgccacttcaagacaggagttatgcccagcccaggtgggcagtggtggccttgaaggcagagctttgtttctgtgcaggcctgttgggcaggagggaagagcggagagggagtgagatctggcatcgtctctaagcactgagtgtctgtgggatccctaaacagccctgaacctcactcattccttccttgtcctcaggcttctccctattccccacagatctaaggctgccagctgtccctgccctgaggctgtcccctgcaaccagggaggccacagccccccagctgggacctgcagcctcaaggactcttattccacaagtagcttttcctgagggtgtgctggagacaaacagcatggcgaagggtaatgaaactcaggccctatttttcttttgagacgaagtctccctctgtcactcaggctggagtgcagtggcgtgatctctgctcactgcaacctccacctcctgggttcaagtgatcttcctgcctcagtccccgagtagctgggattacaggcttgtgccccacgcctggctaatgtatttttagtagagacggggtttcgccacgttgaccaggctggtctccaactcatgacctcaggtgatccgcctgccttggcatcccaaagtgccaggatgacaggcatgaaccactgtgcccggcctgagagaggaagatttttctacagaagtatttcagctaataagctaagaaaatagaaaattagggccaggcacagtggcttacacctgtcatcccagcactttgggagcccaggagtttaagaccagccttggcaacatagggagacctcatctctaaaagaaataaaaattttaaaaagttagaaaattaggaatatgattcctaatacatttttaaaaattttggatgtgatttttttttttttggagacggagtcttgctgtcgcccaggctggagtgcagtggttagatctcagctcactgcaacctccgcttcctgggttcaaagtgattcttctgtctcagcctcctgagtagctgggattacaggtgtgcgccaccatgcctggctaaattttgtatttttagtagagatagggtttcaccatgttggtcaggctggtctcaaactcctgacctcaggtgatccacccgcctcggcctcccaaagtgccaggattacaggcgtaaaactcccatgctgggctggtcaaagtgctgggattacaggcataagacaacgcacctggaacttggcttgtgtcaaatggaactcaacatcttcccttttactaaaccccacccaacattcactgcgcacaagttgtcttattcactggacttctaatatgtttaaggggtctgtccccatttattttttgaaacggggtctttctgtgttgcccaggctggagtgcagtggttgttcacaggtgccaacctactattgatcagcatgggagctttggggttttaaaacaaattttttaagccagtcatatttagcagtggggggttgtataccaactttagtgacactaatgttattaaattctaataacccactaccatcagaccagcccagcttgggagttttgacctgctccatttccgacctgggctgtttcacccctccatagacaacctggatagtcccctgtcctgggaggtcaccatgttgaagctgaacttagtgtggacacccaaactgcataatgcattacagtctagaactcctgggctcaagggatcctcccacctcagcctcctgagtagctaggaccacagggtgcaccaccgcgcccagctgtcttcctttttttttctgagaccgagcctcactcagctgtccaagctagagtgcagtggtgtgatctccattcactgcaaccactgtctccctggttcaagcgattctcctgtctcagcctcctgagtagctgggattacaggaacctaccatcatgcccggctaatttttgtattttagtagagatggggttttactatgttggccaagctagtcttgaactcccgacctcaggtgatctgcccaccttggcctcccaaagtgctaggattataggcatgagccaccacgcccagccccctacccttaaaaaaattatatatatatataatagagacagggttgcgctatgttgcccaggctggtcttgaactcctgggctcaagggatcctcctgccttggcctcaaaagtgctggaattacaggcatgggccactgcacccagcctatcttacattttttttaaactcagagcatacctcatttcaattttcctcctctcttgcttgggttcatgtaaaatctttctaactggtttccaagtgtctgctctattatgctccgtatatcctccatactctagtctgctcctacgaacttcagcatcttcggcccctctgcctggaatttacatctttccaatcctgcctcacaaattttctattatataaggctccgaaatatgaactagaagtaatttccgtgaagctgatgactttatctggcatatggtaagctctgaatcaatgtttattgaaagaatgaaatgtcaccccctttgtgaagccttccagagagtgtcccctggaggaaattatttttccaaatcccaggtgccctttgctctatcccgtgccatctcaattttgtgttagatagatccagttggaaacacccattagttggaaagacattggctccggaccaccggtgggtctatagccctgtaatacccccgccacattttggggggcccgaggcaggcgggattacaaaagtccagggatatctaagacatatctcctggctataccaccggtgtgaacacccgtcttttacattaaaatagccaaaaaaaattagccaggcatggtggtgggcacctgtagtcccagctacatcaggaggtgaggcaagagaatggggtgaacccaggaggcggagtttgcagtgagccgagatcgcgccactgcattccagcctggatgacacagcgagactctgtctcaaaaaaaaaaaaaaaaaaaaaggctcctcaagtgcagggattgtgttctattcatgcccgactcttaattaacagatggcggctctctatgtacacttgtcaaattaagtagaaaacatcaaaacccaggcaccctgaggttaagatgccctttagtggtgggagttagtgcatggaaggagcccaggaagcatgcagctaacagcctgctaattagtagtatcaagctaccaaatgggctcatgggtagctttccttaaaaattgtaaaaaaatgggccgggcatggtggctcacgcctgtaatcccagcactttgggaggccaaggcgggtggatcacgaggtccagagtttgagaccagcctgaccaacatggtgaaaccgtgtctctactaaaaatacaaaaattagccaggcatgctggcgcacacctgtaatcccagctactcaggaagctgacgcaagagaatcgcttgaacccagaggcagaggttgcaatgagctgagattgcaccattgcactccggcctgagtgacagagcgggacttcatctcaaaaaaaaaaattgtacaaaatttcctttattaaaaattgtagctccctctctctctccctctccccctccccctccctctccacggtctccctctgatgccaccaaagttatgaaggccgaggctggactgtactgccgccatctcggctcactgcaacctccctgcctgattctcctgcctcagcctgcagagtgcctgggattgcaggcgcgtgccgccacgcctgactggtttttgcattttttggtggagacagggtttcgccgtgttgaccgggctggtctccagctcctgaccgcgagtgatctgcctgcctcggccccccgagatgccgggattgcagacggagtctcgctcactcagtgctcaatgttgcccaggctggagtgcagtgacgtgatctcggctcgctacaacctccacctcccagccgcctgccttggcctcccaaagtgccgagattgcaacctctgcccggccgccaccccgtctgggaagtgaggagcgtctctgcctggccgcccatcgtctggatgtgaggagccccnnnnnnnnnnnnnnnnnnnnnnnnnnnnnnnnnnnnnnnnnnnnnnnnnnnnnnnnnnnnnnnnnnnnnnnnnnnnnnnnnnnnnnnnnnnnnnnnnnnngcctgaacatacggtgaaacccatctctataaaaatacaaaaaattagccgatgtggtggcgggcgtctgtaatcccagctactcgggaggctgaggcaggagaactgcttgaacccaggaggtggaggattgcttgagtccaggagttcaaggctgcacatgaactgtgattgtgccactgaagggccctatctcaaagacaaaacgaaaaataaataaaaatttaaatgaggaggcgggagctacatcagattggagttaccagcaaggaaagcagggaggaaaaatgaaaaagtgagactacctcaaccctggtcagttgcagagacctgggagccctctggacaagggagccactctctcaagagtgaagcaccacccactgccacttcaagacaggagttatgcccagcccaggtgggcagtggtggccttgaaggcagagctttgtttctgtgcaggcctgttgggcaggagggaagagcggagagggaagttgagatctggcatcgtctctaagcactgagtgtctgtgggatccctaaacagccctgaacctcactcattccttccttgtcctcaggcttctccctattccccacagatctaaggctgccagctgtccctgccctgaggctgtcccctgcaaccagggaggccacagccccccagctgggacctgcagcctcaaggactcttattccacaagtagcttttcctgagggtgtgctggagacaaacagcatggcgaagggtaatgaaactcaggccctatttttcttttgagacgaagtctccctctgtcactcaggctggagtgcagtggcgtgatctctgctcactgcaacctccacctcctgggttcaagtgatcttcctgcctcagtccccgagtagctgggattacaggcttgtgccccacgcctggctaatgtatttttagtagagacggggtttcaccacgttgaccaggctggtctccaactcatgacctcaggtgatccgcctgccttggcatcccaaagtgccaggatgacaggcatgaaccactgtgcccggcctgagagaggaagatttttctacagaagtatttcagctaataagctaagaaaatagaaaattagggccaggcacagtggcttacacctgtcatcccagcactttgggagcccaggagtttaagaccagccttggcaacatagggagacctcatctctaaaagaaataaaaattttaaaaagttagaaaattaggaatatgattcctaatacatttttaaaaattttggatgtgattttttttttttttgagacggagtcttgctctgtcgcccaggctggagtgcagtggcacgatctcagctcactgtaagctccgcctctcaggttcatgccattctcctgcctcagcctcccaagcagctgggactacaggcgcccgccaccacgcccagctaattttctatatttttagtagagacagggttttaccgtgttagccaggatggtctcgatctcctgaccttgtgatccgcccacctcggcctcccaaagtgctgggattacaggcttgagccactgcgcccggcctggatgtgatgattgtatcatgttcagtctttttagagaaaagaaatgatgtctagaaattgattcaaaataatccagggaggccaaggcaggtggatcacttgaggtcaggagttcaagaccagcttgggcaacatggtgaaaccctctattaaaaatacagaaattagctgggcgtgttggcgctcacctgtaattccaactacatggtaggctgaggcaggagaattgcttgaacccgggaggcggaggttgcagtgagccacagatcacaccattgcactccaacctgggcaaacaagagcgagaaatcccgtttccaaaaaaaaaaaaaaaagaaaattagagatggtatcaacatgggagaggtaacttgataaattaacactgaggaatttacttggtaaagggggataatataaattttgaaagcttaaggaattgacagaaaaataaacataagaataggtcttaatcattaaagagtaaccaccagaataatcccagctgccatgcttggctaattttttatttttattttttgtagagatgggggtctcactattgttgcccagactggtctcgagctcttgggctcaagtaatcctctcgcctcagcctcccatagtgctgggattacaggcgtgagcaaccacgcccagccatgtgagagttttaattcctctacagcctcatcaacactagttttctttttttttcttttttcttttcatttatttatttatttatttatttatttatttatttatttattttgagacagagtctggctctgttgccaggctggagtgcagtggcgagatcttggctcactgcaacctcctcctcctgggttcaagtgattctcttgcctcagcctcccatgtagctgggattacaggcgtgtgccaccacacccggctaatttttgtatttttagtagagatggggtttcaccatattggccagactggtcttgaactcctgacctcaggtaatccgcccgcctcggcctcccaaagtgttgggattacaggtgtgagctactgcgcccagccaatttgtgtatttttagtagagacagagttttgccatgttggccaggctggtctcaaactcctggcctcaagtgatccacccactttggcctccgaaagtgctgggattacagatgtgaaccactgcccccggcctacagagagcagttttattaatcaaatgctaacagttgagatatggccagactcatgcctttaaaagactgttccagctttttgggctcagtgaagagatttcataagaaaaacttggcatgggaaacatatgggagtggtacaggagggtatctatgtgtcttgttccgatagctctcttgagtaatttcttgtctggaagcccagttggcatcatcttgacttctacctggtggttttggattaattggtcgtgactccccctaaacaggaggattcggtagctgaaggggtgggttgctcctccacacctgtgggtgttccttgttaggtggaacgagagacttggaaaagaaagagacacagacaaagtacagagaaagaaatcgggggaccaggggaccggcgctcagcatatggaggatcccgccggcctctgagttcccttagtatttattgatcattattgggtgtttctcggagagggggatgtggcaggatcataagataatagtggagagaaggtcagcaggtaaacacgtgaacaaagttctctgcatcataaacaaggtaaagaattaagtgctgtgctttagatatgtatacacataaacatctcaatgccttacagagcagtattgctgcccgcatgtcccacctgcagccctaaggcagtttccccctatctcagtagatggaatatacaatcgggttttacatcgagacattccattgcccagggacgagcaggagacagatgccttcctcttgtctcaactgcaacgaggcgttccttcctcttttactaatcctcctcagcacagaccctttacgggtgtcgggctgggggacggtcaggtctttcccttcccacgaggccatatctcaggctatcacatggggagaaaccttggacagtacctggctttcctaggcaggggtccctgcggccttccgcagtgttttgtgtccctgggtacttgagattccttcaagcatttgtttagcaaagcacatcttgcacagcccttaatccatttaaccctgagttgacacagcacatgtctcagggagcacagggttgggggtggggttacagattaaaatggagtctcttatgtctactttctatacagacacattaccaatctgatctctctttcttttccccacaggtagctgggtctttattcctggcttgtttcaaaattagcccctggctgaacaggatggctcatgcttgtaatcccaacactgggaggcacaggcaggaggattttttttttttttttgagatggagtcttgctctgtcacccaggctggagtgcagtgagtgatctccgcttgctgcaagctccgcctcccgagttcatgccattctcctgcctcaccttcccaagtagctgggactacaggcacctgccaccatgcccggctaatttttttgtatttttagtagagatggggtttcaccgtgttagacaggatggtctcgatctcctgacctggtgatctgcctgcctcggcctcccaaagtgctaggatttcaggcatgagccactgcgcccagccccactacgcccagctattttttgtatttttagtagaaatggggttttgccatgttggccaggctggtcttgacctgaggtatcctgactgggattacaggcgtgagccactgggcctggctatttgttttttttgagagaagtcttgctcttatcccccaggtttgagtgcaatggcttgatctccactcactgcaacctctgcctcccaggttcaaatgattctcctgcctctgcttcccaaatagctgggattaaatcgcctgccaccaagcccggctaatttttgtattttttagtagagactgggtttcaccatgttggccaggctggtctcgaactgctgacttcaggtgatccgcccgcctcggcctcccaaagtgctgggattacaggtgtgagccactgcgcccggccgggcctggctattttttatttttatttttgaggcagagtctcgctctgttgcccaggctggagtgcagtggcatgacctcagctcactgcaacttctgcctcctgggttcaagtaattctcaagcctcagcctcctaagtagctgggactacgggcacacaccaccagcacccggctaatttttgtattttagtagacatgggtttcgccatgttgcccagggtggtctcaaacttcagagctcaggcaatccactcacctcggcttcccaaagtgctaggattacagatgtgagccaccatccctggccaaaataaatattttaaaaatatttggta

SEQ ID NO: 1604 - protein, 507 aa, Homo sapiens [sequence omitted]

SEQ ID NO: 1605 - DNA, 27087 bp, Homo sapiens
  source (1)..(27087)
  CDS (201)..(498)
  CDS (834)..(923)
  CDS (7389)..(7511)
  CDS (10905)..(11021)
  CDS (13053)..(13140)
  CDS (19148)..(19452)
  CDS (26643)..(26887)
tgacctgtaaccatgggaacggtgggtgccagcactcctgtgacgatacagccgatggcccagagtgcagctgccatccacagtacaagatgcacacagatgggaggagctgccttggtgagtggcaaccccaacactgagtgagggtctgcaccagcctgcctgtccctacccctaccccttaatggtgtttagcacagatgcaggctgtttcctgtgcatttgcccccccagcaggccctgtgctgcttcgcatgctacagtgggagtggtctaggcctgtggggaaggcccctctctccctgtgtgaccttgggaagcccttcctcctctcctggactaggctgctcctaacgctggtattccagagactggcacaacacctcccaggaggccagggcagcacgaagttagagctgtttataatgatgcggcacttctggccagcaggagccagggccgtatatttctggcgggatgcctgccttgcccttcacggtgtgtccttcactagctccattttagaggtttccaggcccaaggctctttttctcctcgactcaggggactgaagcttgcattccctagtgtctctttggtcagtgcaatatacctccaaaatcttttccatgtttaatgtttgctaaggatctgtggccctttaacgggctgtgtctcccacagagcctcattacaacacatttttattgcgtgaacagagtcacatatctttcattcctcttatgtctgggatttcagcaaacacagttgtatggggatgagcaatctaactcattcagtctgagaaccgtgctcttttgcttctcttgtagagcgagaggacactgtcctggaggtgacagagagcaacaccacatcagtggtggatggggataaacgggtgaaacggcggctgctcatgggtaggcaccttcactccctttccttggccactgcaattgtccttttccctccccaacttattgcatcagacctgaacttgggagccacatgccctcagaccagctggactggggtgagcagctcctgtgaaccagggtgtgtgtctgttcttcaccagtgctgttgcttaatcaccaaccaagcaagacccttggtctcgtgtccatcagaataatcaggttaacgtcccaatgcagcccccacctagctgtaagacttggcaaactgccctgaggctctgtctcttggtctttctttgaaatggatgtaataaagtctacctcttagggccagggtattcgcccattttcatactgctgtaaagaactgcctgagactgggtaattgataaagaaagaggcttaattgactcacagttccacatggctggggaggcctcaggaaacttataatcatggtggaaggcaaaggggaagcaaggtaccttcttcacaaggtggcaggaaggagaataaatgcaggaggaactaccaaacacttgtaaaaccatgagatctcatgatctcactctatcatgagaacagcatgggaaccgcccccataatccaatcacctccacctggtctctcccttgacacgaggggattatggggattataattcaggatgagatttgagtggggacataaagcctggccatatcagttgggatgctcaattaaaataataatatggaaaggtgcccagagtccagtgcctgggactgagtgggtggtcagtgaagtcagctgtcttcctctgaagcagcctctagctcagaatggcagctagtctttttttgtgtccactgagtcttctatttctgactcagctgatgataatagtagaagagatgaatggagaggggcaacacttggctgtgggacaagggaagacctgcctgaaggtccagcggtcaagctggagatgagcagaaatagaggtggtcatgggggtgggagtcagacagatcctttggtgcgttactccttctggagaaagtctggctcaacctaaacaaaacccatcttttgacagtttctggatttaacagtcaggcaacatatcatacagccattggttaccaagcaggtaacctttccgagctcttttctgctctttagaaattataaattttcattgtcttaagtgaaaatagtacaaatgagtaacataaacgcttaattacttctaggcttgtaatgaaactcatcatttccttgtctcataacttcccatttcctcatcccatttgccagaggcaacaatagtcaattcttcgagctgtttcttcttctggctcctcctcccccatatttctgaaaaaaatgaagggtatacagttatttttttcttcttttcttttcttttttttttttttttaagacagagtctcactctgttgcccccaggctggggtgctgtggtgtgatcatatctcactgcaacctccgcctcccaggctcaagcgattctctcacctcagcttcctgagtagctggactacaggcatgtgccactgcgcctggctaatatttgtattttttgtagagacagggttttgccctgttgcccaggctggtctcgaactcctgggctctagcgatctgcctaccttggcctcccaaagtgtttggattacacgtgtgagccttcatgcctggccctacagttacttcttgatgtgtctgttttagatggtagcttttaacttcctattatgaaagactaggatttagctctcactgcttccccccgcaatacacacacacacacacctgacctctccctatacccttaatattgttgtctcacaatttaaatcaatattatgtgcttacattattctgactttgaatatctaaatacgattcacctgagtcatgtaacgtgctatgattatattttctttgtttgcttagttttctaagtacctcttaccaattcttttgcaaatttcagacaaagctgtaaaatacttttcaatgtgttcaaatatagtgtaggtaactaatcaaatcaattttcttggtgaaaaagtttcctcggaggcttccagcctgccctagcagggcctggctgtcttggctgagtgcatgtctctcatctgggcattcaccatcagcctacaattccctttgccgctctcctgttgggtggatcctatgtcttgtctctcattagtttatccggcgaatgagatagaggtatttaaaaatttgcatgcctgaaaatgcctttatattctacctgcaccctttattgagaatttggctcagtgtagaattcagagttggaaagaattttccatcactgttttgaagttagtgctccattgttttcaagaatgcagagttgttttgagaagtctaaaatcatttttattcttgatcctttgtgtgaaacctgtgaaagcttctctctgaaagcttccaggatcttctcctccttcccagtgatctgaagttttacaataatgttccttattgtgggattttgcccacctatttttagtacttttcaatatgaacattcaagtccctttgttctgagaaattttcttacattcttttctttgataaatttctttttctttcttttttttgagacagagtcttgttctgtcgcccaggctggagtccagtggtgcaatcttggttcactacaacctccacctcccaggttcaagtgactttcctgcctcagcctccccagtagctgagactacaggcacatgccaccatgcctggctaatttttttttttgtatttttagtagaaaagggattttgctatgttggccaggctggtctcaacctcctggcctatgtgacccacctgtctcgtcctctcaaagtgctgggattacaggcatgagccaccgcacccgtcttctttgataaatttcttcactccattttctctgttctttccctccggaactcctgttagctggctgtggtaactcctggattgaccccctaatttttttttttttcttttctctcccttgtatttttattctttttcttttctctcctttgtatttttgttctactttctaggagagttttcatttttttcttctaatctttgcacaggataaagttttcgttttcatgttttaatttttcaggcattttactttggcctttggttttaggaacctgctcttatttcatggatgcttttcttgtccccctgaggaaattaattacgagattttaactcctcttctgttctctagattatctttgtttcctccaggtttctttttccccgttggtttgatctggtatattcattccgtattagaggctttccagaaatgtctagtgattcttgaccgacttttcatatttaacagtaaaatactaaaaagccaattggatattctattgatttgtgggcttcatgtttgggtgacgaggcagtgacatagccatttcatctggagatcctcgaatgctaatatcgttaggtctttttgcttgggcaggtcaatttagccggagaggagtccttcaaccacctgcctgtaggcttggctgctagcatcctgggttgcagtgttgtttcaacatagctttttggaactttcaatggctgttattttaacatagcttttggaattttcaatggctttaaatctgccagtagggagctgaaggagttgggggaagagggatgagggttagagatctctttttcagggtatagactttcacctgatggtgacaccctctcctcctctgctattcctggtgcccttgagcctggtacctctctggtccagacttctctgctatagccagaataggagaagggtagtcacatgactatgtggagttaaggaggagctctggggtttatctctttcatatgtagactctccataatcttcctgttcttaactccgtcctcatttctgcctctagaataacttgatacctccaattcctgagtctttctgggactctggggctcacaggagtttaccagctgttggcaccccctctgcagactgctaggatctagctttcttctacgccagatactgctctcctgctaacatgtcacttccagaatgtttgacatcttttatctattgtcttttctcctattttctttgtccttaaggatttatactttaaaaaatcaattgattctcatattcgtgaggttttgaaaggaacagagataaacatacatgtactatctgcatatttaattaggattaagcttgttccctttagggttccttctttttttttttttttcttttcttttcttgagacagggtctcgctgtattgctcaggctggagtgcagtggcacaaacatggctcactgcacccttgacctcctgggctcaagtgatcttcctgcttcagcctcccgagtagctgggaccacaggtgtgcgtcaccaggcctcgctaattttttaaaatttgtgtagagatgggggtctcaccacgtggcccaggctggtcttgaacccctgggctcaggtgatcctcctgcctcagcctcccaaagtgttgggattacaggggtaagccaccaccctcgccaccaccccccacccccagcctttaaagtgaggtagctatggtagaaaaatcatgtttctgggtgcctagatgctaacaattcaatgaatgttgaatagcacttgtctattacttggactaactgtatgagatacagaactagaaggctgtttgcttattgttcctcatctccattgttgcaatttaacaattgtggcttatttttcacgtggttatgacagggctttctcctttcagggaaagtgaaacttcaaatttgagtaaattggcagttgcaaggatgaagtcagtagtctacaacaaggcagtggttggggcggcgatgcttacccactcttgctttgcccattactcatatcgaaaggagaaggttcaagattaagaaaggaccatcccctttgccctgttctgcactcacctctagcctgccagatgtggtcctacttaggttgctggctgcagatcagcaggaactttcagtggctttaaatttgccagtagggggagtggctctgcagattgggagacatctttatccctctggtcaccctgacagtcttcctcagaaactagaactcatttaggggggtgggaggagctgcacctgctctccctctagcccatctgcaggtagcagagacttggggtatgaccatgagtaccccaccatgcttcttggcttctgtgaccttcgtcagctgtatcagcacttctttgggaagctaattgtcttttcttacctccttgccagaaacgtgtgctgtcaacaatggaggctgtgaccgcacctgtaaggatacttcgacaggtgtccactgcagttgtcctgttggattcactctccagttggatgggaagacatgtaaaggtagccttcacctccccagggagactggatgccctgttatggagggagggcccatgccgctaacatatggggataaaggcaacataccctccataccccacgtgactcgagatttgcttatgattcatatcaatgggagctttttccccctgggctagtggaaggttataactgagtaagcttaattagaaccaacacttaattacactaattgttgaggaggtcagcctctacaagcatcaaataattcatttcagacagtggccttattagaaaaaggcagttaaaggaagcattcatttgcaggagataatatcaacatatcatacataatagcctagagattattatataaataacagtcaagatgattatccagaggacttaatgaataactgtaccattaacttttactgatgaagagcgaccccaatgacttgctcatatttcatgggcaagagtacaaaggattagccctttagcatgataaaaagtagataaccaattgccagacgaaactgggaaaagataagattgagtatcaggaatcattttaaaacattgaggctatttgatcattgtgtaatttgccaaaacaaatgctctagtcctttatagctttaatcattaaacttgaatacatagtgtactaaagagacccatcttaccttgagagagcaatacaaagatgagaatataacaggacgtcatcattctttcccagagtttgtttccttaatgccaatcaagggcatcataagtcagcgttctcaagacgatgaaacacttgtctttcaaaactggttaagccagataagaaaacatgtataaggttaaaaacatcagcaaacattcttaaatgcttttgtgagtctttttcttaatttcagagactaatgaacacacacaatggcccttcagggagttgtgggaaatgaggcaagtattgctctctgatatgcccaatgctttcctgttgcagatattgatgagtgccagacccgcaatggaggttgtgatcatttctgcaaaaacatcgtgggcagttttgactgcggctgcaagaaaggatttaaattattaacagatgagaagtcttgccaaggtatgtgctgaaaacatagctgtgctgcgcaatggcccacaggttggagcagagagaacgtagcaccctcctggcagagactggcttatcaggcttcttgacagggccactaatccaatctccttcctaggcttcactcatttcatctattaggtaaaataaaaacactgatgtagctcacaggtgtatttggaaattaagctgttaatggttagagaacaccttaaagaacccatcgatgtgatgacagcagagctcactgctagaaatggaatggaaaacagaatgcaaatggggttccagtggggtgttgagattatgaataattttccttttctaaaatttcctttaatgttattgaatttatcacaaaagttggtggcaaagtctgtagatttagttaacatacctccctagcaaaaacttggagttaacccatgatcaagattatgtaccaattggtctctttcttatagcacttgtttttttaattttttaattatttatttatttacagacagagtctcactctgttgcccaggctggagtgcagtggcatcatcttggttcactgcaacctccgccttcctgggttctagcaattctcctgcctcagcctcccgagtagctgggattacaggcatctgccaccatgctcagctaatttctgaatttttttttttttttttttttttttttttttttttgagacagagtctcgctctgtcacccaggctggagtgcagtggagctatcttggctcactgcaacctccgcctcccaggttcaagcgattctcctgcctcaacctcctgagtatctgggactacaggtgcgcaccatcacacccggctaatttttgcatttttagtagagacggggtttccctatgttggtcaggctggtcttgaactcctgacctcatgatctgcctgcctcggcctcccaaagtgctgagattacaggtgtgagccactgcgcctggccaatttctgaatttttagtagagtcagggtttcactgtgttggccaggctggtctcgaattcctaacctcaggtgatccgccctcctaggcctcccaaagtgctgggattacaggcgtgggccaccgcacctggcccagcacttgctttaaaccatcagcctttgatctttgaagagagggaaggcagagagggagggggagggcttgtggggaggagatgcttgttgatccttagagaggatttcagaccccttctcaaacacatccttcccatataagggctgcagcaaggagacttctctaggtagcagttgttgttagtattagcagctgttttgggtgggggaaagctgttttctatttttagatgagcaccttccctttgatatgcagaagaagttctcaggaaagatgtgctgtaatgtattcttgctccatttttgggaataaggactaatttattttgttagaaatctcagaattaggctgggtgtggtggctcacactgtaatctcagcactttgggaggctgaggcaggtcgatcacttgtggccaggagtttgagactagtctggccaacacggcaaaaccccgtctctactaaaaatacaaaaattaggtgggggcatggtggagggcgcggtggcgggcacctgtaatcccagctactcaggaggctgagacaccagaatcgcttgaacccaggaagcagaggttgcagtaagtcgagatcatgcccacgcactccagcctgggggatagagcgagactccatctcaaaaaaaaaaaaaaaaaaatcagaattaaataaaaatcagagtatcagatttcatcttagataacaaagatgtagcattacctttttacaaaaatattatggtgtgatgtttgttttgtttttctcttggtttgttcttaatgcataatttgtcaggcagttcaagtatattcctctttaaattcagtaagttaattctagataattattgtgtggttttcttcagtttgacttggaaagcaaatttgctgttccacataatgtttcctagtgtatagagcaggcaatactgttgaagctgtgtaaacacattaaaaaggaattagaaaagtgatctcattatttttggcaaagcaaaagcccatactgagcagccaaagtcagctactgaacaagtgcactttctcgacaactggctgatattaataacagatttcataaaatggcatcaattcctagggaagaaactaggtttttctcatttttcactgatcggtcttggtagaacaaatacttgcacagaacaaatttactgaagaaatgccaggatttctgggaaaagctagggatgaagaggttttgcaagaatttgcccttttttattttgctttttcattcttcctgttccttccacatttttgccttttattaacatagtttctcatggcacactcggtgttgaaaaaagtggtctagcagtggtctagttggcttcgactgagtgcggcactggtcctggtttatccatttggagacacaagtcgtaactatgttaaaatcctccagagttcagggagtgaagcactcaaattccagcctacaagaaagaggttgagggccagacccagggaaagagatgctgagatggacaaatgcagcctcctgaggctgctgtgcatgacccccgctgcagccaaggaggcttccacactgaaccaggaggctagcagactcataggactggcacataggggaggagcaaaaccaaggcatcggccaaaagcatccaatgtggagctgaactaccacatttcagggcctgcaaagagaaaattagtgaggatattagtattgatgcattctttcagtgcagagggcattaaaacctaggattaactggcctcttggggccagaagactaattctgagaaaataagaaagggatgggaactagatttacctccaaaccaagtgttttctcctttcaatttgccgtagttaataaattaatattgctgttttactaatagttatatgacaataaaaatgcatagctagcacctgtagcttacaaaaccctttttaggtatgttatctcatttggcttcatttaaacattttaaattagccctgcaagtacgcatgggtgaaagagaccaactgagttttgagggaagtgcagtttgcaacagaatgtggaaatgagggccgcggcagtcagtatacttcttgtgggctgctccacactttctttaacacaagtgagtgaggaaaatggatagataatgttttttactctgtgtgtattgtttttggtgttggtcagcaactggtatttatcataaacctattcttcactcatccctcagagtgggtttcagctcccctctccctttgaccattacagatgtggatgagtgctctttggataggacctgtgaccacagctgcatcaaccaccctggcacatttgcttgtgcttgcaaccgagggtacaccctgtatggcttcacccactgtggaggtgagcagactgcccctgtcaagttgggaggggaatgaggctgggcctggaggggagcagggcctacccctgaggtttgctttcctacattggggtatgaaaggtacattgcagtccctgagcaatagcggtgagtccatcaacttgagagcaggatctgctaaaggaaatctccccacatgtatccctttaacacaccgagtgtgaaatggagcagagagaagaactgagctcttccagctgtgaattctctatcgacttgattgacttgcggctgtattcagagagtggaagggtatctcaggagctgataacctatctattggaacatctcagcagatagtaaagtcacagtcctcagagaggcttggggggcacccaccaattccacagccctgctatgcataggaactggctgcaaagccttggtttgagtcccacaactaggtctttgagctggaagcagaactatgaagtttctctctccactctgtgcccattttgcaaaatgttctcatgtctcataacctcatggtcaagcaggctatgccataaactggatttgttaccaactaactcccactccactcccccagccatcagattcacccagcaatctttgagaatacaggttcagattccaattcagaatgtctaggacttccaaggtcatcttcctgaggatctataggatttgggaaccactggcttaaatacttcctgaccagtcctgagtcttgtgctttagaagattggatatgctgggcgtggtggcttacggctctaatcccagaactttgggaggccaaggcgggcggatcacctgaggtcgggagttcgagaccagcctaaccaacatggagaaaccctgtctctactaaaaatacaagattagccgggcgtggtggcgcatgcctgtaatcccagctacttgggagctgaggcaggaaaattgcttgaacccgggaggtggaggttgcagtgagccgaggttgtgccattgcactccagcctgggcaataagagcgaaactccacctgaaaaaaaaaaaaaaaaaaaaaaaaaaaaaatatatatatatatatatatatactagtgctttgctactgacagttatctcccttctccctttcaacacatccttggcatggccaaagacatactactcttcccagtccatcaggaaacctcgaggaaatgtaccctgagtatggatgtatgtctgggtttaggtggagctaccttttgatctggactcagtctcaggttgatgggaattagtgtagtcacttccctttctctgtgcctcaactgtgtaaatggttaagcagggagtcccagttctgtctgcctcccttgctaggcagctcagaaggatggtagagttttaaaatagaagtctgtgcagtgtctgagtttggacatctgaaagtagagtgcggatccttctgagtgttgctaatggaggaatggattggtcaagaatggagcttgagtctgggtgtggtggctcacacctgtaatcccagcactttgggaggccaaggcaggtggatcacctgaggccaggagttccagaccagcctggccaacatggtgaaaccccatctctactaaaaatgcaaaaattagccaggcgtgttggcacatgcccgtaatcccagctacttgggaggctgaggcaggagaattgcttgaagctgggagacggaggttgcagtgagctgagatggtgccactgcactccagcctgagtgacaagagcaaaattccatctcaaaaaaaaaaaaaaaaaaaaaagagtggagcttgagaaggccctattgagcctcctgccaggaaatttgctgggtggggagtggggtgtgcagtcagctggtgccgagcgctcatgctaaaggcattcagtgtcttcctttggttagtgagtttcaaccttgtgactcccctgctgctccttcctcaagggagggaccatgtcagcccattcagtgacaggctgctatgacaggagagtattttgttccacagacaccaatgagtgcagcatcaacaacggaggctgtcagcaggtctgtgtgaacacagtgggcagctatgaatgccagtgccaccctgggtacaagctccactggaataaaaaagactgtgtgggtaaggggaaccgaggcacagactcagacagcaggctggccactggcccagaggcagtgcagctctgcgtgctcccacatcccacctgaccgtccctccactgacttccccaccagctgcagcaactgttctttaaatagttcaaaaacaggagatactttgcaggatctttggtgtttccttctgtgcttctgtgtaggttggaactcacttctgttttcctggttgcttttctgcatgaagaaatggcatatcaggggctcctttcccttggtgggaataaggcctagcatctatgttctgtgctgggcatgagctctaccttcttttcttggggcctttggtgcatgggactcaaccatccttgtcacacttggaaatgtccttctctttctgtaagtgtctgttttgtcctgtctagaagtgaaggggctcctgcccacaagtgtgtcaccccgtgtgtccctgcactgcggtaagagtggtggaggagacgggtgcttcctcagatgtcactctggcattcacctctcttcaggtgagtggggcccagttcccggggcaggtcctcacactggggccaggcctctctggcctccaggtgttagattccctcaaagggcttccaggtcctccgccagatgccccgaccaccgtgctttgagaggtccatgcttcgagaccccatatgctgggcatttttctagtggcccatgtggagtggggtggggggacagtttagctgctaccaggatagcctgtgaccttgcttatgcatttgacaattgacattctgtctgtcaggactgcaaggggcctactctgtcacctgtggctcttcctctcctctcaggaacaaacaacaaaaatcaaatgactctgcttttgggggtaattaccaaatctgcgtgttctctctgggggctcactgtgttcaaggggcttcattcacggggtgctgttcttggacattggctttgttttttttctgttaatttccttgatgctgtgagcatgttccagggtgttgttgcctgcagtcctggtgcccggaatgtgactctcccatgtaacagatacttactgtgtggccactgtgtgtcaggaggctgtggtcagccctggtgggtcatcaccctgggcagaggcccacagaaccccaggaccagcaggctgtactccagagcacctcaaaggcccagggaatgtgcctggagcacatggtgtggatagaaataggcaaagcaggggcagcagggattctgtgccgagaaaggggcccaaaccctttcctgtttgtcaaaagatgaagaatgaaatccaaggtttttaggaggctgtgtcctcccggatatagacgcctttgtcattatgtcattggaacacctgaatgaggttcatattacatcctgatgttcatattacatatatgagcaaagctagagactcaaagcaagacagtacagcttgtatgtgttgactgagcaattcaaatatgccagctaccatagtacacgaattaactgacttaagccatactacaaccctctgaggaaattttactattattctcattaaccagatgaagaaactgaggctcagagaggtgaaataacttactcaaagtggtttagataagaaataggggagctgggatttgaacccaggcagtctgggtccagagtctcaagcactatccttcactgcccctttcaatgcacgtttggactcagccagggcatacatcatggtctgtttcgccaaatccctcagtgacagttccttggtgatttgggccaccccaaggtggggcaagcaaatagctaatggctatgcagttattactacgtaccaggcaaggagctaaacattttcctttttttaaatgcattatctcattttatccttacaacagcctggtaatataggtactataattatgcctgttttacagatgaggacactgaagcttagggagattaagtaacttgctcaagttctcaccacaacttaaaagagctgtagggcattgactccagatcctaccggatggttaagactgactgaccctgggaggagaacagaattttgcacatcaggctctcacagtgggaccctcactccctctcagacctcagagcctagccatgtttagtgagtgccatctgtgtctggaacaacagctccctcagccctgtcctcccacgacgggcttgtttaggagaatctgcccttcaccatttcgccaaacgggcttatccagatttgaactgggggattctggcctttttttctcaggaaggcacaaaaatgacttcatgttctatttcaccgtggaggctatttttgaccctcagttttagatagatagataggtagatagatagatagatagataggtaggtaggtagatagatagatagatagatagatagatagatagatagataattttttgttttttttgaaatggagtctcattcactctgttgcctaggctagagtgcagtggtgcaatctcagctcactgcaacctctgcctcctgggttcaagcaattctcctgcctcagcctcccgagtagctgggattacaggcatgtgccaccatgcccggctaatttttgtatttttagtagagatggggtttcaccatgttcgccaggctggcctctgttttatttgaacactggatttgcctctcacatgagggggtaactgcaattttaggaggctcctggtggccccagtccagggcaatgggcactccatgatccaagccactcttagcctcagggtaggagagggtctcagggtgtgctgtgtgtggtggaagccaccaatggacagcttgctgcttcccatctggtgtctccattcctttgcctctgaaggtaacatctctcacttgtttctttctgaagatgtcaccaccatcaggacaagtgtaacctttaagctaaatgaaggcaagtgtagtttgaaaaatgctgagctgtttcccgagggtctgcgaccagcactaccaggtatggaatcagatggttggtgtagggagcttgcctgcatgtgggaaggggcctgcagccagccgagctggaggtccatgggggccaggggctgtccagccgatccaagcacactgcagatggaactgaaccatccccaacttccagggactcatcccaagaggaagaagagcataacctagcatgcttgtatagttctggggtcacacttcggggcttcctttgcatggtatagttggtgaggctctggggaaacccacgagttcacagaagtcaataagggcttcagatgaattagcaatttgtgatcatattgggttaaattttctagatctcagattttgcttgaaatataagccaaagaaatgaaaaaaggtttggctcagaaaggataactttgatgaacaaagatctaatatccagccttcctgctgggtctagtttttggaagcggtgaccccattggcttcagcaaagcaaataccatccaagtagaactggccttattgagaagagcagaatctaacattcctttttctttcccagcacacatttccagtattattttatagaattcttttggaaattaaaaataaaaaggatcaggattcatgtattagggaggcttcttttcccaatctactctcaaatcacacagacaaataaacctaaagctcactctagtcacttttgactgcctattttaggtaagtaattttaagaaacttggtacctccatttgatggaatattatgcagctattaattctatgttttcaaagaatgtttaatgacacaggaaaatggtcttgttataatgctgagatgtaaagcaggagagaaacattttgtatatctaatacaatccaaattgtgtaagaaaaactgtggtagaagaaacaaaaagaaaactcaccatatcattagtagtggttacatctgggtgggaggcatgggtaattttaattttttttctgcgtttgccaaattaaccatagtgagcatttatacttttaaacctcaggggtgaagggaggggccattgctcaaaaatagatttgaaccagttgtggtgcctcatacctgtaatctcagcactttgggaggccaaggcaggcagattgcttgagttcaggagttcaggagcggcctgggtaacatgacaaaaccccatctctacaaaaactataaaaaaattagccgggcctagtggtttgtgcctgtagtcccagctactcaggaggccaaggcgggcggatcacttgagcccaggaggttgaggctgcagtgagctgtgttgacaccactgcactccagcctgggcgacagagcgagaccctgtctcaaaaaaatgaaataaatacaatgataaaaatagacttggcctatagtttacttaatgggattgtactagtgttaatgtcttagttttgataaatgtatgatgttaacgttaggggagactgagtgaaggttatgtgggaactctatactatcttagcaacttttctataaatctacttatttcaaaatgaaaagttaaaaaaatatatatggaaacatcgaaagggaaaaagatttaaaatgagaatctgttcagtttaagatctgaagttacccttttgaaaaagtaagataaatctttaggggaaaaatgtagagaagaaataaatctgcctccttcctgtggcccctgttgacctatggcttgaatgtccttgtaatgttaaagaagaatctgatacaggcaatacttcatttcaataaagattttgaaatagagacaaattcatggagtggatgatatgtggacctgctctttggtgagggttaacagattcactggaaaccatggtgagaggggagacagccaagtcaggaagaaggatgtgcaaagccctgtcatgcaacacttccactctcatcctagatgccttcatgatattgttaggttctgttgatgctttgtaccatttattgctcctggttatttaaaaatgagacatcactgctgacgggtgttccagctttcctttcaggttagaatgactccaaggtcagtttgcctgaaagcagtagttggtttcctttccactcttgtgctcattccttatttgaagcctcagcccctgctcggcacatccagctttatgcaaaccaactgtgagagtgtaagcacacgttagcaaaccgtcagtaaggaatgcaagacaatccctggttcttgtcttccacatatgtggctagtcagtcggaaacatctcccatttattcatgaaaagaattttcaagagctaaattgtaaagttatataggaggcaatgctagctcttcaacattaaaatgtcgttgtgctccaagttaagggcttgcagtgtcttggcatctggagataatcacttagtcccttgagagttgttttaatgaaatgtttactgagctctagcaaatgttcagctgagtgctttgccaggatttggcttccgataattttgtttcttcatacagagaagcacagctcagtaaaagagagcttccgctacgtaaaccttacatgcagctctggcaagcaagtcccaggagcccctggccgaccaagcacccctaaggaaatgtttatcactgttgagtttgagcttgaaactaaccaaaaggaggtgacaggttggtttgaaaacagtctgcattgccaggcttctcacggcttgctccttatttctttgcctttcactttttattattcttgggggaaaagtaatgcaaacactgaagtatctcctgttttttttcaccccgaaactaaactgaattggtttggaacctgatggttttctctgcttcataaaaacccaaagctaccattctgatccacaaatttctgtttgaatcaaatgctgcccagcctgctaggtgccccctccaggtttctccccattcggtccacagggagctcggggtgttggtagggcctgcagttgatctggccattgtcacacgctgcagcctgatctcctcccgcactgctgtccctcttgtttctgtagcttcttgtgacctgagctgcatcgtaaagcgaaccgagaagcggctccgtaaagccatccgcacgctcagaaaggccgtccacagggagcagtttcacctccagctctcaggcatgaacctcgacgtggctaaaaagcctcccagaacatctgaacgccaggcagagtcctgtggagtgggccagggtcatgcagaaaaccaatgtggtgagtggcctgggacattcttgctaacagaacagccttgggctccataaacactcagggtaaccgaaggcaagtctggcccatcctcccttctcagggctcactttagagaacactccgggcagtgcttctgtttcagtaactgttgcgtttgtgtctgtcgtccctgctaggcccagagctccccggagtgagactgacctcattcatctccctgtcctcagcacctggcatagtatctggcttgtggtgggcactaaaatgttggttgacttgaggaacaggaaagaagtggctgatgttctgattccaaagcctgtgctctggtcccaagcagggtgaatttcagtaattagatttctccaggataaactgatgtccttttcctaagtatcagtagaatcatgaggcccaagcttagctaaggagtaagaatcccatttgtatttctaagtaagcaaagctgaatccaggggcacttgttccagagaattgtcagccttaggcccacagctcaaatttgttgctttgccaaaacttagtgaaaatcaagtgcaaaatcaagtgtaactgtctacaagaggctggtttccagatagtcttgattttcattccagctgattctcttaaaaagaaacaaagtggaaaaaagtaaaaacagcccagctggttgatctgttctcatttaaaattctaagagttccagtttccgtactaaaatagtggggagagttggctgtggctgccctactttccaggatgagttgcagaaactgtcagggccctcctggcctctcagggttacactgcacccctcccccgtctgctatcctgttggggttaggcctcacggacgggccagggagtctttgtggccagttaaaaagtcaagaaaacctaatgtcaagggccccatggactggctcccagtgagggtatcactaatactaccatgggtatgttcctggggagtaaaggcccaaggataaggagcaggagttacttaacaggggcttcatgaccacaacagcctacgaaagacactcggggccaggcatgatggctcacacctataatcccagcactttgggaggccaaggcgggcagatcacgaggtcaggagatcgagaccatcctggccagcatggtgaaaccccgcctctactaaaaaaatacaaaaaattagctgggcgtggtggcgcgtgcctatactcccagctattcgggaggctgaggcaggagaatcccttgaaccagggagttggaggctgcagtgagccgagatcgtgccactgcactccagcctgggcgacagagcaagactccgtctcaaaaaaaaaaaaaaaaaaaaaagaaagaaagacactcagtagagggtttgtgtagctgtggtggtgtgtgaatgtgtccctgagatgcttgtcatgctaaattaggtttgatttgtttctaggggagccaatgtgtcttgtctcaggagctcccaaacactggatgaattctgtagccctcacagcatcaaatcaggtccaggtctgacagcaatgttgaagattttaccatgcagagaaaacggctcaagcagttaccagtgacattccctcttgctgctgagggaggaagtgggtgtaaagaagtgtcaggtgtgttaattagaaaggctttttatccagaaggcagcatgtggcatagacaaggctgtgtgtgtgtgtgtgtgtgtgtgtgtgtgtgtgtgtgtctgtctgtctgtctgtcttctagtcctggtctatttgatggtgttaggacttcataaagaccaggcttgctgatgttttctgagctctggatggtacagtggagacaagcttaggatagttccttttagaaatgattttcggtatttgcagaaaagagctcaaaaaaagaaaaatggagtcacttccatctctcctggggggagagatggaaccattatgtttatctttttaaatattttaaatttagttttcaattatgaaagtagtgcctgtttcaaatggcacagaaatgtatacagtaaagatgaaagttctctccacagctccctaatccaactccccagcagtaatcactgttatagtttgctgtgtgatttttccacaactgtttttatgcacatataaaaaggaaattttatatagtcattcaataaatatttattgagcaccaattgtgtgccaggtaccattctagatatcaggaatccagcaataaagaaacacgcaaacatctcagccctcacagagtttacaattttagaggaagaaggtagacaaccaaccaataaacgaggaaagatactactatcatgtagcagagggcgacagggatatggagagcagggctgcagggaagtggaatggaaagtgccaggccaaggtgaggggtgagggatgaggagcgtactcccccaaagtgcagactgtggtcagggaaggcctcattacaaagtgtcatttgggcagagacgcaaaggacagcaagaagcaagctatggagatatctgggggaagagagtttcaggcaaagagaacaacaaataggaaaaccccaaggtactggaaggaaggccagaaggatgagagctgagagaggcagggagggagagcaagggcagagcagtagcagagggaactcgaaaccagggaggaccctgatcccgaatctgatgagaaaggaagccagtggagggctttgagcataggagtaactgacatgttttcaaaagataactttggctactgtgttgaaagtagactgtaggtttacgtatgaatagatatatctttttaaaaaaataggctgggtgcagtggctcacatctgtaatcccagcactttgggaggccgaggtgggaggatcacttcaggccaggagttcaatactagtttgggcaacatagtgacactctgtctcactatgttggttggtagcacctgtagtcccagctactcgggagtctaaggcgggaggatcatctgagtccaggagttcgaggctgcagtgagctatgattgtgtcactgcactgcagcctgggtggcagaccaagagcctatcttaacaaaataaaaaacaaatatcaatacaatttgaatagtgctatgtgttgtttttaactgtagttagatcaagaacatctctctaacatgatagcggagcaacctcatttcttttacagcttcccaggctgtatttgtttgaagacaccagtattgattagccctacccctactggtgaacatagaagttattgctaatttttatatggcaaatagtgctcaatgaatatcattctttgtacacatggccaatatttctgaaggatagacttgcaaaagtacaatggccgactcaaagaacttgcatatttaaaactttaatagatactgccaaattactttcccaaaagatcatgcctatgcatgtcgcttccaacgttggaagcatcctacatctttgctaacatggattatttatcattgatccttttcatttttgcaaatctggtaagcaaaaaaaaaaaaaaatagtcattttaacttggttttctttattagtaagactaagcatgctgtcttatgcctgtggtcatttggattccttcttctgaaaacatctatattctttgcctatttttgcattgaactgtttgtcctttgtatagcattaaaaaataaattttaaagtcccaatttacaccagagaaaataatcacttctgaccaattgtatattttctttcttatcattattttatatagtaaagtttcattaatttggcatttggggactttggggacagcctgctctccaagtgacctttgtaccatctgtgatcaattttaacaagatggcaaaaaaaaaaaatgattatagggtccaaggaacaaatttcttaagctctgtagtacttcataaagttcttcatgtctaaagaaaattaactatatgacatggatgtctagctattgtactttcataataccagctaaaagataaattatttaagaaatacactggataatatatatgtgtgtgtatgcatgtgtgtgtatatatgtatgtatgtatgtatgtattatatatactgtatttggttgttttgaaaacttgctgagatttttagaagaaacaatccagacaactggcaaactgggaagtattttagtgcctgggttcttgagagactaggaacatttaattccttttgtaacagcttactgctgttcctctgcagcaaccttggatatgttgctaaggagcctcaactttatctctaggtgacatgctgccattggaggatttactcgggaagtgtccaggtcatatgtgtattctagaaagatctctctgactttactggagggagcagaattagaggcagaaagaccaatctgggggcttttgaatgtgttgcctatgagatactgagaacatgcaggtcctagatagagaaacagcaatgggttagagaaatatttaagagggaaaatgagcagcatttggggatgacatggattggggactgagaaggggaaagaggtgggctgagctcagaggattctgatgtggcctgtgatcctggcacttgcttcccatacatccctcatctcaccatgccctgtttcatatgcaggaggcactgagaaaacgccagggggttggttgaatgatgaaatgaatgtgatcactggggaagaaataatcagaagagatttataggagaagcaggaaaaaaataggctcttgagagagcatgagaaaggatgaaaaagatacataaaaggaggctaaagcctgaatattgagtcagagaaactgagaggagtgcaggaaggcaaggcaaggaggtttttgagccagggagtgaagcaatcagaaaaagagtttagaaaggtgcatctgatggtagaatggaaagagtggaggcagggagggacagaaagccaggggaatcttggaaggttactgcggcaatccaaataagagacggtgaggatctaagggacattcatgccatggggacgaagaataggggatagagagaagggacacagctgtaggatgctgccgctgagtgacagggcagtgaggagagaagccagggagagctgtgatttggagccttggtgcctgggaaaatagagatgcttctgtaagaggagtaaagccagaggccagggagagaagtgctccttgggcaacaagatttctaggcagaggtgtccatgggtgtctgggagtctagcgaaacaacttcttctcttcatgtccagcctaacttgcctaatcccgagtctgtccacacaggctcagacctgcctcctgttaaaatggatgggcagcccatgcctctaaggcccccctctatcttgcactcaagctggagcctgttctctctcagcttcttaagaatgttgcccatgctgtccccatcaacccctcccatctcagaattcttctcctctgctagatcatttccaacatcacacaaacccatctcctgtcttaaaaaccaaacaaaccctccattgacttcatgcatctctatagctactgcctcatttctgtgtcccccattctgtgtagaacgaagctctttgaaggagccgtagtcatactgtctttgcctccttacctcccatttctcttcagtctgattttcatgcctaacctctccacagaaacattttccaagattcctaaccacctctgtgatgccgaatccagttgcctttcctcactcctcatgaggcatcctctctgctgatcactccctctcctggaaacactttcttcctgtgggtttcagacacaacacacttctgcttctccatacctcactggctgctcccttttcattttcaatgctggttccggttcctcccctactttctgattatcctagggttgaatccttcgtcccttcctctgtcttcacactctccttggtgaccttacccagtgccatagctttaaataccaccacatgctggcgattctgaaactgccctctccagctcctttgtcccagagatgctgaacatttaagaatgcacacacacacattctctctccctctaagtaaaatatatatgaatgtttacttatttataaactatatacttacactattggctagtacactatgttcatcacaaaagacagaacaagataaagattaaacaaatttaaaaataactggctagcatcttaaggtagaatctttacaattgggcgaagttcattattgatagtggtggttgcaaatccatttgtcctatagtctttttgactattgctagtgctttaggtgaactcttgacagaccagattaaatcgtaactgtttctgtctcatgatgtagtttgacaaagaggtaatacactagtgcctccttataggcagttttgctttctgtggtttcagttacctgggtcaaccatggtccaagaatatcaaatggaaaattccagaaataaacaatttgtaagttttaaattgcccactcttcagagtggtgtgatgaaatctcgtgttgtcctgctccatcctgcctgggatatgaatcctccctttatgctgcgtacccacggtgtataccctccccatcctgcctggaatatgaatcctccctttctcctgcgtacccacactgtgtaccctccccatcctgcctgggatatgaatcctccctttctcctgcgtacccacggtgtataccctccccatcctgcctgggatatgaatcctccctttctcctacgtacccatgctgtgtaccctccccatcctgcctgggatatgaatcctccctttctcctgcgtacccacgctgtgtaccctccccatcctgcctgggatatgaatcctccctttctcctgtgtacccacggtgtataccctcccccatgttagtcacatagtagtcatctcagttatcagattgacagatcacaagaagggtgagtacggtactataagatactttgagagagagaccacattcacataactttttattataatatgttgtgataattgttttattttattattattgttaatctcttgctgtgcctaatttataaatgaaactttatcatgaataagcacgcataggaaaacccctagtgtatatagggtgtggtactctccgaggttccaggcacccactgggggtcttggatgggaaacctccgctccactgtggacacgggtggctgctgtgctaggagcagaagatgcacccacgggccctctcctgtggtgcggacgcgcgtggctgctgtgctaggagcagaagatgcgcccacggacactcctgtggtgcgcatgggctcgcgtcacgtttacgcccttcagtcgggtgttctttccgggaatccatcaaagctgctttctattttgtgatggttagtttagttaaaaacacgatcatataggtcaggacatctcattacccaggcatagctaagctgtaactattctctatgtattgagaggcgagagtcagtcagtgccctgcgcccgagttgtgggtgccagtgcttctcttttcttggcgaccctggctcctcacatgtgtcttgtgcctcacagagatggagact

SEQ ID NO: 1606 - protein, 421 aa, Homo sapiens
MQAVSCAFAPPAGPVLLRMLQWEWSRPVGKAPLSLCDLGKPFLLSWTRLLLTLVFQRLAQHLPGGQGSTKLELFIMMRHFWPAGARAVYFWRDACLALHEREDTVLEVTESNTTSVVDGDKRVKRRLLMDIDECQTRNGGCDHFCKNIVGSFDCGCKKGFKLLTDEKSCQDVDECSLDRTCDHSCINHPGTFACACNRGYTLYGFTHCGDTNECSINNGGCQQVCVNTVGSYECQCHPGELGVLVGPAVDLAIVTRCSLISSRTAVPLVSVASCDLSCIVKRTEKRLRKAIRTLRKAVHREQFHLQLSGMNLDVAKKPPRTSERQAESCGVGQGHAENQCGTHWGSWMGNLRSTVDTGGCCARSRRCTHGPSPVVRTRVAAVLGAEDAPTDTPVVRMGSRHVYALQSGVLSGNPSKLLSIL

SEQ ID NO: 1607 - DNA, 11519 bp, Homo sapiens
  source (1)..(11519)
  CDS (201)..(265)
  CDS (5288)..(5676)
  CDS (11165)..(11319)
tccccttctcattgagactgtggcggggtgggggcatgcaggactggcaggggtgaggagaacacaggttggccaggtgcccgtcacaccaagcccaagtgttctaggggtcgtgcagacctgtccagcctgtgctgctgaccagcagggctggccgctcgcggaggcgcatcaccagcccgctcccagcatcccgctccatgaaggccgaccgctccgtgtctgggtcctcaggttctgagatgaaagagcaggaaaaaagcctgtgagaggccacagagcaggcccgggacccaggacgggcatctcctgccatggcaaggcctgcaggctcccaaaggttggggtgcccagccacatcagcagcaccaggccacccctgccatctgaggcctgggcttgctttctctaatattgttgctgggtgctaaggttacaacagcaaacaagactgactcattccttttctccacgcgacttactgtcttatcatcccctggactcaagatgagggtgcagggacaccctcccacaccactccagcttacccaggggcacacctcagggtgtgtggacctgcactaaggtcccctccttagccccgtgagacaccccaggggacacacaggtccacagatcctgccacaggcctgggaacccactggcaggagagtaagacagcgcaggggtccacaaacatttcttaaagggccagagagtaaatacttcaggctttgcgggccacaggttctctgttgcaaaacacgattctgctgttgtagctcaaaggcagctgtagacaactcagaagttaatgagtgtgttgtgttccaatggaacttgatttacaaaagcaggagactggcctgtagccttagtttgccaacccctggatgagtgggttcccaggtctgcagtgagaaggggagaggacagggcattggcaagcaggagagaaggcagctgaggatgggaggcctaccaggccctgaacggagagtgcgtgccgcccagcttcatgaagagttggtgctgcaggtccagaggtctcttgaaagaaagatgctggcttgtcatagacggtcacagccctgcaatgaaatcatggcagggctattgggagggctgaagaaaggcctcaggaatagaggactcagaggctccaggaaaagaaggatgcttggggaatccaagtctcagacgatgacaagaagaagccttgcaattacttgggaatgcacagagagatgttctaggaccaaaattgcctggaccccctggctggctgggaaagaaactctgccccctcctctcccagcttccccaaattttcccataatgttgccaagcattagtccagcgtggaggctactttttgctcaaaccactcatttgggtcccacgcccaatgtaacccatcctcagcaaaacaacctttatttccttcttccacgtttccagaaagttcccctaaagccctaggaatcaccaaatgaaaggggctttttacaaacaggaaacttaagtggagtgccaatacacaacatgaattgcaccaggctgggtctaagataaaaccagactgtggacagcaagacagataagacccacatggctctgcactgcctgggtctgttatggtgtggaggaatgtcttagtctgttgctcctgtgggtgtagctaaagcacgaaccaggagtcttcatccttagaaagcagttagacagacacctgagaaccaatcccaaactgcagccttccacagaaccttctggaaccttcccgaatgcaactcattactgccagagggtctttgatgagagtctactctccaccatttgtcttcaaagagaatacccacatattctctttccatggaaaggtaagttattagagtttatgcagtctggtatattaattgagagcttcaaagaatgtcacgtttacgattcagtctcacagactgggttaaaaaggcagtgttgactattaagttgtaaattactataatgatcattattattattcaagcaagctgtgagaaatgagcattatctcacaatatctgcattttagtgaacctgaaggaagagtgtatttgctggaattacagaagcctgagaaccacaggggaattctcactgcagggtattcagggtcaaaggctgattctattttgcatgctcaatccttcctcaatttatttttatttctttctttattttttgagacagtgtctcactctgtcgcccaggctggagggccttggtgcagtctcagctcactgcaacctcgcctcccgggttcaagtgattctcctgcctcagcgtccggagtagcagggatttgaggcacccaccacaaagcccagctaatttttgtatttttagaagagacgggatttcatcatgttggccaggctggtctcgaactcctgacctcaggtgatccacccacctcagcctcccaaattgttgggattacacatgtgagccaccacacctggccgggcctaggtttttgaagaaggaattgaactgagtgtaggccaggttgtactgctgaagtgtcttctttgtacttggaatgtgctaggatggatagacttcaaagtgcaaagcgcctgaaggatctcgcattcatcaattctatgcactgagcttctgtccccagaataccactctcagagtaggaatatggcaaggccagtttgataggtggggcatggattggaggctcaggccactgcactgcacatacaggtcttgatgtaaacggtctggtggaggtcaagttctgtttagcgtgggtagactatgtgacagagtgaagaaaggtaatggtctaaacgcagcaaaagtttcattcccactcacgtgccagtctgtggagcaggcagctcctctcctcatgaacctgggacccaggtatcctccatcttgtggttctgcttctccagagccttgtcatttttttcatctagctatggtgacaagatcttttggataagccatgaatattaaaccaaaggcaaactctgaaaattgatttgacgtgtggtcagctgctcatttagcacagtccggggaatgctggggtgatgggcaagaaggttttcatgaggaggttgaagagatctaagtataggggtgccagcctggggcacttcagaaggggcactggcctaggggtagcagcagggcgaccctgatttccctggggcagggtgtggctcacgacggggtgctgagaacccaccaagaaggctggaactttcagcactcattgttttatgagggcctgcctgtgtgccaggctggaagacactgaccagaggcccagggcaactgaagagtctcagcctggtctcttggtgcctggggggtacactgtacaagtgatgatgtagttccaaggggcaggactctgacccacactcctggtgccaatgtccgttttgccactcatgttagattttgcttctttaagtgaacttactcaggatagctgggttcttggtcattcttccagtggttttcaagggtgaaaaaaggagtttcagcaagacagctaacgtctggatgagtgagccaggaggtgtctgtagccttcctctagagagcactctgggctggtgggcgtgaggactccagtttcatgcgcgtccgtgtgaagataccaccaaacaggctttgtgtgagcaataaagctgtttatttcacatgggtgcaggcaggctgagtgaaaagagagtcagagaagggagataggggtagggccattttataggatttgggtaggtaaaggaaaattacagttaaaggggggttgttctctggcgggcagaatgggggtcacaaggtactcagtgggggaggttttgagccaggatgagccaggagaaggaatttcacaagacaatgtcatcagttaaggcaggaacaggccattttcacttcttttgtggtggaatgtcatcagttaaggcaggaaccggccatctggatgtgtacgtgcaggtcacaggggatatgatggcttagcttgagctcagaggcctgacacccagggcaggctggctcagcccttttgacttcagatttcagggaaggccagggagctggattgggtgcctggaatttctgagaattatgtttctgagaggattttgaaacctaaacaggaatactttacacacaggtcatcaagcaggaactgggaagttccaaaactgccctccttcatgccacctcctcccttcagaggccaagggtggccaagctgtctcccacacacctcagtgaaaagtccctggctgtcctcccaaccacctcgctgtgaccttgtgaggtgtgagaaggaggaaggggatctacgttctggatgaaccttccttcctccttgctgagaaatagtttaggcccctgcgcctgctgggcctcagaccttctcagagcccagggcccactgtggctcctgcaagctgcctgggaattccacggaggctgactggctgcctctcttattcccagtctgctgcaacccatttcctaagctggggtggctgaaaaccacagaaattcatcctctcacagttctggaggccagagtctgaatgcaggtgttggcagggctgtgctgcctttgaaggttctagggaagaatccttcctggccttttccagttttgggtggtggctggcaatgtgcggcattccttggcttcaggtgcatcattccagctgcacaccgctgtcttttttttttttttttttttttattgatcattcttgggtgtttctcacagagggggatttggcagggtcataggacaatagtggagggagggtcagcagataaacaagtgaacaaaggtctctggttttcctaggcagaggactctgcggccttccgcagtgtttgtgtccctgggtacttgagattagggagtggtgatgactcttaaggagcatgctgccttcaagcatctgtttaaaaaagcacatcttgcaccgcccttaatccatttaaccctgagtggacacagcacatgtttcagagagcacagggttgggggtaaggtcatagatcaacagcgtcccaaggcagaagaatttttcttagtacagaacaaaatgaaaagtctctcatgtctacttctttctacacagacacagcaaccatccgatttctcaatcttttccccacctttcccccttttctattccacaaaaccgccattgtcatcatggcccattctcaatgagctgttgggtacacctcccagacggcgtggtggccgggcagaagggctcctcacttcccagaaggggcggccgggcagaggcgccccccacctcccggacggggtggctggctggcgggggctgaccccccacctccctcccggacggggtggctgccgggtggagacgctcctcacctcccagacggggtggctgccaggtggaggggctcctcacttctcagatggggtggctgccgggctgaggggctcctcacttctcagacggggcggctgctgggcggaggggctcctcacatcccagacgatgggcggccaggcagagacgctcctcacttcccagacggggtggcggctgggcagaggctgcaatctcagcactttggaaggccaaggcaggctgctaggaggtggtggttgtagcgagccgagatcacgccactgcactccggcctgggcacctgtgactatatatatatagtcacaatatatttgctgtcaaagtattatcatcaaaactctatagaaaatatacacatccttgggctgggcacagtggctaacgtctgtaatcctaacactttgggaagttgaggcgtgtggatcacctgagctcacgagttcaagaccagcttggccaacatggcaaaccccatctctactaaaaatacaaaaattagctggtgtggtggcatgcacctctaatctcagctactcaggaagctgaggcacaagaatcgctcgaacccgggaggcggaggttgtagtgagcccagattgtgccactgcactccagccggtgcgacagagtaagactccatgaaaacgcaaaacaaaacaaaataaaaccaaacaaaaaaaaacaacaaaaacaaacaggcacttctgatgcaggccgcaacatggatgaaccttgaagacattatcgtcagtgaaataaataaatcccaaaaggataaacatgcccaggctcagtggctcacacctgtaaccccagcattttgggaggctgagacaggtggatcccttaagctcaggagttcgagaccagcctggccaatatggtgaaagctcgtctctattaaaaatacaaaaattagctgggcatgatagcgcacgcctgtaatcccagctactcgggagactgagacataagaattgcttgagcccccgaagtggaagttgcagtgagccgagatcacgccactgcactccagcctggggtgaacagggaaagattctacctctaaaaaaaaaaattaaacccggtatgattccacttatctatcaggggtctagaagcagttagactcctagagttgcaaactagaaaggtggcccccaggggtaggcgagagagaggagtggagagcttggcgaatggttgcaatttccattttgaaaaataaaactgttccggagatgatggcggtgatggttgctaaacaatgtgaacatacttaatgtcattaaactgtaaactgaaaaagagtggaaactgtaaatgtttatactggccattctatatgcactaatatatatttataatttttaatatttatacgtggtatattttcccataataaaagatgaaaattaaagcagttggatctttaaaaagcaaagaaagaagcgaagaatacacaccagctttctcctgattagaggaagagccccaaagcttctatggacactcacttttctcttcttcttgcatgatgatgaggaaatctttaagaggttggggaacttgggtgactttggctaatgaggagctctgtgccttgagccccccagggcacagaacagtaaatggcctgtgcctccagccctgcagtgtgaggttccagtcctgtgggctccacagccatcacctgtatcaggaggcacatgtctcaacgtgtcttcttgccagccttgaggatggagtctgagcatccatcgtgcaccacgcagggaggacagtggacctgttccccgtggtcatggcccagcaaaggggaagggcagttcagtgagtgtaggcaaaagaaagagcgatcagactgttactgtgtctatgtagaaaggaaagacataagagactccattttgaaaaagacctgtactttcaacaattgctttgctgagatgttgttaatgtgtagctttgccccagccactttgacccaacctgaagctcacaaaaacatgtgttgtaggaaatcaaggtttaagggatctaggactgtgcaggacatgccttgttaacaagatgtttccaagcagtatacttggtaaaagtcatcgccattctctagtctcaataaaccaggggcacgatacactgtggaaagctgcagggagccctgcccttgaaagccgtttattgtccaaggtttctccccatgtgatagtctgaaaagtggcctcgtgggatgagaaagacctgaccgtccccgagcccgacacccataaagggtctgtgctgaggtggattagtcaaagaggaaagccgcttgcagttgagggagaggaaggccactgtctcctgcctgcccctgggaactgaatgtctcagtataaaacccgattgtacatttgttcaattctgagatgggggaaaaaccggcctatggtgggaggtgagacatgtttgcagcaatgctgccttgttattctttactccactgagatgtttgggtggagagaaacataaatctggcttatgtacacgtccagtcatagtaccttcccttgaacttcattatgacatagattctattgctcacatcttcgttgctgaccttctccttattatcaacctgccctcctactacattcctctttgctaaaataataaaaataataatcaataaaaactgagggaactcagaggccggtgccggtgcagatccttggtatgctgagcgccggtcccctgggctcactgttgtttctctatactttgtctctgtgtcttatttctttcctcagtctctcatcccacccgactagaaatacccacaggtgtggaggtgcaggtcaccccttcaagtgagtgctgagaaacggacgggagccttgtttggtttcctcctcctcaggacaaacaggagagtgtggtgggcagatgggaggagaccaatgtgcaaactgtccgctcagcagactgtgcagtttctgttcttggttgtgctgggggtctcagaaatcttattcaaaattttgctttcctcccccactggttgtccttttcatagacatctcacccatgatagcagggaatcagtccctctaaagtattccctaagaacaacaaaaagattatgaaggtgatgatgaggataaagaggatgacgacagacaccatggcatcatgaacccttactgagggcttcctaaaggccaggctctgagctctgtgctctatgcagcttgtttcatttcatctgcatggtctccacgttattagtgcacatttcaggatgattttacagactagaaaaggagcaacgcttttccatataactcttactagatcatgaagtcaaaaagggtgaagtccaatttgaaccatccagtctaagtccagacacatggcatttggccagtcctctccctacaaccaacctgccctctcaaatcctcatcactcaggcggatgcccctgctcactgtgcccttccctttgcgcgttccttgtagaccagagctagaccagtgggtgccacaatcactgtgtcaagtatagaaagggcagctgagatcacatcgaggattccagaaagaattggcacaggatcattcggggcgcatctctcccttgcccctgttcctggctttccttacagctctcgacttcctcaaaggagtcatcaattcagtttggcttccattcctattgaggaagctggaaagcgtttcaaaaatgctcctccgatgtgcctgtggttaagacctctgagctctgcttaaaacttttggaagctgggagccgtggctcatgcctgtaatcccagccctttgggaggctgaggcaggcgaatcacaaggtcaggaattcgagaccagcctggccaacatggtgaaaccacgtctctactcaaaatagaaaaaaatgagccaggcgtagtggcgggcgcctgtcatctcagctacttggcaggctgaggcaggagaatagcttgaacctgggatgcagaggttgcagtgagcagagatcactccattgcactccagcctgggcaatggaatgagactccatctcaaaacaacaaaaacaaaaacaaaaacaaaaaaaaacccacaactttttgagagttggaagaccaggaagtatagtacccgggacttcgagtctggccatgaattttgaataccaccctttctacttctctgtatggcaaggggtgagacgtccatcctctgagactcagcactctcacctgacttgatttccagttgatccgatggaagtgaatgatgattaagccgatcgtaggcgcccgctgtgtgatctctaggtgacggatgcataaagtaaaggcaaagtgaattttagatacattccttaagattttcagcttcaactccacacaattcaacggaaatatcccctgacctgaagttctgctttccctgcattccagacaggacattttgttttgtccttctctcagtaagtactgagtactgtgagaggaacaggggagtctcttttgcttctgattccccagagcctatatcttgcttggcacataggagacagcaaaagtcaaaatctatattaatgattgaattgacacttccttgcttcaccaaaattggctgtcatcagcatgactttgacttacttgattctttttgttttttgtgttttgagacggagttttgctctcgttgcccaggctggcgtgcagtggtgtgatttcggctcactgtagtctctgcctcccaggttcaagccattctcctgccccagcctcccgagtagctgggactacaggcacgcgccgccataccgggcgaagtttttgtattttttgtataggcgggttttcaccatgttggccaggatggtcttgatctcctgaccccgtgatccgccctcctcggcctcccaaagtgctgggattacaggcgtgagccaccatatccggccaaactttctgatgaaaactctaagtccacctaagctaaggacaggagttagagcttccatgaattttaaaacaagacccaccgatttgagtaagcaattactctctcgaaggagaaaagtccgaaaacagaatgatgaaatcactaggacctaactggcatgtggaactattttctgcttatgaactatcaactttcatttcatttccagatggcatggtctcagctgttacacagtgtttacaaatgttctaaatcaagggaatttgtatcaatctagtagaataaataaaatatttgagttcttaatttcctttaattaggataacctttttcttaaagtgaagacagtggttttattatatctttttcttcggaaaagataggctgtattttctagcaattacgaatttgttatatatgatgatctggttcttggaacgttctcgaagctagtgtctctaaggcaggtgtgtacagcaagaggagaataacacagcaatcgatgttgaaagcactataaggcaattgagcttgtcagaactacaaaatattgctgagtgtggattgctctgaaacctgcaaacattactggtgaattgcttctatccaaaatgcagacacaatgctgggtattggtttacttgtttcggatttttcaaccctcttttccaggcaaaagagggttgtatccaaatgatacagacccacagagtctaacagatgtctctatattcctcctcctcaaactctcagaggatccagaactgcagcaggtcgtcgctgggctgttcctgtccatgtgcctggtcacggtgctggggaacctactcatcatcctggccgtcagccctgactcccacctccacacccccatgtacttgttcctctccaacctgtcccttgcctgacatcggtttcacctccaccacggtccccaagatgattgtggacatccagtctcacagcagagtcatctcctatgcaggctgcctgactcagatgtctctctttgccatttttggaggtatggccgagagacatgctcctgagtgtgatggcctatgaccggtttgtagccatcagtcaccctctatattgttcagccatc

SEQ ID NO: 1608 - protein, 202 aa, Homo sapiens [sequence omitted]

SEQ ID NO: 1609 - DNA, 7694 bp, Homo sapiens
  source (1)..(7694)
  CDS (201)..(246)
  CDS (1208)..(1324)
  CDS (1508)..(1723)
  CDS (2083)..(2199)
  CDS (2554)..(2706)
  CDS (2909)..(3028)
  CDS (7217)..(7494)
  modified_base (3532)..(3631): a, t, c, g, unknown or other
  modified_base (7609)..(7694): a, t, c, g, unknown or other
tgagggtggctaattagtctaatgggaacggaggtacaacctggacctcattaaccctaaccagttcagctaattgtgttgatgataaatgcttcactttcatgtagcattttcataggcattatatcaaaaggcctctatgaactgagtataattatccccattgtacagccaaaaagacttcagctcagagagggtaaatgacttgctcagagtgttacgtaatgaactggaaattgagcccgggtgtgtcaatcatcatttaacaagaggaaaggaggggaaaaaggcgcttctttctcttgctcatgtttttcttatgttttcttagctcctgtgagttctttgggttgttcttcccctaccctgtgaacccctcaccacaattaccttttgaatctctgtcttagctgcagtttctgcttagcttctccatcagctggggatgggcctaggagtcagtaaggaaggactataaaacagacaagggggctgggtgtggtggctcacgcctgtaatcccaacagtttgggaggccaaggcaggtggatctcttgaggccaggagttcgagactggcctggccaacatggcgaaaacccacctctactaaaaatacacacaaaaaaaaagatagctgggtgtggcagcgggcacctgtaacaccagctactcgggaggctgaggcatgagaattccttgaacccaggaggcggtggttgcagtgagccgagatcataccactgcactccagcctgggtgacagagtcagactctgtttcaaaaaaaaaaaaaaggccaggcgccatggctcatgcctgtaatcccagcactttgggaggctgaggcaggcagatcacctgaggtcgggggtttgagaccagcctggccaacacgacaaaaccctgtctctactaaaaatgcaaaaaacaaaaacaaaaaccaaaaaaacctagccaggtgtggtgaagcatgcctgtaatcccagctacttgggaggctgagtcagaatcgcctgaaccaggaggcagaggttgcagtgagccaagattgcgccactgtactccaacctgggtgacagagtaagactcggtctcaaaaaaagaaaaaaagacaaggggatttggagcaaaaggctatctggcctagttgagcctgagtaagaataccaggttgattgacttttcttttcttttcctgggattcagtactacctacctgttcccctcttgactttcactgtgacaatggcaagtgcatccgccgctcctgggtgtgtgacggggacaacgactgtgaggatgactcggatgagcaggactgtcgtgagtgttggcagaggctgggcggaactccattgagttccactgggaaaggattttcaatcagaaagcaatgccccaggtccacatgagcccttgtgttttcagcactttgtcctgtcctttcacttcctctcgaagtcagataagctgctgagaggcagccacctccttcggagccctcagggcagcactggagctacttgactgctccggagggctttaagtcaggcttccaggcaccagacccccactgcctgcagcagcctgactgctctgtgcccacagccccccgggagtgtgaggaggacgagtttccctgccagaatggctactgcatccggagtctgtggcactgcgatggtgacaatgactgtggcgacaacagcgatgagcagtgtggtgggtgaccccaacgggggaaggcaggcaaggtggccagtgggtggcctggccatgggagaagatagcagcaatggccctagcactgccaaacctccaactgcccagatatctggagcagctagaggaacgcagagggggcagagccgctcagaccccccagaaactgtggaccaggaggctgaggcccagtctctccagggcctccgttctccctggagagtctgcactgactctggggtgcctttcgggggctaggtcagacccgccaaagccagtgaggttgggagtcagagaggagggtgagagggttgcctgtggggccccctcagaactgctgtcccatcgcatccccccagacatgcgcaagtgctccgacaaggagttccgctgtagtgacggaagctgcattgctgagcattggtactgcgacggtgacaccgactgcaaagatggctccgatgaggagaactgtcgtgagtggccccagacctcaggctgttgggttggatgagggcagacagttctgcccattggctaagggcgaggctgaggagtgcatgtaccaagggcaaggagcatgggtgcctcagcagcagctcctcctaggctgagctagggagggagcaagttccccaggtgggaagggaaggcttcctttggtccacctgaatatgggcgtctataagggctgtcccagatgaaacctggttacatctcacttgaagaagctctcctgcctgagcatcctgcctgcttgaggaatcagggcccctctccttcatccaggcctgagtgtgtgcccctccccacccctgccttccctccagcctcagcagtgccagcgcccccctgcaacctggaggagttccagtgtgcctatggacgctgcatcctcgacatctaccactgcgatggcgacgatgactgtggagactggtcagacgagtctgactgctgtgagtactctggccagctgggaggtggggaggccaggctgggaagaactgcttgggtggcaaggcacagtcgccagctggggcaggagttcagagaggagtttctggattttctggtccctcttgggaagagatggaggaactgggattctggggctgtggccttctagtctgccatgggacactgcacagactggctagagacagaagtcttgtgtttccctagcctcccaccagccctgccgctctggggagttcatgtgtgacagtggcctgtgcatcaatgcaggctggcgctgcgatggtgacgcggactgtgatgaccagtctgatgagcgcaactgcagtgagtggggaaatggaattaggttgggcttgaactaaggagaaggcttgtggagccaaagaggccactaccggctgggcgcggtggctcatgcttataatgccagcactttgggagaccaaggtgggtggattgcttgaggtcaggagttcaagaccagcctgggtaacatggttaaaccccatctctactaaaaatacaaaacttagctgggtgtggtggcgcatgcctgtaatcccagctactcgggaggctgaggcaggagaatcgcttgaacctaggaggcagaggttgcagtgacccgagacggcgtccctgtagcagagtgagatgacatctcaaaaaacaagacaatccgggaggtgagggggcgcctctgcctggccgcccctactgggaagtgaggagcccctctgcccggccagccgccccatccaggagggaggtgggggggtcagccccccgcccggtcagccaccccgtccgggagggaggtgggggggnnnnnnnnnnnnnnnnnnnnnnnnnnnnnnnnnnnnnnnnnnnnnnnnnnnnnnnnnnnnnnnnnnnnnnnnnnnnnnnnnnnnnnnnnnnnnnnnnnnnattagttttttccacctttattttcttgtctaatctttgttgctttttttttttttcgagacagagtctcgctgtgttgcccaggctgcagtgcagtggcgtgatctctgctcattgcaacctctgcctccatggttcaagcaattcttttgcttcagcctcccaagtagctgggactacaggcgtgcgccaccacgcccagctaatttttgtatttttagtagagacaggttttcaccatgttggccaggctggtctcaaactcctgacctcaagtgatctgcccgcctcagcctcccaaagtgctaggattataggcatgagccaccatgttcagccccttgtggcttttttacaaacaagaaaactgaagcttaaggggctacgtgacttgcacaaggtcaactggctggtcgatggaacccaagtctgtctgctccaggtccagtgctttgtcctctgcctaacctcctcctcctattcccccctacttcctctctgtcctttccacagctttcatcctgaactcccgtctggtacatccccactccctactgtgtgtggttagcagcatttctcaacctctgttgatgttttgggccagataattctttgtcataggggcctgtctgcatgttatagatttttttttttttttttgagacggagtttcgctcctgttgcccaggttggagtgcaatggcatgatctcccctcaccgcaacctctgcctcctgggttcaagcaattctcctgcctcagcctcccaagtagctgggattacaggtgcccaccaccatacccggctcatttttgtatttttagtagagacgggggtttcaccacattggccatgctggtcttgaactcctgacctcaggtgatccgcccacctgggcctcccaaagtgctgggattacaggcgtgtaatcctgtatagaattatacacgttatagagtctttagcagcatccctagcttctacccaccagatgtcggtaagcaccgccaagcaggacaaccaaaaatgtctccaaacattgctaaatgtcctccgggggacaaaatatccccagttgagatccttattagccttatcctttttcttcaccatgataccccatgaaggggatctgtgtaccggggagtcccatcacatggagtggaattaaacatctttgctgttcaatccagctagagttcaccaaaagggtgcctacagctgtgctgagcctgtcatactactgaagttcctcaggctgtgttgtccaggatctgagtgagaaaaaccctcctcccttctcagagttctcaggccagaaaggatggagtgggggcaggggcacctgggtcttttagtgcttcctggggaagaatcctctaccctgcatttgtagagagacccgaagagcacaggagcactgggcttggagcaaggccttcctgtgaggtctagagacactgcacctcccaactggacctcacttggcttccgcaggaaatcctgcatctttttttttttttttttttttttttttgagacaagggctcatcctgtcaccatggctggagtgcagtggtgagatcatggctcactgcagcctcaacctcccgggctcaagtgattctcccacatcatgctcccaagtagctgagagtacaggtgtccaccaccatgcctggctaacttttgtaaatttcttttctgtagagacagggttttgccatgttccccgggctggtctcaaaactgctgtgctcaaaggatccacctgcctcagtctctcaaagtgctgatattacaggcatgagccaccgtgcccagcccaatcctgcatcttttctagagcagctgattaccatagcatgtggagggagagggccaggcctcagttgagaatctggtgaaagctgtgatcccttaccccagaaacgtacattatacctgtagcatcagggattcacagaacccaaaagccatccatccatccatccatccatccgtctgtccgtccatccatccatccatccatgcattgcaggctaggaagttttaccttatgcttgcacttactcttggggttgagatggagagggaaagttctagagctctctccctgcttttggagggcatggcagcacacctttttatcctggccctaagccctaggctaggccaaggaattataatgtgagacaaggatgtacatcaaggagatgagctgagagagaaaagctggaccaggtacagagtataggaagaggggtgacaatttcgagctgactccttctctgtttcagcccagcctgagggcagggtccagctgagggaaggaagaggagaagaaaggaagggggagagatgagccatgcgctgcggccccctccttccccagctgcgagcagagcagccccagcgggttggatgaatgctgggaggggggagagtgaccctggcagaaccctttgttccagctgaggctggagcagggcactgagccattcacacgccatcccagggcatcctgctgggcacgctggggagggggcacagcagctggtcatgggacttggccaggcagatagctcgatgctcaatagggaagcccagctgcgtgctgctgaagccgggggagaggctgcatctgccagccttcctcaaggctgtggcctgtgccacagacaggaaggccctggcaggtcccagttactctgccctgaggtggcctgggggactcagagcagcccaccctgcttcctgctcccctgtgtggattccttatcctaaagaggctccagcattttaattccaccattagttcttgccctccctggccaacatcccagggtctggtccaagacagaggcagagcgtccatatctcaacctagttttagtgagaaggctatggaggcctctcaacatcaccctttctgtcccttgttcctcttcttcaaaagcaccaaacctctgagtggcatcatttttttttggagggggttgtttctttttttcttttttgagacaaggtcttgctctgttgcacctgctggagtgcagtggtgtgatcatagctcactgcagccttgacctcccaggttcaagcaatcctcccacctcagcctcccaagtagctgggactacaggcacatgccactaccctcagctaattttttagttttttgtagaaacaaggtctcactatgttgcccacgatggtcttgaacttctgagctcaatcaatcctcccatctcagcccctcaaagtgctgtgatataggtatgagccactgtgcctagcctaggtggcatcatctgtttctgggcccttagaggtgccatgcaaaaaagccctgtcatagagcgggtcacctggactctttgtaagcccaaagtcagagggtatctgctgggtcgtttatgccctggaggaggcatggttttactgcctgcatctcccttgaagtgtcactgtgactctccaggtgacagtgcccctggactaggctcctctactttcccctcggaatgggcttgggttgagtgggagctgagccctcactgattccttttccctccgcccaggcctggccagcagccccgagtgtgcttgtggtcggagccacttcacatgtgcagtgagtgctcttggagagtgtacctgcatccctgcccagtggcagtgtgatggagacaatgactgcggggaccacagcgatgaggatggatgtagtaagtacctccccagaggcagtgggaggtggtggagagggacctgggggtggggggcaaggacaaggctgatggagtattttctgcatcaactgtgtcggactcagagagttggtcttttgcaagcttgatagatattgacatttgggtagtttcttcactatatatggctccaactctcctgtgtttcttttggttggttcatgcatatatgtccaagaaaccaaacttgacaacacgtgtaannnnnnnnnnnnnnnnnnnnnnnnnnnnnnnnnnnnnnnnnnnnnnnnnnnnnnnnnnnnnnnnnnnnnnnnnnnnnnnnnnnnnn

SEQ ID NO: 1610 - protein, 348 aa, Homo sapiens
MTCSECYVMNWKLSPVLPTCSPLDFHCDNGKCIRRSWVCDGDNDCEDDSDEQDCRQHWSYLTAPEGFKSGFQAPDPHCLQQPDCSVPTAPRECEEDEFPCQNGYCIRSLWHCDGDNDCGDNSDEQCDMRKCSDKEFRCSDGSCIAEHWYCDGDTDCKDGSDEENCPSAVPAPPCNLEEFQCAYGRCILDIYHCDGDDDCGDWSDESDCCEYSGQLGASHQPCRSGEFMCDSGLCINAGWRCDGDADCDDQSDERNCSLASSPECACGRSHFTCAVSALGECTCIPAQWQCDGDNDCGDHSDEDGCSKYLPRGSGRWWRGTWGWGARTRLMEYFLHQLCRTQRVGLLQA

SEQ ID NO: 1611 - DNA, 39725 bp, Homo sapiens
  source (1)..(39725)
  CDS (201)..(409)
  CDS (1705)..(1966)
  CDS (3861)..(4281)
  CDS (6128)..(6513)
  CDS (13450)..(13658)
  CDS (15063)..(15253)
  CDS (15939)..(16148)
  CDS (20042)..(20167)
  CDS (22121)..(22419)
  CDS (22509)..(22680)
  CDS (23434)..(23601)
  CDS (24070)..(24306)
  CDS (27349)..(27643)
  CDS (28259)..(28404)
  CDS (28906)..(29142)
  CDS (30237)..(30376)
  CDS (36366)..(36636)
  CDS (36745)..(36988)
  CDS (39264)..(39525)
cccacctacttgggaggctaaggctggagaatcgcttgaacccagggggcagaggttgcagtgagccgagatcgcaccattgcactccaggctgggcaagaagagcgaaactccgtctcaaaaaaaaaaaaaaagatgctggttcctaaaatgtggcccttttcctcctcacctgctgccagaccatcagccgcgccttcatgaacgggagctcggtggagcacgtggtggagtttggccttgactaccccgagggcatggccgttgactggatgggcaagaacctctactgggccgacactgggaccaacagaatcgaagtggcgcggctggacgggcagttccggcaagtcctcgtgtggagggacttggacaacccgaggtcgctggccctggatcccaccaaggggtaagtgtttgcctgtcccgtgcgtccttgtgttcacctcgtatgagacagtgcgggggtgccaactgggcaaggtggcaggctgtccgtgtggccctcagtgattagagctgtactgatgtcattagccttgatggtggccaggactggtagggccctcagaggtcatggagttccttcgtggagcgggtgctgaggctgtatcaggcacagtgctggctgctttcacctgggccgtctcaccgaagtgtccatggagcctgcgtagggtgggtatctgtgtcgattttacagatgcagaaacaggctcagagaaaccgagtgacttccctaaggtcacatacccagttagagcagagctgggccaggaagtgctgtctcaggctcctgaccaggtctccttgctttgcactcttgccaaaaccatgatccagaactgactttgaggtccccggacctcaggctcctccgaaatggcctcttggaggctgctgagccacagcttaggacccacctcgagaggcaaatgtgctttgagctgccaggcgtcctgggggccctgccttgggcacggggttcagacaggccccagatgtgtggggcgtctttctggacttgagttttcttttctgtgtggtggacacagtgctcaccccttaaagcacctgtgatgtgtgcagcagcccaatccctgcctgtcgcctgttctgctagggaaggaaggaagacttcaggatggcaggacaacagaaagaggtccaggttttagagcaagggcaggtcaaacttagaaaattctggaatgaggatgtgcatttcctcttctggatctgctaaaagaagagggaaggaggggctgctgggggaggagcccagagccgagtttacatccggatcccgcaaggcctcccctgccctgaggtcttgttttgtgatgtgcttgtgtccatcctggtttctgccgtgtccccaacatccggccaagcttaggtggatgttccagcacacactcaccctgtctgtgcacctgtttttgtgtccgtaagtgggtatttactcaccttacgagtgagccactgtgggaattcagggaggtggcgcagtgaccacccctggagggatatgtgtgtggcaggggtcgagggtctcgcccttccctgcttcctgcgcgtggctttctccaggacggggagggctgagctgaagaggtggggacagttgcgtccccccgccacccactgtcctgcggtgagagcagactcactgagcctgcccttctcccttgtgccttccagctacatctactggaccgagtggggcggcaagccgaggatcgtgcgggccttcatggacgggaccaactgcatgacgctggtggacaaggtgggccgggccaacgacctcaccattgactacgctgaccagcgcctctactggaccgacctggacaccaacatgatcgagtcgtccaacatgctgggtgagggccgggctggggccttctggtcatggagggcggggcagccgggcgttggccacctcccagcctcgccgcacgtaccctgtggcctgcaagttccccaacctggcaggagctgtggccacacccacgactgcccagcagcctcaccctctgctgtgggagttgtccccgtccacccctgggtgcctttgctgcagttatgtcgggagaggctctggtgacagctgtttcctgtgcacctgctgggcactaggtcccagctaatccctgtgccaggactctaatttcaccctaacacacatggtggttttcattgctggggaagctgaggcctgagcacatgacttgccttaggtcacatagctggtgagttcaggatcccccagagataccagggccagcactcgatccccacccagccctgaaccccaccatgtgctgggattgtgctgggagtgtccacacgcctgggaccccagggctggtgctctcatctcctttttccagatcatgagaatgaggctcagggaagtttgaaaaaaacctatcccaagtcacacagcaacaggagcaggatttgaacccagaaaaggggaccgcacactctgttctgctagagtagttagctgtcctgggtgatatggcaggtgacaggggcaactgtgcttaacaaaggaacccccatcccccctgccaagttgggagactagaaggtcaggggcagaagctctgaagggccaggtgcagtggctgacacctctaatcccagcactttgtgaggccaaggcgggcagatgatttgagcccaggagttcaagatcagcctgggtaatgtagtgagacgccatctctacaaaaaaattttttaaaaattagctgggcatggtggttcatgcctgtagtccaagctacttgggaggctcaggtgggaggattgcttgagcccaggaggttgaggttgtggtgagctgtgatcatgccactgcactccagcctgggcaatagagtgagaccgtctccaaaaaaaaaaaaagaagaagaaaaagaagctctgaggctccaagtccccaggcaccccttggcttgagggcagacaagggaggagagggtcacctgggcagccctgacttttgtcccctggcaaagggaccttcagtgaccttggccctaggagagcctctgagcacgtcagccatgtcgaaccgctcaggaagggcagcaagaatttggcttctgacctctgcctctcctactcgccatctgcactgggtgtggttgtgcccattttacagatgaggaggctggggcatcgaccagctgaatgccttgtcccaggtactgcgtaggcagagctggcagttgaaccccgtgtcctggttgtcgctgggggtgggctgcaccctgacttgtgaggccagtagcaaggtttgcacgtgacttcgtgaccgtcacccagctctgcagcacatcccgtgacccagctcatccaggccgcatgcaaacctgttgccaggcgagaaaccagtcaccgcacagctgtggttgcctgaaatgattaagctcattaatcaccccggagtgaggacagactcagatgaaaaccagcaaaagccctggaaactcatgtgaccctgccaatgagggcggccatgtgcattgcagcctggccgtcactcctcggtacgtgttttggacttaaacgctccggatgtttactgagtgcttgattaataacatggaaggcctggtctcattgctgtgggagtgaaggatgcacagccaggcctgacatgatgagaacaagaacctggagtctcgctgcctgggtggtaatcctggccctgccacttagcaactgtgtgactgtagccaggtcacttaattttgctagatcctgcctgcgcttcagtggatcttgctggttttccaaggtggccaaacactttaaggcattcatgtggtcgctaggctgcagggttgaaccctggctcaccccgcagggcgccgtgtgctctgtggcctggctgtgcctttgctgacaccgtgcccgtgtgtgttcatgcaggtcaggagcgggtcgtgattgccgacgatctcccgcacccgttcggtctgacgcagtacagcgattatatctactggacagactggaatctgcacagcattgagcgggccgacaagactagcggccggaaccgcaccctcatccagggccacctggacttcgtgatggacatcctggtgttccactcctcccgccaggatggcctcaatgactgtatgcacaacaacgggcagtgtgggcagctgtgccttgccatccccggcggccaccgctgcggctgcgcctcacactacaccctggaccccagcagccgcaactgcagccgtaagtgcctcatggtcccccgcacctcactccctcgttagatcaggctggttctgggagctgacgctgaaaggagcttctcatctggggttcctgggtgtacatagatggttgggtaggttgtgcactgcacaagctgcatgatgctacctgggggtccaggtccaggctggatggacttgttgcttcatcaggacatagataaatggccaaaactcctcagctggaaggtcctgggcaggatctttgggtgtgaaaaccagtcacaggggaagggtgcttgctcatactgccagcacagtgctgagtgctttccatagcgctcgtttactcctcaagcctggagggtggggagtagcatggtcccatttcacgtacaaggaacccgatgcacagagaggtgtggcaacccatccaaggccatacaactggggtgggttgagccggggttgactgtggcaggctggctcaagagtccctgctcctgaacccttgccaggcagcctggcatcagctcggggaatttttgccctgacccttggaagcaagtgggcctctttgttctcatgtcagtgatgagaagagtgactttcctatggcccctctggagtacaggtgtttcctgttggcgggctcttcccccatgacatcagcagcgagctggttatgattccctacgcagaacttgatagtttataaagctctttgtcatccaggccccgttggagtctcacgcagacctggtcgcaggcggggctggtcttgcctgtcccagctgcatggatggggaacttgaggcttgcaaaggttaaggggctgttcgaggcccaggctggcaggagatgggcctgggccagagtctgggacttcccatgcctgggctgtctttggtcctgttgctcaccatccctccctggggccatgaccttagagagccaaatggaggtgcaggtaacccacggcaaggaggggttgccatgactcagagtccccgtcctgtggccggcagtacctggtgcaacgacttggatttcagaccagccactgtagcccgctgacggtgcgctcgaagtgccacagcttctgaagccaggcaggactcaggccaggagactctgttagctgttgagagggagaggccaacggatgttctggttctgctagagagctggttcttcggatcctggtaccagtgcactgagaggaggcccagcttgattctggggctgccttgtggtggcatgtgctgctcactgacaccctcgaggagtgtcttctctcgggcttgttgactgtgcccggttttccgcagttcactggtgcacacataggcacatagcaaaccgcacacacagtcgtgggtatgagtttcactacattccaccaccagtgttcactaccattacctgccttccgtcttaagtgttcatcatttaaaaataaatttattgggctggacgcggtggctcatgactgttatcccagcactttgggaggctgaggcgggcagatcacctgaggtcaggagttcaagaccagcctggccaatatggtgaaactccatctctactaaaaatacaaaattagctgggcatggtggggcatgcctataatcccagctactcaggaggctgaggcaggagaatggtgtgaacccgagaggcagagcttacagtgagcccagatagcaccactgcagtccagcgtgggcaacagtgcgagactccatctcaaaaaaaaaataaataaataaaagaaaaataaatttatgatctatttcaaaaataacacatgtactttgaaacagcagagacacatatgacacggagaatgaaattccccatagcgcacccccaagagacagccctggtccccccgtctttcccgtggacctccagcggggcagatgctgagccgcctgttgtcgagtggcgtgctatcccgtcctccagctcctctgtggcttacagacacccacctgcagccctgtctttgcctcctctagcgcccaccaccttcttgctgttcagccagaaatctgccatcagtcggatgatcccggacgaccagcacagcccggatctcatcctgcccctgcatggactgaggaacgtcaaagccatcgactatgacccactggacaagttcatctactgggtggatgggcgccagaacatcaagcgagccaaggacgacgggacccaggcaggtgccctgtgggaagggtgcggggtgtgcttcccaaggcgctcctcttgctggtttccaggctgctgcccctgtccttagcagagggaggaaacagaggatggctctgggtgaatgatgacttgggcttcgattatgtagtcacagggtatgaccctgagatgcgtggaaccccgagactgtgattatatgtagaaactgggtttccccgttgtttaagtagtcatggtggggtcagaccccacaggacttttgtcttttcaagaaagaaaatggtcgtgtgtcatgcaggggtagttggtactggttaatccaggtttatcctttattttgtgggaactgtacagtcatttctgctacaatgctgtatatgctcttctgaaagacacctatgcaaaatcgcacagtaaaaatgacacaactcatagggaaagcggggccagggcacagccctcaaaatctccatcaatgacatgtaagaaaagagaggaacctgggaaatagcaaagtgccttttgcacattaaatggttagctatatcccacaatactgtgcattcgtaaacgttaatgctgcaataaatacggcacttcaccttgggaagatctggagttggcttatgagtgtggaagggtgtagcgcatgagtttttgtgaaacactggaaggaggattgtgggaaatcaaatggaaagttctcaccccaggcgtggagaagagtgggtcatggccccagcagtgagcccagggaggtcagagacggaggtgtgtgtgtgggtgtgaccctgcgcagttccctgccggctgtagttttttgcattcgcttaatgtttctcgtggaggaaattgtgcatgagcaaatgtgaaaccgtgctgtgctcaaattgtcctaatacatcattgcattggaacagattggcttttttttttttttttttttttttttttttttgagatggagtctcactctgtcaccagcctggagtgcagtggcatgatcttggctcactgcaacctttgcctcctatgttcaagtgattttcctgcctcagcctcctgagtaactgggattacaggcatgagccaccgcggccggccagatttgcatttttgaaacaactgctaggctgggcgcggtggctcacacctgtaatcccagcactgtgggaggccgaggcaggtggatcacctgaggtcaggggttcgagaccagcctggccaacatggtgaaaccccgtctctactgaatatacaaaaatcagctgggtgtggtggcgggtgcctgtaatcccagctactcaggaggctgaggcaggagaattgcttgaacccaggaggcagaggttgcggtgagccgagatcacaccattgcactccagcctgggcaacaagagcaaaactccatctcaaaaaataaaaaatagaaaaacaagtgctgtagcggaagtgagcactttgcggagtcaggcttgtgtggcctgttccacaaatgatgtgctcacggtggcctcaggcccacctggagtctgcagcatggggcacaacaggttcattagtgtagaattccaggacaggcctggctcctaagcagccttcttttacaaaaactgcagagcccgcctgtatcctagcactttgggaggccgaagtgggtggatcacgaggtcaggagttcaagaccagcctggccaacatggtgaaaccccatctctactaaatatacgaaaattagctgggtgtggtggcacgcgcctgtagtcccagctactcgggaggctgaggcagaattgcttgaacctgggaggtggaggttgcagggatctgagaccatgtcattgcactccagcctgggcaacagagcgagacgccatctcaaaaaaaaaaaacctacagagccacacggcctctttctccaccgagtgttggtgtgggagcttgtgttattgtggtgaaatcttggtactttcttgaggcagagagaggctgagcgcctggagagactttcacatgggtcgccatgtccgccgtcggtttcgctgttgtgctccccatctgaaggctggtgccgtccagacaggctggacgcccctttccaccagatccttcctcccgcagcagtttctagttacgttgtactgtgaggtctgtgtccttggttgatggcaaaagtcagccgaattgaaattcagagccatgcctggctccctggagcttctctcctgggcagctgtgatcattgcctctgctgtggtgtgggtggtggaaatggattcctttcatcttgcttgctacaggtgactgtcacgtggagtcctttggagagagggacgtgttaattgatggatgtggctcccatgctgagaaagctcctgggcgtacattgccttagagtttcattggagctgcgttcttttatggtgtctgctaggcagaagtgatgaagacttggaagaaaacccagaaggttttccacttaatttggaaaatgtgcttttcccctcctgtgtcttttgctaaggtccagcctcctgcagcctccccgctctgtggactctggctttgattctttattaggagtccccctgctcccccaaaagatggtgtctaaattatcatccaattggccgaggttttgttttctattaattgtttttattttttattgtggtaaatttatataacataaaatttgccattttaattgttttgttattgttgtttttgagacagggtctcaccccagtgcccaggctggagtgcagtggtgcgatcatggctcactgcagcctcagcctccagggctccagtgatcctctcacctcagcctctctagtagccgggactacaggcatacactaccacatctggctgattttttgtattttttttttattgtagagacccgctatgttgcccaggctggtctcaactcctggactcaagccatcctcccacctcaccctcccaaagtgctgggattacaggcatgagccacaacacccagccattttaatttttttttttttttttgagatggagtctcactctatcgcccaggctggagtgcagtggcgtggtatcaactcactgcaacctctgcctcccaggttcaagcgactctcctgcctcagcctcctcccgagtagctgggattacaggtgcccatcactatgcctggctaatttttgtattttttagcagagacggggtttcaccatgttggccaggctggtcttgaactcctaacctggtgatccgcccgcctcggcctcccaaaatgctgagattacaggtgtgagccaccgtgcccggcctttttttgtttttgagacagggtcttgccctgtcacccagactggagtgcaatggtgggctcttggctcactgcagcctccgcctcccaggctcaagttgtgcacctccacacctggctaactgtattttatgtagagacagatttcaccatgttgcccaggctgggcttgaaatggactcaagcagtccacccacctcagcctcccaaagtgctgagattacaggcgcgagccaccgcacccagcccattttacctattctgcagttgacagttcagtggcattcagtcagttcacgaggtaaccatcactgccattcatctccagactacttcaccttctcggcagatgtccgaaactgtccgcattgaacacactcctcatctccctctgacagccaccattctactttgtatctctctctgccttctctaggtaactcatgtaagtggaattataccaatatttgcccttgtgtgactggcttctttcatgtgacatggtgtcctcaaggttcatctgtgttatagcctgtgtcagaatttccttccttaaagcctgaataataacccgttgtaaaggctgggcgcggtggctcacaccctctaatcccagcattttgggagtccgaggtgggcagatcacttgaggtcaggagtttgagaccagcctggccaacatagtgaaaccctggctctactaaaagtacaaaattagctgggtgtggtggcgcgcacctgtaatcccagttactcaggaggctgaggcaggagaatcgcttgtacccgggaggcagaggttgcagtgaaccaagattgtgcctctgcagtccagcctgggtaacagagtgagacttcctgtctcaaaaaaaaaaaaaatcatcggatggatggacggaccacttcttgttatttatccatccacgggtgctaggtttcttccacctttggttgtcgtgaataaggccactatgaacatttccttccgtggtgaaggttttgtactagtgaggaaaaggcgtgtttgtggtgttgcataggattctggtaagaaagtttgcactaaccataagtatttgtactacattaaaatgaaagctcaggggccgggcgcggtggctcacgcctgtaatcccagcactttgggaggccagggcgggcggatcatgaggtcaggagatcaagaccatcctggccaacatggtgaaaccccgtctctactaaaaataccaaaaaactagccaggtgtggtggcgggcacctgtagtcccagctacttgggaggctgaggcaggagaatggcgtgaacccgggaggcggagcttgcggtgagccgagatcgcttcactgcactcgagcctgggcaacagagcaagactccgtctcacgcaaaactctgtctcacgcaagactccgtctcaaaaaaaaaaagagttcagggtttatgaaactggccagccgcgtaaagtttgctgtgttgtttttgtgcccgggaggagtgtggccagggtgtcacgtcacacagtacacgtttctcagatggtggttctccagactgctgtcccaaagtctgtttttgcatctggttcccacagacccaccctccacggtgagcctgattttggccagggtagctggaatcttgcttgtctttcagcccggcagctgtaccagtccagggtccacagctagtggcttttaggaaggaatttgttcagttggctttgacacatggccccctagggtccacagctctgtagtgatgtggatgttgttatctacaaagacacatgatccttcgtgtccagatgaaagtgatgatgtctttgcagctgcccagcaaggctgtgtgtgtgtgtgtgtgtgtgtgtgtgtgtgtgtgtggtgtgtgtgtggtgtgtgtgtgtgtatgggggagggaggcaccctttccatctgggggtgtgtgtgtgtggggtgtgtgtgtgtgtgtgcgcgtgtgtgtggtgtgtggtgtgtgtgtgtgtatgggggaggcaccctttccatctgggtccaagagactgggcctggggaagacgcttctttttatctacttagagactttgttttatttgtatttttttgagacagggtctcactctgtcacccaggctggggtatggtgatatgagcatagctcactgcagcctcggcctcccaggctgaagcgatcctcccacctcagccttctgaatagctgggactgtaggcgtgcgtcaccatactgagctattgttttttttgtttggttggtttaattttttttgatacagatggagtcttgctatgttgcccagactagtctcaaactcctgaactcaagtgattctcccacctcagtttcccgacattctgggatcacaggtgtgagccactgctgtctccctgttttattaactgctgaaagacctagataaagaaagtctgaaaagacttactatcagagcaccatcctaagatgattccctctgactcaatggagagggaggggagcttttccttcaggcctgggtggcaggagcccaggtgctccaggccccatttgccccaggccaaatcactcgggaacttggatgcagctgtctttcagggtaacccaaaggaaccagatccccgcaggcagtaggcttctgggctgtcctctcctcctacgtcagctcagtaagagcccttcgaagggatgctgtgtcggaggccccaaaagcccaggctcatccctgagatgcacagggtgggctgggcttaggcagcgctcgagcatctcctggacggtgaccccagagagtgtggagacggagagtccttgagagtcactgagagacgtggctgccctgccttcccaagaggggctctgagtcattccccacactcacctgcccctacccaccctcacctggcccccagcctcacctacccccacatctgtaccgatccctttacccgcaccttccctacccaccctcacctcccctgtaccttcacctcccccactcacccgcccctgcaccctcacctgtcccccaccttcacctaacccccaccctcacctgccctcccctcacctggcctccttccgttggggaaggggttgtaaggggcggcccccaaactgtctgtcctggtgccctgcagagaaaacagtacgtgagggccgcagtccaaaagcttgagtcctggaaggtggaggagacagggatgtgttgggaagggccccatggtcttggatcccttctcgactgtcaatggggccttcatgggagcgccagtctagtgatgcacagctgggtgcccggcgggtggctgaggaggcctaaagtccgaggcggcaagagctcttccagaggctgttgtcctaatcgctctggcatactcaggcgggcacgtagttaggagctgattggagaggagagacccccacaccaatactgggatttgactttcaggctaaacttgagaagtgtggcctctgctgtcctgccagagctctccagccagtgcccagggctctccagccagtgcccgggggtctccaccagtgcccgggggtctccgccagtgccaggggtctccgccagtgcccaggggtctccgccagtgctcaggagtcttggtttctttgtcttacagccctttgttttgacctctctgagccaaggccaaaacccagacaggcagccccacgacctcagcatcgacatctacagccggacactgttctggacgtgcgaggccaccaataccatcaacgtccacaggctgagcggggaagccatgggggtggtgctgcgtggggaccgcgacaagcccagggccatcgtcgtcaacgcggagcgagggtaggaggccaacgggtgggtgggggtgctgcccgtccaggcgtgcccgccgtgtcttctgccgaatgccagcctctcacaggctggggagactttccaccctggggatccaatgggtggctttccagggtcccaaaagcaaacacaggctctttcacagcccctccaggaaagcagaaagccccaagggctggaagggaagggggagctctgctgagaggttacaaggcagcgctggccgacgggagttgcagttgataggttttgtatcatccttgttaaacttgaaccctgtgcagaaatcccttccacggcatgggggctgcctgttgactcgctcctgttccaccacagggagctcctgggcttcttcctcccagaggcccccgacgctcccacctgttggtcgtcagagcttctggttggtgggaaggcacccaggaccttgaggtctccagagagaaaagccagggaaagagggagaccgaaacccatgtgacatgaaactcaggctccaaactgagcacgggaacgtttggggacaggagcgcgatggccttcctcagatagctggggggctggcatgaagacgggagctacagccagcacaggtcctgggccgggagcccagagattgagccctgactctgtcacttactggccacgtgaccttgggcgggtggcatagcctcttggagactcagtttcctcattggtaggagtgacggccacagtggtgcggcctctgcagcacacggggggctcggtgggcggaagccccgggtctataaggcggctgtgcaggagccagccgagctggtctcccaacagccagggctccggggtccttagcagctgtggggggcctgcacctgtttcccatggctgctgtcagaaattaccagaagccaggtggctgagagtaatggacacttgttctctcacagttcctgagggctgaagcccgagatcgaggtgtgggcagggccctgcgccctctgaaggctctgagggaacctttgggcttctggtggctccaggcaccccttgacttgtggtcctgtcactccagtctctctgtctggctgcacatggcgtggcctcttctgtaccattgaaggacacttcagttggatttagggcctaccctcacccattgtggtcgtatcttgatccttcatgacatttgtaaagaccctgcttccaaataagctcacattctgaggttctggggtgagcgggaatttggagagcattgttcaactagtatagaatgtgacctgtcagcctcgggcagccctgagaggcaggggctttccacagcccagctgggtgccctgggctccgtgctgtccgaggagacgccatccccacacccgtccttcacccgccaccctcccgcaggtacctgtacttcaccaacatgcaggaccgggcagccaagatcgaacgcgcagccctggacggcaccgagcgcgaggtcctcttcaccaccggcctcatccgccctgtggccctggtggtagacaacacactgggcaagctgttctgggtggacgcggacctgaagcgcattgagagctgtgacctgtcaggtacgcgccccggggcctgccctaaccgcagacacccggccttcattgtcagtaatggcagcagctgccacattgtccgagacctgccgtgagcccagtgccgcgccaggggctttgtgtgtagcgtgttttgtcctcacactgacagctgtaggctggggttctgagtgagccccacagggcagaggcagaaaatgagtctcagagagggtgagcgagctgcttggggccccacagcaggagatggagcaggactgcagcctagcctctgcccccagcacctgcgcaagaagctgctctgctctggactgtgttaggctgcgagggctggagagaaatgagagttggtgcttagagagggggcgcaggtccccatggcttttcctcttatgatgaggtagatgggtgaagggaggggccatgcttgcaggggccagtgaccgaggcccgccgttggaactgatggccttcatcccgagcccagcccaggtgggagcagggctttccgagggcttgtcttgggtcggcctgcttccagggactctgctgcagctcccacccctgtccaaagcatggaatcccccaggctccctggcagtcctgtcaacctctgtcctcccaagctgagtgtggggcaagttctggaggtcagcactgctcaggggggcccacgggctgcttgcaggggccaaccgcctgaccctggaggacgccaacatcgtgcagcctctgggcctgaccatccttggcaagcatctctactggatcgaccgccagcagcagatgatcgagcgtgtggagaagaccaccggggacaagcggactcgcatccagggccgtgtcgcccacctcactggcatccatgcagtggaggaagtcagcctggaggagttctgtacgtgggggctggcagtggggtgggcagggtggcctctaaacccgacccctggaggaggctggaggccagtgcaagatcctgtgtggcctcagccaggcggtggtctctgccagatgccaactgttgcccgctggggttcagcgacatgtccgaatgtcccgaggcctctgaggttgttttcttttgccgcagaacaaatcaccacgaacagcgttttaagacaacaccaactctttttttttttttttttttgagtcaggatcttgctctgttgcccaggctggggtgccctggtgcaaacacagttcactgcagcctcgacctctgggcttaattaagtgaacaccttgcctcagcctcccaggtagctgggactacaggtgggcaccaccacacctggctaatttttttttgtagagacggggtttccccatgttgcccaggctggtctgcaactcctgggcacaagctatctgcctgctgtggcctcccaaagtgctaggattataggtgtgagccactggcctgacaacacccacggattgtctctcagttctgtaaggcaaagtccaggcacagcgtggctcacctgggttctctgctcagggtctcacggggccagaatcaaggtgtcaggaacgctgggccctcagcggaggctctgtggagaaattagcttccttgctcactcagcaggtagcagttgtgggatcgaggttctgttttctctctggttattggtcggggaccactctcagctcctagaggccaccacaggtccttgccccgtggccctctctgcctcagcagtgggggctccctgcgtcagtccctcccacaccttgagtctctctgatttgcttctaaagggccctgtgattcggctcagccacctttagattaggttagcctcccctttgatagactccaagtcggctgattaataaccttaatcacatctgcagaatcccttctgccacataaggtcatgacgccgtgctggggactggggtgggaaattacggggtcatttaggattctgcctgccactgccttgctgtgtcccagggcttgggggaggggcctccacagctgggaccacagtccttcctcccctccatggtaaccatctgaggattacttgagaccagcctgggcaacatggtgagaacccatccctacaaaaaatacaaacaaaaagggaccaggctgggcttggtggctcatgcctataatcccagcactttgggagaccaaggtgggctgatcacttgaggttgggagttcgagaccagcctgcccaacatagtgaaatcccgtctctactaaaaatacaaaaattagctgggtgtggtggcaggcgcctgtattcccagctactggggaggctgaggtgggagaattacttgaacctgggaggcggaagttgcagtgagccaaaattacgccactgcactccagcctaggcaatagagtgagactccgtctcaaaaaaaaaaaagggccaggggtggtagtgacaaagagaccctatcccaaaaaaaccgaacactgaatccttgagactgagtaaggacactgtgaaatttttctgggtggggcagggaacagagcgtcttctgtcatttcttccacctgggtgtggtcagctctccctccaagctgcctcctcttcttctcattgtccgggtgttggacacatttggttaactggatagaataacgcgagttcccagggacttggtccatttgctattttattttattttattttattttattttatttatttatttatttatttatttatttattgagatggagtttcgtttttgtcgcccaggctggagtgcagtggcgcgatctcggttcactgcaacctctgcctcccaggttcaagtgattctcctacctcagccttccaagtaactgggattacaggcacccaccaccataccaggctaatttttttgtatttttagtagagacgggttttcgccattttgcccaggctggtcttcaactcctagcctcaggtgatccacgcacctcggcctcccaaagtgctgggattacaggcatgagccaccacgcctggcaccatttgctattttaattcccatgtgtattagtgtcccacggctgctgtaacaaatgaccacaaactggatggcttaaagcaacagaaatggattcccccaatgtgctggagaccagaagcctgcgaccaaactgttgggagggctgtgcttcctctgggggctccagggaggatctatttgttggcccttccagtgctgtgggtgccagcgttccacacttgtggatgcgccgcctcaacctctgcccatcttcatgtgtccatctcctttgtgtctgcgtctttacctcttcttcttgtctgtgttgcctcttataaggacgtttgtcattgggtttagggcccacccaaatcatccgagatgacctcgtcttgagatccttaacctgcaaagaccctttttccaaaaaaaggttatgctcacagattctaggccttaagacatgggtgtatctttctggggggcactatccaaccccttatacaatgaaagacgggaagagggccaggtgtggtagttcacgcctgtaatctcagcactttaggaagctgaagcgggaggatcacttgagcccaggagtttacaagtagctaggcaacatgatgagaccccatttctacaaaaagtgaaaaaaaaaaaaaaaaaaaaaaagccaggtgtggtggctcacacctgtaatcccagcactttgggaggctgaggcaggcagatcacgaggtcaggagattgagaccatcctggctaacacggtgaaaccccgtctctactaaaaatacaaaaaattatggccgggcgcagtggctcccgcctgtaatcccagcactttgggaggccgaggtgggtgaattacaaggtcaagagatcgagaccatcttggctaacacggtgaaaccccatcaagatcacaaggtcaagagatggagaccatcctggctaacacggtgaaaccccgtctctactaaaaatacaaaaaattagccgggcatggtagcgggcgcctgtagtcccagctgctcgggaggctgaggcaggagaatggcgtgaacccgggaggcggagcttgcggtgagccgagatcgctccatgccactgcactccagcctgggtgacagagtgagactccgtctcaaaaaaaaaaaaaaaaaaaaaaaaaaaagaaaattagccaggcacagtggcaggtgcctattgtcccagctacttgggaggctaaggcaggagaatggcatgaacccgggaggtggagtttgcagtgagccgagatcatgccactgcgctccagcctgggcgatagagcaagactctgtctcaaaaaaaaaagccaggcatggtggtgcatgcctgtagtcccagctactcaagaggctgaggcaggagggttgttcgacccacggagatcaaggctacagtgagccatgatcgcaccactgccctccagcctgggtgacagagtgtgaccctgtctcaaagtaagtaaataggaggagagacaagtgggcagttcagactgatggtatgggcacagtagagactggtgcagacaggctggcctgtgatgtcaagcaacttctgtaattgtttccggcatccatttgtgtgtcaatttccgtgtcagtaggaagactctgtaggctgccaagaggaataagtgggaggatcctcccagagaggccgggcctgcaggagggccagttctcatgagttctcatttggcccctaccctccaggctgtggttctgaggtgggagacagagcctgacctctgtttgtcttgttttgtctttgcagcagcccacccatgtgcccgtgacaatggtggctgctcccacatctgtattgccaagggtgatgggacaccacggtgctcatgcccagtccacctcgtgctcctgcagaacctgctgacctgtggaggtaggtgtgacctaggtgctcctttggggtgatggacaggtacctgattctctgcctgctaggctgctgcctggcatccttttaaaatcacagtccctgtggcatccagtttccaaagctgattgtgtcttcctttgccctcctttcttttctactatgtgcattcggtgctatgaattttcctctaagtactgcgtttcctgcatctcacaaattttgttacattttcattttcaggtagtttgaatatttttacacttctcctgagatgacatctttggctcatgtgttatttagaagtgttgcttagtttctaaagagttggggcttttccagctgtctctctgcaactgatttctaatttaattctactgtagtctgagagcttattttatatgatttctgttattttaaatgtgttgggtgtggtgtttttgttgttattgtttttgtgtctttttgttttgttttgcttcgtttgttttgtttttgagacagtgtcttgctctgtcactcaggctggagtgcaatggcgcgatctcagctcaccgcaacctctgcctcccgggttcaagtgatcctcttgcctcagcctcctgagtagctgggattacaggtgcacgccaccatacccagctaatttttgtatttttagtagagacggggtttcaccatgttggtcaggctggtctcgaactcctgacctcgtgatccgcccacctcggcctcccaaagtgctgggattataggcgtgagccactgtgcctggccattaggtgtgttttatcacccagcatcatgcagtttatcttggtgaatgttctgtgtactcttgaaaagaatgtggattctgctgttgttgggtggagtgttccagaaacatcaattagatccagttggttaatagtgctcatcaggttgtctctatccttccttcctgactgcctgcttgagctgtcagttattgacaggggtgtggagtctccaactctaatggtggatttgtttatttctcctagtagttctatctttttctctccttctacccttgatcctcttctccccctagggcttcctggtgttagtggtgggagagtggggtagtgaagaacctggactttagggccaaagaggccagggttcaaatcctggctctgtcacttcccagttgagtgaccctggctggtgcctgaatctctgtgagcctccacttcctcctctgtgaaattgagagcacttacctggcaggctgtcatgggcatcaagtaacagggcactccacctggaccctgacacgtgatgcacaggaatgccagctgctatgccatgggtgtggcagtagtaataaagtgaccatctgtatcctcaccacagtgaagcctgtccagggctttctctcctatgcccccatgcctccaggtggccttggatcctgttggttctgtgctctgctcagcgacctttctcccgtgggagttcctgggggttcagcttcatcctacagacagcagcacacactggctgtgcaccctttttttttttttttttttttttttgagatggagtctcgcttttttcgcgcaggctgaagtgcagtggtgtgatcttggctcactgcaacctctacctcctgggttcaagtgattttcctgcctcaccctcccaagtagctgggattacaggctcccaccaccacgcccggctaatttttgtattttcagtagagatggtgtttcaccatgttggccaggatggtcttgaactcctgacctcaggtgatccgcccacctcagcctcccaaagtgcagggattacaggcgtgagccaccacacccggagtgccggttgtttttagcagtttgtcttgttcctggagagactggctcctgcccaggagctcggggagtagggccgcggggtgctgcctcacacctcgagtttggccgtaagcagaggggacattttgtgactgtccccctcctgagcttcccagcagcttttctccaagttacagcccaaaagctcaggtggatttgcaacccaacggtgtctgtgcacctcccactgatgcccgaactgccctggccaagaaacggggccgtcagaacgctgcactaactgcagccttgggcctccatgccagaggccatgcccttccatccaccaccccctggcctgggccctgggccctcctggctcgggaactccaggccccttcctcacggctcgagagacgtgtatttaccgcacaggtgcttgtcattctcttgtggcctcttctccagggagatcacagaaggacagggcctcactgaggtctcggacatggaccctttgatagtggcaggagccaggctgggcaagaggcggccacagtcacctcagcagtgccatcaccaccgccattcagcccttccctgagccgggcgcgcccctggctctggccccagtgtcccagttacagctcacaggagcttgtggtgcccagcggctgcttctgattgagagtcgaggtcggaggctttgggaggctgagaggctgctcggtttcacaactgctgagggagacttgggctccatctcaggtctgccccatgtcgccctcaacctccagccaccggtcctccgtgtcccccatggccaggcacggcttgcagacatctgtcgttggctcctctcagccgtcgtgggctgaccctggcacgtcctcctgtggctgagcccagtggggacagctgcttccttttattaccctagaactctcgtctttgatcaggccccctcccctatgccacacagtccctgtcactcgggtgagcccagtagtcatggggaaggcctgcgggttccaaacatccaaaggcttgcgtgcagcatgacagcttgaaaccgatgttttttaccttgatcagatttcagcttggcgggggctttgctcagctttcagtgaggcctgggccgatttcccagcatcccctcctgaggccagcctctgtttcctgtgattttctgcacaaagtgggagggaggagtcctaggaaatggggggccacctcgaagcctaggcctcctctggcttctctgtgccagtgcccccacgctttgtgtctgtgtccccagcccatgggactctgctattccctgagtgctgccgcatgcccagcccgcactgaggacgtggagccccgaggggcaggatggcctccatggtcacacgtaggaagtggcctccaccctccgatgatcctctccctcctccctttcagcgccctccccgggggtgtcctcagccctcctgcctgtgctttgtcccgtcttctgcaggcgcctgggacgtgctgacaggtcctctgccggctcctgccttgctatgcgcacgctggtcaccacagaggcctggcccttcttctgtagcagtcccacacccgcaacaggtgtggctgctgaccacctgctttctgcccctctggtcctgaggagggcgcagtgggcactcaggcgtggctgagcagatgtgtgttgccgggaggaggaaggactgctccagtcagggctgaatttcccacccggagcatttctgctgtatttggtgtagcgcctgctgcttaaagctctgattcccagttggcaccctttcccttctgcattgaaaaacatacggatgcatgtcttcttgcagtgaatgtgtattctcccagcctctcttctgggttggggctggaggtggagcggcacacaggagccgcagcgatggaggatgtgcgggtgcagcaccccgtacagcagggatgccaaacccgcgctgagtccctctcaacttctgctttgaagcccagtcacgccattgcctgggttttgctgggcggggctgcgtgtgatgttctcctctgtccctcccccagagccgcccacctgctccccggaccagtttgcatgtgccacaggggagatcgactgtatccccggggcctggcgctgtgacggctttcccgagtgcgatgaccagagcgacgaggagggctgccccgtgtgctccgccgcccagttcccctgcgcgcggggtcagtgtgtggacctgcgcctgcgctgcgacggcgaggcagactgtcaggaccgctcagacgaggcggactgtgacggtgaggccctccccgtcaaggctctgccaagaccctggccctgccctccgggatacgagcttggggctgcctccggcctcacaggagtaggggctctgaaaacctttgcttgcagggagattgccaagtctgtcttttaggcccaacaaggaaaactctgcagttccacccatcctgtcccaccaggtagtgtggcttgaaggcagactgtgagggtctatctcaccttcctgcattaggtcaggagtttcacagaaacctgaggcacattcaggggtgggctgcagaggtccatggctcacaccctggaaaatccgcccccaaaagacagtgctgtctccactgaccagtctgtgggatagtgcttaagcctgagtggtttctatcaacatgtagaatcaggaggtataaagagatttgctcaggcatcctgggccctctctgaccagcaggatcttcctttagatcttgacagtgaaacacatctcttctgtgccccctgtgagttttctttcattcattcattcattcattcattcattcattcattcgagacagagtcttgctctgtcacccaggctggagtgccctggtgtaatctcggctcactgcaacctctgcctccagggttcaatcgattctcctgcctcagcctcccgagtagctgggatgacaggtgcgcaccaccatgcctggctaatttttgtatttttagtagagacagggtttcaccatgttggccaggctggtctcgaactcctgacctcaggtgatccgcccgcctcagcctcccaaagtgctgggattacaggcatgagccaccgcgcccggcctgagttttccttttatgaaggacctgcttggttggttgcctgccacatgttgtcagcaccatgggcccaggactgctgaggagctgttgatgccctcgctctcccagagccaccggctctgttagataattcacatgcagtctggccactgtcctacgtcctcattcacaaagagcagacatttcgtagaagatgagggcctgggagtaacctccctgcatgtttttctataaaggcatagtggttaagtccttccagctcattgaccattggagaattttatggaggctgtagactaggggctggtaaactaagggcccaggggccaaatccagcctgccacctacttttgtaaataaagttttcttggtgcacagccatgcccattcattcatttgcacaatgtctgtggctgctttcatgccaaaagcaagagaactgagtggttatgctggagacctacggccttcaaagccccagacctcacgtctggcccttgacagacagagcttccccagccctgctgcgcatcctggcccagcatgtgctgtgtgtgtgatttcagcttgcaggagccgtggttaggaattgtccctgtgttggtccattttgcattgctatgaaggagcacctgaggccgggtagattatgaaggaaagaggtctgtctggctcatggttctgtaggcagcaccagtatggcacccgcatctgctcagcttctagtgaggtctcaggaagctttgactcatggtgaaagtcgaagcgggagcaggtgcatcacatggtgagagagggagcaacggagagagagagagagcgcctctccctcttgccctcaccttgagaggagatgccaggctcctttaagtaaccagctcccatgtgaactcacagtgagagcccatttgctactgcggagagggcaccaggcatctgctcccatgacccaaacactgcccaccaggccctacctccaaccttggggtcatattttattctgttctatgctatgctatgctatgccatgccatgccatgccatgctattcctattctattatttgagacagaatctcgctctgttgcccaggctggagtgcagtggcatgatcttggctcactgcaacctccacctcccaggttcaagcgattctcctgtatcagcctcccgagtagctgggattacaggcacacaccaccacacccggctaatttttgtattttcaatagagatggggtttcaccatgttggccaggctggtctcaaactcctggcctcaagtgatccacctacctcggcctcccaaagtgccatgattacagatgtgagtcactgcgcccagtgagggtcacatttccgttgagatttggaggggcagacgttggagccatctgagccccctcgtcccgctctagcttctcctcccgtgtgccccgcggtgctggtggcaggcccttacgccggttctggctgcatgctctgttccagaagctttcttccctgcttggttaccagaaaatcatcccatccattacaaggacagggtccccttatctcccattcccagggcaggacaccgggggcagggcaggtggggaactgagcaagttctctgggggcaggcgtggctatggctccctctgggtgggcgtctggggaggggtggaggcagccgtcagcgccctggcttgctcttcctccctggccagagactgtggccttgtgctgctcccgtgtgggctgcctgcacctccagtgggttgtgctccctcccctcccctcccctcaagctctgctgagcaccactgccttccacagcccccactctcgggaggcgaggctcctcgtggccattcctgtccttggcacccacccccccaccaacctggtagagccttgggcggggtctgttactccttgcatggcgtagacctccccacagtaggcacctgacacatacctcctggggggcaggcaggaggtgcgttgaggtctcagccctggcagtccctcccctgcgtggcataggcctcgccacagggtcatcgagggtgggtggagactgtactagaccactccccgctggtcctagaaagggtcccatctgtctgctctctgtttggagtccagaccttggttgctgtgccctgcatggtgggctggggggcaccctccagcctctctgagtgcatggcctctccttgcagccatctgcctgcccaaccagttccggtgtgcgagcggccagtgtgtcctcatcaaacagcagtgcgactccttccccgactgtatcgacggctccgacgagctcatgtgtggtgagccagcttctggcacggggaaggggcgtccgggctgggttcccccaggaacgtggagtttaggggaggagacgtgcctttccagcggggctgggggctgtgtgggagactcaggcggctgggaggctccttgcgggaggcagggaagcctttcccagggcagcggccaggaggacagactgtgagctgtgggctcggcggctacagagtctgcctcagtgggcggggctgatggtgtccaggtgcctgcagcacgcacccacccacgggaccttgctgagcagcgtctgtcaggcagcaagattacccgagggctgcagtggtcctgttccctggcagcttactgtctggctgaggaggagtgatgttcacatatgcacacatgtcatgtgcacacacatgtacatgacaacatcccacatgctcctcaaatagcatgacctgtacagtcacggatatagggcctaggggataggaggccaagacagtcagggaagactttccagaggcagtggctcctgaaaggctgtctgattcaggcaggaagggagctgagttcagataggaagtagcaatgagtcattgtgtctggggacatggccactccttcgctgcagagggacctgggctgagagctcctctcttatggctgcagtcgggagagaagtctgttggggggagaagggggcttcctcaagggactccctgtgccctttggcaccttcgtgccaggtcaggcttgaggcctgaaggcagtggtgggggccaccaagggtcgcctcctctgctgggcaagttcccagtctgacgggcctgtgccgtgggccccagctgtgggggcgctgttgatgcgcagccaggcctcgccgccagagcccgcacgcttccattccgctgacttcatcgacgccctcaggatcgctgggccggccctgtgggagagtgaatgtggcttttgccaaagttgagtctggagcctggaaacttccctatgggcagccttgatagtggagtggcccaaggagcccacccagccgaccctgcccctcccgtggctggtgggcggcaccaggggctgcctggctttgctcgttcaccaacatcacctgggctggccagggcgcgctcacttctgccaccaccgagggccctgggcgaaggagtgaataccaggctgccttggcagggatgtgttgagggctgtggggagtcggacagcggcgggggtcagaggaggaggagggtgcaccgtgcaggctgaagggccacgttaccctgaggttggccaggctccccaggcctagcctcccagctcccccactttctccccaccctccaccagtggcaaagccagccccttcagggcgcacggtgtctgcccccaaggagggcccattccgttggggttaatgttggccacctctttctgtttgtctctggcagaaatcaccaagccgccctcagacgacagcccggcccacagcagtgccatcgggcccgtcattggcatcatcctctctctcttcgtcatgggtggtgtctattttgtgtgccagcgcgtggtgtgccagcgctatgcgggggccaacgggcccttcccgcacgagtatgtcagcgggaccccgcacgtgcccctcaatttcatagccccgggcggttcccagcatggccccttcacaggtaaggagcctgagatatggaatgatctggaggaggcaggagagtagtctgggcagctttggggagtggagcagggatgtgctaccccaggccctcttgcacatgtggcagacattgctaatcgatcacagcattcagcctttcccactgagcctgtgcttggcatcagaatccttcaacacagaggcctgcatggctgtagcaacccaccctttggcactgtaggtgtggagaaagctccttggacttgaccttcatattctagtaggacatgtgctgtgttgtccacaaatcctcatgtaccctagaaatgaatgtgggggcggctgggctctctccagagctgaaggaatcactctgtaccatacagcagctttgtcttgagtgcagctgggatttgtggctgagcagttacaattcctacgtggcccaggcaccaggaacgcaggctgtgtttgtagatggctgggcagccgcaccgcagagctgcaccatgctggtttgtatcacatgggtgaccatggtatgtctaagaaggtggagtccctgtgaggtctgcaggtgcccccacagctccaggccaccttgaggattgcctctgcctgcccagccctgagttccctctcccctgtcctgtcccactgtcaccccaagccggcctcattgggagcctgttggatggcagggtatagatgtaacctgattctctctggggagcggggttatctggcttctcaagagctcctaggagcccacagtggtggcaccatcacagtcgcagcagcccccagagaacgcggccctgtctgttcctggcgtgctctgtgctgccccgcctgggttccctgccccagtcgcaggccccttggaggaggtaccatgtgtctcccgtttcacagatgagccccggggagctcactctagtagtggccagagaggcctgcggctcagggagcggggcacatttccaacaggacacaccgccctggtctgagtctcgtgggtagtgggagcagaggagagcgccctatgtctgtggggcggcttggctgagcctggaagccacctgacctcccccgtcccttccctgccaggcatcgcatgcggaaagtccatgatgagctccgtgagcctgatggggggccggggcggggtgcccctctacgaccggaaccacgtcacaggggcctcgtccagcagctcgtccagcacgaaggccacgctgtacccgccggtgaggggcggggccggggaggggcggggcgggatggggctgtgggcccctcccaccgtcagtgctggccaccggaggcttcccgggttcctgggggctgtgccaccgcctctgaggcatgcttgctttcttcccttttcaaacccttctgcttccttctttaatgacattgttgattgtggataatctgaaaactacacaaaaatataaagagccaaaatctcacccaaatccacctcctagagtggctgttgggctccgtcagcatccaggcggccgtctgtgttccgcacggcccagcccatcgatagccgcctgcaccaggcctgtctgccctctgtgagcctccccacagggttccctccacaaacaccctgttctcccacccagggctggctgcttcctggaaaacagctggatggttttgtgcatgacagacaaacacagggtgattttcgtggctaaaatactccctggagcttttggcagggtgaggggctggctccagctgagccacgccttgagtgaaatgactgtgaggagaataaactgccgctgccctccaggatcactggggctggctggggagaacccccgtttctgggagcacagtcccaggatgccaaggcgagcttggtgccgagatgtgaactcctgagtgtaaacagcgggggctgacttgacatgctttgtatgcttttcatttgttcctgcagctgtatgcccctaaggtgagtccagcccccttctgcttcctctggggcctcgccagtgagccccaccttgctggggctggttcctcctgcccttctgggtatccctcacatctggggtcttgtcttcttgttttctttttcttttttttttgagacggagtttcacttttgttgcccaggcttcagtgcaatggtgtgatctctaggctcaccgcaacctctgcctcccaggttcaagcagttcccctgcctcagcctccctagtagctgggattacaggcatgtgccaccacgcccagctaattttgtatttttagtagagatggggtttctccatgttggtcaggctgatcttgaactccctacctcaggtgatccgcccaccttggcctcccaaagtgctgggattacaggcgtgagccaccgcacctggcctttttcttttcttttcttttcttttttctgagacagggtctcgctctgtcacccaggctggagtgcaatggtgtcatcatggctaactgcagcctctaccttctaggctcaagcaatcctcccatctcagcccctaagtagctaggactgcacgcatgcatccccatgcccagctaatatttacattttttgtagagatgaagtttcactatattgcccaggctggtctccaactcctggactcgagcgatcctcctgcctcggcctccccaggtgctgggattacaggcgtgagccaccgtgcctggcctggggtattgtcttcttatggcacctgactgtggtgggccctgggaaggaagtagcagaagagggttcttcttggtttcctggacagtaactgagtgttctggaggccccagggcctggctttgtttagggacaaagggaactggtaaccagaagccgagagtttaaacacccactgcccttcttccctgctcctgctgctgcaacccagcttaaccagccaggagtgctaggaacccaagcagggcccccgagcacacagcaggcagctcacgaattctcttttcctgttctcccttgggagctgggaggatcttaatcaggcaataagagatggcactgagcagccagctaattttttaaatcactttattgtttaaccatatgactcacccacttaaaaaagggtacagttcagtgggttttagtgtattcacagatgtgtgcaaccctcaccacagttaattttagaacattttcctgcccctaaaagaaactctgcatgaagccagctgtttttaaattagcaaagttattttgcatcctttaaatatatgttcatggtacaaaattcaaaagatacagaagagtctgcagtccaaagagactccgcccccatgacgccaagcaggcatccctgggaggcatggcctcctgcagtgtgtttcttctatgtccccccaggggtcatctgtacatatgcaagcatacaagagcgtggactttgttttccaagccagaagataattgtagatttatgtgcagttgtgagaaagagcacagacccatttatcctctgcctggtttcccccagtgctgcctgccatcttgcatgacttccattcctatcataagcaagacactgataacgattctttcaccttattcagattgacataagtgttttttgtttgttcttgagacaaacttcctctgtcacccagtgggagtgcagtggcacaatcacagctcactgcagcctcaaactcctgggctcaagcgattctcctgcctcagtcccctcaagtagctcagatggcaggtgtgcaccatcatgccaggctaatttttaaattttttgtggaggtgaggcctcactaaatttcctgggctagtcttgaactcctgagctaaagtgatcctcctgcctcagcctcccaaagtggtaggattacaggcatgagccactgcgcctgggctgacatatgtgttttcgtaagcccgaaagatagcatctgaagagtcaacattgagccttgccttttgctgctaacgatgtataaaagctgctgttctgagcatttcggaggctcccagctgccgtgtgcaccctgcctagagctctaccgtaacccatctccgggaggaggtgctattgttttcctcattttgcaacaaggaggctgaagaactgagcatgaaccactggcctgggtcgttcggttggtaggcagtggggccaggccatccaactcacaaccaccttctactctgcttcccccgcaccctgaagtttgttctgttttgaggacacagccgtcacattcttggtggctgaacagcactccttgtcaggcgtggctgggcccccactggagggcatcatggtcctctctcctgctgcggttgaaccttggctgtttcaaccactcctgccaagtggccctctgaaagggacagtccatcttttctcagcagagggccacactggcaaaacggtccctggcaccctttctctccacctgtctaatatagagtaaaaatggtatcatgttaagatcttcatttatatttattttatcatgaatgatgtaagcatcattttgtgtgtttaagaacctttgggcccagcgtgatggcttgcagctgtaatctcagcactttaggaggctgagatgagcggatcacttgaggccgggagtttgagaccagcctggccaacatggagaaaccccgtctctagtaaaaatttaaaaattagccgggtatggtgatcccagctacttgggagtctgaagcatgagaattgcttgaacatgggaggcggaggttgcagtgagccgagatcgcgccattgcactccagcctgggcgacagagcgagactctgtctcaaaaaaaaaaaaaaaaaagaaaagaaaagaaattatcaatctcctcttttatggcatatatatatatatatatatatatatatatatatatattttttttttggttatgttcagaaaggccttccctgctctgatcataaaaaacaacttattttcacactctctctcttttttttttgagacagagttttgctcctgttgcccaggctggagtgcagtggcgcaatctcagctcactgtaacctccgcctcccgggttggagtgattctcctgccttaccttcccgagtagctgggattataggcatgcaccaccatgcctggctaattttgtacttttagtagagacgggggtttctccatgttggtcaggctggtctcgaactcgcgacctcaggtgatccacccacctcggcctcccaaagtgctgggattacagacgtgagccaccatgcccagcccacactctctttcttaacgtcctcctcctttcgttttacgttcacatctttaattcttctgggatgtaattagatttgatgagcaaggtgggcatccagcttgtttcttggctgatggcttatgggtggcgtgaattagtcggggtctatcaggaggcagaaactctatgagaatttgaacagagaaagttccgtctacaggcttattaccagggactggaatagcagaaattgaacagtgagatgtacagagaactctaagaatgcaggaataggccaggcatggtggctcacacctgtcatcccagcactttgggagaccaaggcgggtggatcacctgaggtcaggagttcgagaccagcctggccaacatagtgaaaccccatctctactaaaaatacaaaaaaattagctgggtgtggtggcgcatgcctgtaatcccagcttctcgggagtctgaggctggagaatcacttgaacctgggaggcagaggttgtagtgagccgagatcatgccattgtactccagcctgggcaacaagagcgagactcagtcaaaacaacaacaacgcaggaatagcagatgagccgaggtggggcctccccagcccccaccccccaccccccaccctgggccgagatccagtcctctttgaatagggcctggccgtggttcacgggacatctgagacattgccgaggcgctgcactggtggatcttgccagaagtctgcccagtgcagatttgggcagaatctcaaactgccttgggatgtaggagagaaaccaggcctggtcaagttcatgggaagaggtggaaacagaccccataggctggggcttgggcagctgtaggaagccctctctgctgcctccctgcctgctctctgctttgaagcatcttccccagtgcccccagtctcatgccctctcaacgttggggtcaaatcctgaggaatacccagactggctctctgggccaaagaggaccctctccagaaagagcagggcccagtgcggcttcctaaagggcaggggaagggcctggccactccccagaggctactcaccagccatcaggatagccccaggaagcaggccttctcgagcccattttattactttattttattattttatttaattttaaatttattttttgagacagagtctcactctgttgcccaggctggagtgcagtggtgcgatctcaacccactgcagcctctgcctccagggttcaagggattctcccacctcagcctcccaagtagctgggattacaggtgcccgccaccacacccggctaattttcatatttttagtagagatgaggtttcaccatgttggccaggctggtctcgaactcctgacctcaagtgatccgcccgcctcggcctcccaaagtgctaggtcaagcccattttaaagttgaagaaactgaggctgaggtaaattccctccccagggatcctgctgcagccagaaggtggtaaaacaggacttcacccgggtctgtctggcgtgaaaggcagtgttcttgtaccaccctagggggcctgagagaactgagtccctcgggcataactgacagttctgttcccattattccgcaggggctcggatctggctgtatgctttccaggatggccttggagacccacataagccctacaccctttgggaagctgcatgttgggttggggtgccgtcagtggcacttgtggaaggtgcagacctgtgtgggtgtgtgggcccagggcccctggtcccttcctccctttgtagggctggttgtgtgctgcctggacctggggggcacgttcacgtggtgaatttgtctatttactatccccgctttggggctggtgccagcacaggcccttgtgaagggggtgcctttgtctggagtgggactgtggcccctccctcagcgtggtgacttctgtgtcagggcttcagcagggacgcagagcccctgagtgttcggaacaagggcgtcattgcaggagttagactgtgtgtgatggagggaggaggggcaggaggaaaggtcagaaggagagttcctgggaaggtccctgaggagcctggtgaggtgctaactggtgtggaggacactcagggcctgtggggacatctcctactgctgggggccagccacaaagggaactggccgaagtcctgtccccgccttcacagcccagcatctggtcacaaggcaggtacttggaagggcgcgggcacctgggccaaaagtgcctgggttccctttgcctttcactgagatgaccttcggggcaggtggctgctgcctcccctcctgtccccaggttttgccaactggccagaggaaggggtcctgggaagcaggggggccagaagccctctctgcaaggaaagcccgaggggtgtgggaggaaggaaggaatgcccaggctggcgaggctctaagtcaccctggcttggctctcctcagatcctgaacccgccgccctccccggccacggacccctccctgtacaacatggacatgttctactcttcaaacattccggccactgcgagaccgtacaggtaggacatcccctgcagccctccatggccattgggttcccgccagcccgtggtggaggggcctaatccccatgccactgatgaggggaggtattctgggtgctagtgggcaggtgccgggcccagccctgcctccctctgctctgccaaccacactaggctgcctccccagacaagctcagcgggcactgcatgttgggttcagaaatcagcagaactccacgttctgagctgctcttcaagttgctcctatgggggttacttttaagctgggaaatggctgtggcgtcgaggggccgggggcttgggctccagagtctgactgtgtgtttgagtccggctgtggaaacctagccattgagatgccccctcttggtggctctgtcctcttaggatgggacaagtctgtgaaggctgctgcagcacccaccgtagacccctaatcgtgtgacgtcaccaggatggtccgggctgctcacttgccacagtggcctgtttgagcccgggaagccaacggggctgctcagctggacaccagccccccgagctgcccatgttggggtcacaggccccacctccctggttggggaggggcaactgagagtgtggagaggtgggacccaggtgtgctggtctccgcaggggctggatcagagcctgggatgggcagggtgagcctcctgacctttaacccagtggtgtcaggcaacgtggcccacccgccagccgcaccaggccccacccccgcaggtgaaggggtgggataggctgggcctgggccaggacacctctggaccacgcattcctcattgcttgggtccctggagcagcagggcctcccgagtgtggtgccgcctgccacctagtggccatttccacgaactcccaggcctggctggggagccggaactgcagcctccatttccaccccactccgggtcgggccacctccctgatgcctcagtattatatcaaactgtcacagtctgtcccacagccttacagaccactgtctccagaatggtcacatccacactgggcagcccagtctcgctagttcctcgtcccacctcctgcctttgctcatgcccgtcctgctctgggcccaccgcggacacatcttccccccgcccgccgtctgacctcacagcagctgggccccaagaggagtatcctgtcctgctgcacttttctcaacacccggtgttggctgcaccttcccacccattgcaggcccctctgtgacaggacgggggctcctaaacacaccacagttccgagtctgaactcacacagtgggatgcggcgtttctgggccacagttgggtgcaggtagcctctgggaggatgggaggtcaggagccatcttgcgagtcaggttgcttgaactcaggatggaagtgttccgggcccattggttgctgtattagcctgttctcacgctgctaataaagacatacccaagactgggtaattgtaaaggaaagaggtttaacggactcacagttccacctgcctggggtggcctcacaatcatggtagaagacaaggaggagcaagtcacatcttacatggcttcagggaacagacagcatgagaaccaagcgaaaggggtttccccttgtaaaaccatcaagtctagtgagatttattcactaccacgagaacagtatggggggaaccacccccatgattcaatcatctcccactgggtccctcccacagcacgtgggaattatgggagtacaattcaagatgagatttgggtggggacacagccaaaccctatcggttgccaacatttacagtaacagtgttaggtgaacagttgtccagtctcctgttttgtcggacactgtttctagcaccttccaggcagaatctcatgtatccttcactttcgaaatgggtactatttcatccccacttttatcaatgagaaactaaagctcgaagaggtcaagtaagttcctggccaaggtcagctagcaggctctagaggcctcgttctccttagaggcagccttgccagggcccaggcttggcaggctgcagggcaggtgcgggcatgcccatggtagaggtgggaccattgaggctcagagagggtaagtgatgagccctggcgacacagcggggtgggtccagagtccggcctgcatcttctggagctggccagtggacaggcctttcccgttcacagccccggggctgctgtgcccaccagggcggatgtgcctaccgaatcccactcctctgtgtgtgtccctttcaggccctacatcattcgaggaatggcgcccccgacgacgccctgcagcaccgacgtgtgtgacagcgactacagcgccagccgctggaaggccagcaagtactacctggatttgaactcggactcagacccctatccacccccacccacgccccacagccagtacctgtcggcggaggacagctgcccgccctcgcccgccaccgagaggagctacttccatctcttcccgccccctccgtccccctgcacggactcatcctgacctcggccgggccactctggcttctctgtgcccctgtaaatagttttaaatatgaacaaagaaaaaaatatattttatgatttaaaaaataaatataattgggattttaaaaacatgagaaatgtgaactgtgatggggtgggcagggctgggagaactttgtacagtggagaaatatttataaacttaattttgtaaaa

SEQ ID NO: 1612 - protein, 1494 aa, Homo sapiens
MNGSSVEHVVEFGLDYPEGMAVDWMGKNLYWADTGTNRIEVARLDGQFRQVLVWRDLDNPRSLALDPTKGYIYWTEWGGKPRIVRAFMDGTNCMTLVDKVGRANDLTIDYADQRLYWTDLDTNMIESSNMLGEGRAGAFWSWRAGQPGVGHLPASPHAAGLNPGSPRRAPCALWPGCAFADTVPVCVHAGQERVVIADDLPHPFGLTQYSDYIYWTDWNLHSIERADKTSGRNRTLIQGHLDFVMDILVFHSSRQDGLNDCMHNNGQCGQLCLAIPGGHRCGCASHYTLDPSSRNCSPHPQETALVPPSFPWTSSGADAEPPVVEWRAIPSSSSSVAYRHPPAALSLPPLAPTTFLLFSQKSAISRMIPDDQHSPDLILPLHGLRNVKAIDYDPLDKFIYWVDGRQNIKRAKDDGTQAGALWEGCGPFVLTSLSQGQNPDRQPHDLSIDIYSRTLFWTCEATNTINVHRLSGEAMGVVLRGDRDKPRAIVVNAERGYLYFTNMQDRAAKIERAALDGTEREVLFTTGLIRPVALVVDNTLGKLFWVDADLKRIESCDLSGANRLTLEDANIVQPLGLTILGKHLYWIDRQQQMIERVEKTTGDKRTRIQGRVAHLTGIHAVEEVSLEEFSAHPCARDNGGCSHICIAKGDGTPRCSCPVHLVLLQNLLTCGEGTFCDCPPPELPSSFSPSYSPKAQVDLQPNGVCAPPTDARTALAKKRGRQNAALTAALGLHARGHALPSTTPWPGPWALLARELQAPSSRLERRVFTAQWQEPGWARGGHSHLSSAITTAIQPFPEPGAPLALAPVSQLQLTGACGAQRLLLIESRAPSPGVSSALLPVLCPVFCRRLGRADRSSAGSCLAMRTLVTTEAWPFFCSSPTPATEPPTCSPDQFACATGEIDCIPGAWRCDGFPECDDQSDEEGCPVCSAAQFPCARGQCVDLRLRCDGEADCQDRSDEADCDAICLPNQFRCASGQCVLIKQQCDSFPDCIDGSDELMCGEPASGTGKGRPGWVPPGTWSLGEETCLSSGAGGCVGDSGGWEAPCGRQGSLSQGSGQEDRLSQSDGPVPWAPAVGALLMRSQASPPEPARFHSADFIDALRIAGPALWEKITKPPSDDSPAHSSAIGPVIGIILSLFVMGGVYFVCQRVVCQRYAGANGPFPHEYVSGTPHVPLNFIAPGGSQHGPFTGIACGKSMMSSVSLMGGRGGVPLYDRNHVTGASSSSSSSTKATLYPPGFSRDAEPLSVRNKGVIAGVRLCVMEGGGAGGKVRRRVPGKVPEEPGEVLTGVEDTQGLWGHLLLLGASHKGNWPKSCPRLHSPASGHKAGFANWPEEGVLGSRGARSPLCKESPRGVGGRKECPGWRGSKSPWLGSPQILNPPPSPATDPSLYNMDMFYSSNIPATARPYRPYIIRGMAPPTTPCSTDVCDSDYSASRWKASKYYLDLNSDSDPYPPPPTPHSQYLSAEDSCPPSPATERSYFHLFPPPPSPCTDSS

SEQ ID NO: 1613 - DNA, 1021 bp, Homo sapiens
  source (1)..(1021)
  CDS (201)..(821)
tggcatcattcttcacgtcatcagaacagatattgccctacatcaacccatgtacctcttccttgccatgttggcactggccgaggttcgtgtctctgcatccaccctgcctacagtgttaggcatattcctttttggaaatactgaaattagtcttgaagcttatctttttccagatgttctccatccattctttatccatgatggagtcagctgtgctgctggccatgtctttggaccgctttatagccatctacagcccactgagctatacagctatcctgacactgcccagggtctttggcacaggagctattatcgtactgaaaagcattatgctcatggctccgttgcccattctcttatggcgtctgcccttctgtggccacaatgccctctcacattcctattgtctgcaccccaatcttatctatctatcttgtgggaacatttctgttaacaatatctatgggattttcattgttacctctacttttgggctggattcgttgctgattgtgatctcctatgggctcatactccacaccgtgttgggtattgccactggagaagggcggaagaaggcactcaacacgtgtggctcacacgtctgtgctgtgcttgcttactatgtgcctatgattggcttgtctatagtgcaccgccttggacatcgtgtgtcccctctgctgcaagccatgatggccaatgcctacctcttcttcccacctgttgtcaatcctattgtctacagcattaagaccaaggagatccatggtgccattgtccgaatgctattagagaaaagacgcagagtgtagccaaaaaccatagtaggaagaaatgtttttgtttgtttgcttgctctctataataacaggtggccctagattgcatgttatgcaattgatatcaccttaaaacatggcgtctaacaggaagttctctatagtctgtccatgaactgaggtgagggtgcaggtagaggtgaattatgtgtgacagaacagtacacaaaagt

SEQ ID NO: 1614 - protein, 206 aa, Homo sapiens [sequence omitted]

SEQ ID NO: 1615 - DNA, 1212 bp, Homo sapiens
  source (1)..(1212)
  CDS (201)..(643)
  CDS (895)..(1012)
ttactctctcccaagtgattgcaaagctgatttattagactgagaatactgagtttaataactgaattagattaatacatgacaagaagatcacacccaggaattgtccttgccatctagtggaaatcctagaaaatgattccttaacgtctataaccacttattttcttcctcaaacagatgaatttccaaactctgacatggctcctgaaaatttcaccagggtcactgagtttattctcacaggtgtctctagctgtccagagctccagattcccctcttcctggtcttcctagtgctctatgtgctgaccatggcagggaacctgggcatcatcaccctcaccagtgttgactctcgacttcaaacccccatgtactttttcctgagacatctagctatcatcaatcttggcaactctactgtcattgcccctaaaatgctgatgaactttttagtaaagaagaaaactacctcattctatgaatgtgccacccaactgggagggttcttgttctttattgtatcggaggtaatgatgctggctgtgatggcctatgaccgctatgtggccatttgtaaccctctgctctacatggtggtggtgtctcggcggctctgcctcctgctggtgtccctcacgtacctctatggcttttctacagctattgtggtttcaccttgtatattctctgtgtcttattgctcttctaatataatcaatcatttttactgtgatattgcacctctgttagcattatcttgctctgatacttacataccagaaacaatagtctttatatctgcagcaacaaatttgtttttttccatgattacagttctagtatcttatttcaatattgttttgtccattctaaggatacgttcaccagaaggaaggaaaaaagccttttccacctgcgcttcgcatatgatagcagtcacggttttctatgggacaatgctatttatgtatttgcagccccaaaccaaccactcactggatactgataagatggcttctgtgttttacacattggtgattcctatgctgaatcccttgatctacagcctgaggaataatgatgtaaatgttgccttaaagaaattcatggaaaatccatgttactcctttaaatcaatgtaattttagagctctataaataaatgaagagatagttcatgtaacctgccattatgtaagagaaata

SEQ ID NO: 1616 - protein, 186 aa, Homo sapiens
MAPENFTRVTEFILTGVSSCPELQIPLFLVFLVLYVLTMAGNLGIITLTSVDSRLQTPMYFFLRHLAIINLGNSTVIAPKMLMNFLVKKKTTSFYECATQLGGFLFFIVSEVMMLAVMAYDRYVAICNPLLYMVVVSRRLCLLLVSLTRKEKSLFHLRFAYDSSHGFLWDNAIYVFAAPNQPLTGY

SEQ ID NO: 1617 - DNA, 937 bp, Homo sapiens
  source (1)..(937)
  CDS (201)..(737)
aagttttggactatttgattcttttatgcttcttttttttcatttttttttctaaaggtaaaatattccttcctggaggttttatcacccacactacatagatgaagaataaaaggaatgtgactgaattcgttttaacaggtcttacacagaaccctaaaatggagaaagtcatgtttgcagtatttttggttctttacatgataacactttcaggcaacctgctccttgtggttacaattaccaccagccaggctcttagctcccccatgtacttcttcctgagccacctttctttgatagacacagtttattcttcttcttcagctcctaagttgattgtcgattcccttcatgagaagaaaatcatctcctttaatgggtgtatggctcaagcctatgaagaacacatttttggtgctactgagatcatcctgctgacagtgatggcctgtgacaactatgtggccatctgcaaacctctgcactacacaaccatcatgagccacagcctgtgcattctcctagtggtagtggcctggataggaggatttctccatgcaaatattcagattctatttacagtatggctgcccttctgtggccccaatgtcatagaccacttcatgtgtgacttgtgccctttgttaaaacttgtttgcctggacactcatacccttggtctctttgttgctgccaacagtgggttcatctgcttattaaacttccttctctaggtggtatcctatgtgatcatcttgagatgtttaaagaactatatcttggaggggaggggtaaagccctctccacctgtatttctcacatcataatagttgtcttattctttgtgccttgtatatttgtgtatctgcacccagtgacaaactctgcccattgataaagctgctgctgtattttatactatggtggtcccaa

SEQ ID NO: 1618 - protein, 178 aa, Homo sapiens
MITLSGNLLLVVTITTSQALSSPMYFFLSHLSLIDTVYSSSSAPKLIVDSLHEKKIISFNGCMAQAYEEHIFGATEIILLTVMACDNYVAICKPLHYTTIMSHSLCILLVVVAWIGGFLHANIQILFTVWLPFCGPNVIDHFMCDLCPLLKLVCLDTHTLGLFVAANSGFICLLNFLL

SEQ ID NO: 1619 - DNA, 4319 bp, Homo sapiens
  source (1)..(4319)
  CDS (201)..(308)
  CDS (3128)..(3531)
  CDS (3660)..(4119)
  modified_base (1)..(48): a, t, c, g, unknown or other
nnnnnnnnnnnnnnnnnnnnnnnnnnnnnnnnnnnnnnnnnnnnnnnnaataaatggggtgctctgggtcttctagtaaccagggctgtgtaaaacaagtttttgtcagtaagcttttgttgaagtccaacatactgttctagttactgtggctgtgtaacaaattaccccaaaacggcaactggaaacatagttttatcatgtttgtggattctgtgggtcaggatattgaagagggcacagtgggaatgatttttctctgctccctgaccttggaagtctccgctgagaaggatcaacagctgggggtaactctgaggcacgggttggggcctcctggaagtgactttgctcccgtgtgtggctgttgaagctgactgctggctggaacctcggctggggctgtccacgggagcatctgcctatggcttctcccagcatgccagcctcagggtaatcagacttctgatacgacagcttgaggcgctgaaaaagagtgtcccagcaaacaggacagaagctgcatgtgttaaccacgtcttttattttctgtattctgatgctttaacatttggggaccttgctgactgtggagggactgccccttcccgggttagccaattcctagagacagtaaacaactcacccatgaacacgctattcagttcttcaaatgcaaatacaatggaataccattcagcaatgagaatgagcaaactacaactacacccaacaatgcaggtgatgctcacaaactaacattgaacccaagaagcgacacacataagatcgtatagcatggtttcatttatttaagggtcaaaagcatgcaaaactgagttgtgattttagaagttaggagaggggccacgcttgagtgaaggtggaggttgggagggcagaggagagtttctgggaggctgtgaggttgtgcttcctaatctgggtgccgatcacatgggtgagttcactttgtgaaaatcgacaagctgtgcttttatgatctgcacccatttttctatgtatgtgttatggtttaaaaaatggctgtaggccaggtgcggtgactcatgcctgtgatcccagcaatttagcaggctgaagtgggcagatcacctaaggtcaggagttcaagaccagcatgaccaacatggggaaaccctgtctccactaaaaatacaaaaattagccaggaatggtggtgcgtgcctgtaatcccagctacccgggaggctgaggcaggagaatcacttgaacccaggaggaggtggaggctgcagtgagccaagatctcaccactgcactccagcctgggtgacagagtgaaactccatctcaaaagcaaaaaaaaaaaaaaaaaaaaaaaggctccaaattcttctacttttctcccatggagaagtggaggctattctccccccatgcccctgtactatcttgattctagatgagcttgtgacttgcttgtaagtgatagaaggcactggaagtgatgatatgacacttcaggactaggttagaaaaggtgaggcagtgttttagaatagagtgtattaatagaaaatctggggtccggtactgtggctcacgcctataatcccaggactttgggaggccgaggcaggcgaatcacttgaggtcaggagtcatggtgaaaccccatctctactacttaggaggctgaggcatgagaattgcttgaaccgaggaggtggaggttacagtgagccaggatcactccactgcactccagcctgggcgacagagcaagactttgtctcaaaaaaagaaaaagaaaagccgaggttcaagaaggccaacaggtcagcagataactgccattgaaggacagtttgctactcacagatcccaagaggagggcacgccccatcacgcagggccaccggggagacatagggttggtcaggaggtgaagggagcaggggaaaatgtgggcaagagtggttttagggtacacaggcttaagattgggtggtttgaatcatttcagcaagctctgagacatgaggactgtccccatttgtgtggtacctggccctggggtgtttagggcaggtggatagtgtcctggtgtgtgagagctgtaaatggagcccgtggaagctaaggactctggattggtaggtttgcatttgaagaactgaagagcgtgttcatgggtgagttgtttactgtctctaggaattggctaacccgggaaggggcagtccctccacagtcagcaaggtccccaaatgttaaagcatcagaatacagaaaataaaagacgtggttaacacatgcagcttctgtcctgtttgctgggacactctctttcagtgcctcgagctgtcgtatcagaagtctgattaccctgaggctggcatgctgggagaagccataggcagatgctcccgtggacagccccagccgaggttccagccagcagtcagcttcaacagccacacacgggagcaaagtcgcttccaggaggccccaacccgtgccccagagtaacccccagctgttgatccttttcagcagagacctccaagattagggagcagagaaaaatcattcccactgtgccctcttcaatatcctgacccacagaatccacaaacatgataaaactatgtttccagttgccgttttggggtaatttgttacacagccatagtaaccagaacagtatgttgcacttcaacaaaaagcttactgaaaaagacatgttttattatacttgtgcatgttgcctcagcaaaactattcattattacaattccagaggcataaccccacagatacagtgttttttttttcttttttcctccccaggcagccacgtgagatggcttccggcactgctggcgtgagtagtcttcctggcaatgccagctcttgccgtcctcacctcctggccccagtggcccgcatgacgctctctgttctacacagccctcctggtcttcagtgccctgggaaacatccttgccctttgccttacctgtcaaaagagcaggaagatcaactgcacaggcatctacctggtgcacctggctgtgtctgacctgctgttcaccgtggccttaccgggaagggtggtgtgttatgtgctgggctccagctggcctttcggcaaggggctctgcaggctgacggcgtttgtgctctacaccgacacctacggggggtctacctcatggcctgtgtgagcgtggaccattacccagctgtggtctgtgcccactggggcccgcgcctccgcacggctggccgcgccaggctggtctgcgtggccatctggaccttggtgctgctgcagacgatgcccttgctcttgatgcccatgaccaagccgctggtgggcaagctggcctgcatggagtacagcagcatggagtcagtcctcgggctgcccctcatggtcctggtggcctttgccattggcttctgtgggccagtggggatcatcctgtcctgctatatgaagatcacctggaagctgtgcagcacagctgggagaacccagtgaccagcgggaaaggacaccaccggcggggcagcccaggaggacccagtgaccaacaggaaaggacgccaccggcggggcagcccaggaggacccagtgaccagcgggaaaggacaccaccggcaggacagcccgagaggacccagtgaccagcgggaaaggacgccaccggcgggacagcccgggaggacccagtgaccagcaggaaaggacgccactggcgaggctgcctgcttacgctgctgatgctggtggccgtggtggtctgcttcagcccctaccacctcaacatcaagcagttcatggcgagagggatgctccacctgccatcctgtgccgagcggagggctttcttactgtcccttcaggccaccgtggccctcatgaacatgaactgtggcattaccccatcatttacttctttgcatccacccattacaggaaatggctcctgggcattttaaagctcaaagggtcttcctcctcctcctcctcctcctcctccaccccaggaaaagcttcttcagaaacaccaagtatcacccaggccagaggttctatgttcttagcggagcacgtggtctaacgtgtcatttgctttatgactgtatctagggaggggtccagcgttggggtattgaagttgatacaatttgggcaaaaggttttttaaggaaaagaatacagaataagaaatacaaaattaggccgggcgcggtggctcacgcctgtaatccccgcactttgggaggccaaggtgggcggatcacctgaggtcaggagttc

SEQ ID NO: 1620 - protein, 323 aa, Homo sapiens
MFVDSVGQDIEEGTVGMIFLCSLTLEVSAEKDQQLGLAFRQGALQADGVCALHRHLRGVYLMACVSVDHYPAVVCAHWGPRLRTAGRARLVCVAIWTLVLLQTMPLLLMPMTKPLVGKLACMEYSSMESVLGLPLMVLVAFAIGFCGPVGIILSCYMKITWKLCSTAGRTQTAREDPVTSGKGRHRRDSPGGPSDQQERTPLARLPAYAADAGGRGGLLQPLPPQHQAVHGERDAPPAILCRAEGFLTVPSGHRGPHEHELWHYPIIYFFASTHYRKWLLGILKLKGSSSSSSSSSSTPGKASSETPSITQARGSMFLAEHVV

SEQ ID NO: 1621 - DNA, 1329 bp, Homo sapiens
  source (1)..(1329)
  CDS (201)..(434)
  CDS (689)..(1129)
cacacgtgaaacaggtaaccccagaggctctgcagataagcctgagtagtcagtggtgggaagatacatccttcacagaaataaagtacaccttcagccctctctcctttcagttccaggttgttctcaggtccccaacatcacgattcttgatgctgaacacctttgatcagccctccccagcaaaggtcagaggagccatggggaaccacaccaccgtcaccgagtttgtcctgctggggctctcagagacctgtgagctgcagatgctcatcttcctggggctcctcctgacctacctcctcacactgctggggaatctggtcatcgtggtcatcaccctcatggacaggcgcctccacaccaccatgtactacttcctccgcaactttgctgtcccggagatctggttcacctcggtcatctttcccaaggtgctggccaacatcctcacaggatacaagaccattccctcccaggctgcttcctgcaaagtttgctctattttttcttgggcaccacagagttcttcctcctggcggtgatgtcctttgacaggtacgtggccgtatgtaaccctttgcattatgccaccatcatgagcaaaagggtctgtgtccagctagtcctctgttagtggatgacaggattccttctcatcattattccaagttttcttgtccttcagcagccattctgtggccccaacatcattaaccatttcttctgtgacaactttcccctcttgaaactcatttgtgcagacatgactctgatagagctcctgggttttgttatagccaacgtcagcttactgggcactctgtctatgacggccacttgctatggccacatcctccacgccattctgcacatcccctcagccaaagagaagcagaaagccttctccgcctgctcctcccacatcattgtcgtgtctctcttctatggcagctgcatcttcatgtacattcagtcaggcaagagtgaccagaaggaagacaggaacaaggtggcggcattgcttaacaccgtggtgaccctgatgctcaaccccttcatctacaccctgaggaacaaacaggtgaaacaggtgtttaggcagcaggtgagcaaactcctcatataaagctgtgtaaaaaaaaaactgaagctcagcatccccagacaagctaagagaatataggccccttgaaacaactgagcctttccgattcagaaaaagctcggatgatatgtttgtacatgatgtgtttctatgggatcagtcactatgcaattcagcataaactctttggaccctctggcactattaattagtggatttga

SEQ ID NO: 1622 - protein, 224 aa, Homo sapiens
MGNHTTVTEFVLLGLSETCELQMLIFLGLLLTYLLTLLGNLVIVVITLMDRRLHTTMYYFLRNFAVPEIWFTSVIFPKQPFCGPNIINHFFCDNFPLLKLICADMTLIELLGFVIANVSLLGTLSMTATCYGHILHAILHIPSAKEKQKAFSACSSHIIVVSLFYGSCIFMYIQSGKSDQKEDRNKVAALLNTVVTLMLNPFIYTLRNKQVKQVFRQQVSKLLI

SEQ ID NO: 1623 - DNA, 6508 bp, Homo sapiens
  source (1)..(6508)
  CDS (201)..(581)
  CDS (1537)..(1687)
  CDS (1768)..(2904)
  CDS (2969)..(3085)
  CDS (3132)..(3290)
  CDS (3330)..(3357)
  CDS (3446)..(3531)
  CDS (4133)..(4246)
  CDS (4357)..(4472)
  CDS (4737)..(5126)
  CDS (5796)..(6308)
ggctgcgggtgccaggtgcccgtgctgcagggggcaggcagggcccgagccccacggctcccaccttgtctctttcacagacgccaatgagtgtgaagggaagccatgccttaacgctttttcttgcaaaaacctgattggcggctattactgtgattgcatcccgggctggaagggcatcaactgccatatcagtcagtatggggggtgggcgccggcgggtgggccgaggcacatgggaccccgcctctgaccctgctcctctgcccccagacgtcaacgactgtcgcgggcagtgtcagcatgggggcacctgcaaggtgaggcggggccaggagggtgtgtggcgtgggtgctgcggggccgtcagggtgcctgcgggacgctcacctggctggcccgcccaggacctggtgaacgggtaccagtgtgtgtgcccacggggcttcggaggccggcattgcgagctggaacgagacgagtgtgccagcagcccctgccacagcggcggcctctgcgaggacctggccgacggcttccactgccactgcccccagggcttctccgggcctctctgtgaggtgaggtctgcctggtcaccctgccccacctgctgctctgggagctgtagggcaggcctcgtcccctgaccatggggcctgagtgacccaggggtgctgcaggggaagttgtccccaaggcgtcccaggctcagctctccactgggtgccaggtgggcaggcggggctgtcacaggtcaccaggcttggccccctgtggccattgcttgttgtgatgggtttcctggtggcctgggctaggagcccccgggctgctggctgcccaggcctatctgtccatctgtgcactccctcgggactggagggcagggggctctggtgggcagagcacatggggtagggtgggtgcctgatggtggagaggtatacacctgtcataggtgagtcctgggtcggagtgggcatctctctcagggctgatgctctcgcctccctctgaccatctgttggtactggaccccccccacccacctccctaccaccctcggccgcccacgatcctgccctggccttggtgcagaggatgggcctcctgtccagagggcttcttggggcccagggcaggggtctgacctcaggacctgcaagcatggcagtggctggccctggaaaagacccacagtcttggctctgagggtggccaggcagtgtgtgaggggctcaggagctgtccttcctgccagcagcaggggccaaggccacactcctcccgagggacagtgaggaagctgggctgcagtggaggtgggggtgggggcccacaggtatctgcgttcagctaaggcctgggcagtctcaggtgggcaggggtcttgggctctggctggcactgttaggcccagggcggaggggcctgggggtccccagggatctaccttcgtatggacagaggcctggcctgtgttcccggcctgggcctgggcctaggctctcacaggcaccccccaccctgcaggtggatgtcgacctttgtgagccaagcccctgccggaacggcgctcgctgctataacctggagggtgactattactgcgcctgccctgatgactttggtggcaagaactgctccgtgccccgcgagccgtgccctggcggggcctgcagaggtgctgggtgcggcatggggtggtgggggaggtggtggggcaggggcgggcctgactcctgactgtactgcctgccatagtgatcgatggctgcgggtcagacgcggggcctgggatgcctggcacagcagcctccggcgtgtgtggcccccatggacgctgcgtcagccagccagggggcaacttttcctgcatctgtgacagtggctttactggcacctactgccatgagagtgagtggccacgaacggcgggctggtggtggggctgggctggcctgaggccctggctcaccccgctcgcctctgcagacattgacgactgcctgggccagccctgccgcaatgggggcacatgcatcgatgaggtggacgccttccgctgcttctgccccagcggctgggagggcgagctctgcgacaccagtgagtgttccagcacccgcccacacggcctgtgcctccacccctgtgggccccttatcaccctgagatggaccgctgtctgggtgcggcaggccccgtacccagaaaggcctggccagggggtgctgccaccatggggtggagtcccaggctgcccccatgcccgaggccagctcccccggcccgacgctcctcccccgcccctctctgtcctcacctggcccagctccagtgcttcctcccccgggaagccctccctgagcgccggtgaccccccgcccgctgaccggcgtcctcgcccccagatcccaacgactgccttcccgatccctgccacagccgcggccgctgctacgacctggtcaatgacttctactgtgcgtgcgacgacggctggaagggcaagacctgccactcacgtgagtgtccgcaggccctggccgcctggggctgcccccaggaccctggccctggcggtctggggcctgcctgctgagcggcccatgtgccaacaggcgagttccagtgcgatgcctacacctgcagcaacggtggcacctgctacgacagcggcgacaccttccgctgcgcctgcccccccggctggaagggcagcacctgcgccgtcggtgaggagcccccgctgcctctgcgaccgccgggcatatgccctcccaggcaccgctccctcgggcgcgatgggccgaggggtcttttttgagggccacacctgccacctgccccctgccccctgcccccgggtctgtctgccctgtctgggttgggggcgcggtatggagacccagggccagcccagggccaggtgagacgctccctcctcctcctctccttacagccaagaacagcagctgcctgcccaacccctgtgtgaatggtggcacctgcgtgggcagcggggcctccttctcctgcatctgccgggacggctgggagggtcgtacttgcactcacagtgagtgtgggaggggtgtgggcgggggccgctttcctccacccagatgacatccctgcccccgactcgccccccagtcccttctgccagcccctccccctgctgcccctgcccccagcaaaaggcaccctccttgatgaccctccccagccccacagcctgatcacgccaagccagcctggacagtgcctggcacgcttggggggtgggtactgatcccctgcgttctcttctcccaaaccagataccaacgactgcaaccctctgccttggtgagtggcaccctgggggccacagcaggggtgggtgggacttggcataccacggggggccacctgatgcccaccctctgctctgcagctacaatggtggcatctgtgttgacggcgtcaactggttccgctgcgagtgtgcacctggcttcgcggggcctgactgccgcatcagtgagtggccagacagccccagccctgggagcccctcagcccagccgcggtgtcaggagtctggggacatcaacgtccacgtcccttgaagggcagtgtggccacaactacttcctgcctctcttctgagcctcagtttccccacatgtctgtgccctgtggggttcctgctgtataccctgccaagtgattaagtggggagccccagcctgggggaccagtccggggcccagggagctgtgggggttggagcgtgcagcctgacgtgggctcctctgtggccgcagggctgttgtccctgggtgttggcccagctgtctgtccagcaccccttggctggtccgacgcagcagctggggctaatccaggatgggacaggcccactgcagaagcagacggaggagggtgctgttgggccagggtcaggctgggctcaggaaggcctcaggcaggcagcagcttgggctcgggggcaggggctgctcctcattgtcctggggcttgcgcctgtgtgccactggctccccgctgccctaggccatgccggtcctgcggtgggcgttggcctcactgcactgagcagcggtggctctccctgcagacatcgacgagtgccagtcctcgccctgtgcctacggggccacgtgtgtggatgagatcaacgggtatcgctgtagctgcccacccggccgagccggcccccggtgccaggaaggtaggccccgtgtgattgccctgggttggggcgggttggggggcatgggtgacacccagccccgagggccagatgcccactgctgaccctcgagccccttctccccacagtgatcgggttcgggagatcctgctggtcccggggcactccgttcccacacggaagctcctgggtggaagactgcaacagctgccgctgcctggatggccgccgtgactgcagcaaggtgagggcagcccgtgagccgccctgccctacccgaggctggtgcacgctgaccctggccactctgtgagatcaggaggcgggtgctggggtccggatggactgagagccgtctgccctcagggacacccagggaggcgagagctcagccaggccccatgcttcgatgtgcagttgggaaaacaggcctggtctgggtcctgccttgctccgcctgccctttctgatgtcgagcttggcctgcctccctgggagccctgggtagggggtgggctgggccctggggctcacagacttgggcggtgtccctccttggcatggggcccgtgcctgcctgtgggttctcatctgtgtgcctgcatctgaccctcctgtgcgcctgcgcctgaccctcctgtgcgtgcctgcccaggtgtggtgcggatggaagccttgtctgctggccggccagcccgaggccctgagcgcccagtgcccactggggcaaaggtgcctggagaaggccccaggccagtgtctgcgaccaccctgtgaggcctggggggagtgcggcgcagaagagccaccgagcaccccctgcctgccacgctccggccacctggacaataactgtgcccgcctcaccttgcatttcaaccgtgaccacgtgccccaggtgaggggcctggtggcatctgagcttgcagaggccacacgccggcatctgctcgtggcatggcgaaagcctagccccgcagggcagggaggccctggttggctgagcagagtcactcttggtcacagagagtggccctgtggggtcagatgagaggggcattgggcctggtgctgggtggaggtggcagaggaggctgggagagcagccagctgggggtgcctgtttgtccagctgccctgagggcctggactgacggcgccatggctgcctggccccagctcttgggctgcagctccgtgggcagttttgccctggcctaggacccacctttgcctgctgtgtgcttggagctgggcccctgtctcccaggaggggctcagaactggaggagacccactgtaccccgccctgcctctccttcccccactggcctgcaggtggagctgggtccgccctgaggatgggcgggtgggcaccgtcactcctgcctcctggtatagggcacagccgggtgggaagctgcccccccaggcccttggcatccttgctgtgctctcctgggcgggctgtagggtgtgtcccacgtgtacccacagcgccagtccagggatgtaggtgtcaggttcacggccctgccctgcccacgcactgcctgtctctgcccagggcaccacggtgggcgccatttgctccgggatccgctccctgccagccacaagggctgtggcacgggaccgcctgctggtgttgctttgcgaccgggcgtcctcgggggccagtgctgtggaggtggccgtggtgagtgcccagtggggagcagcacctgggtgggccctgggtcccgtactatgcaggtcctggctatgctggacagaggctctggcgaggctagtcctggtgcggaaggactgcgggcaggcctgtctccctgcggcccctcgctgtccatgccgcagacccgtggaactgctccctgggcctggccagcatgagggagatgcagggctgtggtgtggagcccgcttcccctgcagctgcatcctcgcccggtcccctgctctgtttttgtctctgtgtccctacgtcacaggcagcaggagagtccgtgggcttagtctgccctgggaggcctgctttgggactggcacctgccctggacctggggggtgtcagatgtgaatggataccaagggggtcgggtgagactggggtggagacatgcccggagaggggagggaatgttctggaacatggtgggtgggtgtgcagagcagtgggtgtggccatggcacagtgtggctggtggaggccatggccaggcacaggaaggacgtgcagtgttttggtgccctgaggccgcagagggggtgggggacatg

SEQ ID NO: 1624 - protein, 1063 aa, Homo sapiens
MGGGRRRVGRGTWDPASDPAPLPPDVNDCRGQCQHGGTCKVRRGQEGVWRGCCGAVRVPAGRSPGWPAQDLVNGYQCVCPRGFGGRHCELERDECASSPCHSGGLCEDLADGFHCHCPQGFSGPLCEVDVDLCEPSPCRNGARCYNLEGDYYCACPDDFGGKNCSVPREPCPGGACRVIDGCGSDAGPGMPGTAASGVCGPHGRCVSQPGGNFSCICDSGFTGTYCHESEWPRTAGWWWGWAGLRPWLTPLASADIDDCLGQPCRNGGTCIDEVDAFRCFCPSGWEGELCDTSECSSTRPHGLCLHPCGPLITLRWTAVWVRQAPYPERPGQGVLPPWGGVPGCPHARGQLPRPDAPPPPLSVLTWPSSSASSPGKPSLSAGDPPPADRRPRPQIPTTAFPIPATAAAAATTWSMTSTVRATTAGRARPATHVSVRRPWPPGAAPRTLALAVWGLPAERPMCQQASSSAMPTPAATVAPATTAATPSAAPAPPAGRAAPAPSVRSPRCLCDRRAYALPGTAPSGAMGRGVFFEGHTCHLPPAPCPRVCLPCLGWGRAKNSSCLPNPCVNGGTCVGSGASFSCICRDGWEGRTCTHNDIPAPDSPPSPFCQPLPLLPLPPAKGTLLDDPPQPHSLITPSQPGQCLARLGDTNDCNPLPCYNGGICVDGVNWFRCECAPGFAGPDCRINIDECQSSPCAYGATCVDEINGYRCSCPPGRAGPRCQEVIGFGRSCWSRGTPFPHGSSWVEDCNSCRCLDGRRDCSKGVGWALGLTDLGGVPPWHGARACLWVLICVPASDPPVRLRLTLLCVPAQVWCGWKPCLLAGQPEALSAQCPLGQRCLEKAPGQCLRPPCEAWGECGAEEPPSTPCLPRSGHLDNNCARLTLHFNRDHVPQGTTVGAICSGIRSLPATRAVARDRLLVLLCDRASSGASAVEVAVVSAQWGAAPGWALGPVLCRSWLCWTEALARLVLVRKDCGQACLPAAPRCPCRRPVELLPGPGQHEGDAGLWCGARFPCSCILARSPALFLSLCPYVTGSRRVRGLSLPWEACFGTGTCPGPGGCQM

SEQ ID NO: 1625 - DNA, 1069 bp, Homo sapiens
  source (1)..(1069)
  CDS (201)..(869)
tgggcataggaccctctgagccagttgtgggatataatctcctggtgtgccgttttttaagcctgttggaaaagtgcagtattagggtgggagtgacctgattttccaggtgccatctgtcacccctttctttgactaggaaagggaactccctgaccccttgtacttcctgggtgaggcaatgcctcgccctgcttcagctcatgcatggtgcactgcacccactgtcctgcacccactgtctggcactccctagtgaggtgaacccagtacctcagatgcaaatgcggaaatcacccatcttctgcatcgctcacgctgggagctgtagactggagcccttcctattgggctatcttggctccacctcccccacagaacatttctttgaggcagctgagatcatcttattaagtgtcatggcctatgaccactatgtggccatccgtaagcccttgcactatgcaaccatcatgagccaacctatgtgtggattcctgatggtggtggctgggattctgggatttgtgcatggagggatccagactttgttcatagcccagttaccattctgtggccccaatgtcatcaaccactttatgtgtgatttagtacctcttctggagctggcctgcacagacactcacaccttggggcctctgattgctgccaacagtgggtcactgtgtttcctcattttttccatgctggttgcttcctatgtcatcatcctgtgcttcctgaggactcatagctctgaagggcgtcgcaaagctctgtctagttgtgcctctcatatcttcattgtcatcttattctttgtccctttttcatacctgtatctaagacctaacctccttccccactgacaaagctgtgactgtgttttgcaccctatttacacctatgttgaaccctttaatctacaccctcaaaaataaagaagtgaaaaatgtcattaagaagctctggaagcaaataatgacaactgatgataaataagtcttgtgacacaaacatttaggcaagaatatctggtgatattttatagagatttattctatttctt

SEQ ID NO: 1626 - protein, 222 aa, Homo sapiens
LMHGALHPLSCTHCLALPSEVNPVPQMQMRKSPIFCIAHAGSCRLEPFLLGYLGSTSPTEHFFEAAEIILLSVMAYDHYVAIRKPLHYATIMSQPMCGFLMVVAGILGFVHGGIQTLFIAQLPFCGPNVINHFMCDLVPLLELACTDTHTLGPLIAANSGSLCFLIFSMLVASYVIILCFLRTHSSEGRRKALSSCASHIFIVILFFVPFSYLYLRPNLLPH

SEQ ID NO: 1627 - DNA, 937 bp, Homo sapiens
  source (1)..(937)
  CDS (201)..(737)
agttttggactatttgattcttttatgcttcttttttttcattttttttttctaaaggtaaaatattccttcctggaggttttatcacccacactacatagatgaagaataaaaggaatgtgactgaattcgttttaacaggtcttacacagaaccctaaaatggagaaagtcatgtttgcagtatttttggttctttacatgataacactttcaggcaacctgctccttgtggttacaattaccaccagccaggctcttagctcccccatgtacttcttcctgagccacctttctttgatagacacagtttattcttcttcttcagctcctaagttgattgtcgattcccttcatgagaagaaaatcatctcctttaatgggtgtatggctcaagcctatgaagaacacatttttggtgctactgagatcatcctgctgacagtgatggcctgtgacaactatgtggccatctgcaaacctctgcactacacaaccatcatgagccacagcctgtgcattctcctagtggtagtggcctggataggaggatttctccatgcaaatattcagattctatttacagtatggctgcccttctgtggccccaatgtcatagaccacttcatgtgtgacttgtgccctttgttaaaacttgtttgcctggacactcatacccttggtctctttgttgctgccaacagtgggttcatctgcttattaaacttccttctctaggtggtatcctatgtgatcatcttgagatgtttaaagaactatatcttggaggggaggggtaaagccctctccacctgtatttctcacatcataatagttgtcttattctttgtgccttgtatatttgtgtatctgcacccagtgacaaactctgcccattgataaagctgctgctgtattttatactatggtggtcccaa

SEQ ID NO: 1628 - protein, 178 aa, Homo sapiens; identical to SEQ ID NO: 1618

SEQ ID NO: 1629 - DNA, 7273 bp, Homo sapiens
  source (1)..(7273)
  CDS (201)..(264)
  CDS (1125)..(1354)
  CDS (1572)..(1721)
  CDS (1955)..(2086)
  CDS (3141)..(3257)
  CDS (4706)..(4858)
  CDS (5577)..(5698)
  CDS (5963)..(6231)
  CDS (6857)..(6926)
  CDS (6998)..(7073)
aagcaagaccctttgcccttcatcctcagcttcctcatctgtgaaatgcaggagtggtgagtcaaataagatgctgcatgtcctactcttgggacatgccagacacctagaagttagaggttgctcttttatcatcatggtgatggcatgcacctttttcagggccggagccagttcttggaggagactctgcacagggcatggatcactgtggtgcccttttcctgtgcctgtgccttctgactttgcagaatgcaacaacaggtaagggggctctgctgaactgggggcagccctagcccagtcgtgggactgtgatgcaaaagggggaggcgtcaaaccatgggagattgaaaagggccacttaggcttcctgggggcagcaggagctgcttgtgaactagactctcagggtgggatggaaagcccagaggttgtggggccagagggcagttgagacacaaactgagggggaggtgtgtccccacagagacatgggaagaactcctgagctacatggagaatatgcaggtgtccaggggccggagctcagttttttcctctcggtgagttggatgtgcctcccaccccaagcctgcaccttgaatcagtgggtcagggttagtctaatgtagactcttaactgtgcatttcttcagcacttttattgagcacctactgcatgcctgacactaggctctggggatgcaggatgggcatgtcactgccctcatgaagtttatcatcgaggaatgggggcccttaatcatagatgtcatgacactaagtgcagaattatgggtctccatgcattttcctgggaagggggtctaagattctggctgggctctccagggtctatgacccaaagactgagcagctctaggtgagcggccaatgctgaagactggtcagggctaagagtggctactgggaagctgtgagggagcagtcagggaaggcttcctggaggaggtgacaataaactgggacctgaacaggagttaatcaagaggaggggatagatggggtagggaggtaacagtgtgccaaggacactgtgtgtgcagtggtctggaggtgcgtgtgacagaggtgtgggtggggaggccctgccctcccaggctgtctacagccccctctcacccttaccccactccgggctctggcctccctggccatctctctgggctgcagtcaactccaccagctggagcagatgctactgaacaccagcttcccaggctacaacctgaccttgcagacacccaccatccagtctctggccttcaagctgagctgtgacttctctggcctctcgctgaccagtgccactctgaagcgggtgccccaggtcagaggctgcgggttggggggtgtggccagctgccccgccctagaagtcctccaggcatttaaggtctggactttctttaggctccactgtcttcctccccacaccccacagtccaggctctgccctaactggcagtgagttgcctcctctgtaaaatggggctcatactcgctgtgtgaactgtggaaagggaggtgctttattgcccctgcagggcagaatcttcttcctgctttggctggaggctgcccgctgcgggaggcgctgtgggagaggccagaaaccctggctccttttaggaccctggggtgatcagctggatccctggcaggggctggggctggtgctggggctgggtgctgaggtagctccatcttcaggggttcagtgggtcaggtaaacatccaaaactcaggaacagcatggagggaaggcctgggatcttgggaagtttgggaggagatgcagcctggggggagaaggttctgtgggtggaaaccccaaggaaggtttcacggggagtgggaggcagtgaaggtgttggggtcaggtctccaggtcctggttgccaaacagcctgtttgcgaccctctgcaggcaggaggtcagcatgcccggggtcagcacgccatgcagttccccgccgagctgacccgggacgcctgcaagacccgccccagggagctgcggctcatctgtatctacttctccaacacccactttttcaaggtcagtgtgatggcgggccaaggagggtgggtgccggccccttcttgggatccactgcaggtgcccatgtcactgcctggcctctgggtgaccagcactgagtgagaccaaccagccatctgtgcaatccaagccagcaattgtccctctctgggcctcagtttccctgccaactttagcagaatggtaggaaggtataattacaatctgcaaataagacctaagaaacctacgatgtgcctgtcggtaggcgggagacagacaagaaggcacttattattccctgccctcagataactctctgtcttgatgcctagactaagaccttacagatttttttttttttttttggcagagtctcgctctgttgcccaggctggagtgcagtggcatgatctcggctcactgcaacctctgcctcctgggttcaagcaattcccctgcctcagcctcctgggattacaggcgtgtgccatcatgcccagctaattttcgtatttttagtagagaccgggtttaaccacgttggccaggctgatcttgaactcctggcctcaagtgatccgcctgccttggcctcccaaaatgctaggattataggcgtgagccactgagcctggcctgatcttagagatttaatgtcagcagaaggttgattatagccatagagatccagagtgatggatgagtcagggtggggttggggctcttcccagtgggcagtccaggggagtttctggggaaggtgcctttcaaccttggctttgaaagtgagtgaggatagtggtgaggtggagggcgtgaggctggaatgcattaaacgaatgggaggtggagcagggggtggtgagaggacagctttccacagggcagaaacagcacatgcaaaggctgggaggctgggaaggctgggaggctgggaggctgagaaagctttcacgctgcacacgtgaaagtcttgctgcttgttctcatccagggaagcggagctcagaccttacccagggcctccccatttcccctccactcagcccttctcctgctgcccttccaggatgaaaacaactcatctctgctgaataactacgtcctgggggcccagctgagtcatgggcacgtgaacaacctcagggatcctgtgaacatcagcttctggcacaaccaaagcctggtactgctgggggcgcccccgtttccactgcacccctgcccctctgtgactctcctgttgaacactggtttgactagacccaaacctgtggaaccatcttggaaatccatcacactttgaaaattcctgctcaagaaataagagagagagaagtttttactcatgcatttgtcagaattctttcagttgcaagtaagaaaagaccacttcaagccagcttgagcacagagggaactgattggcacacatccatgaaatgtctagaggtgatccaccagcttcagacatagctggatccagggatggatctgatgcccttgtggctcagtctctctccgtctcagcaatggtctcctgtcttggctgtccattctgtggcatgatggatgctggagagccagacttcctttccctcttcccatcaggctcttcccccgactccccacccacaacctgccccagtgcagatcagggtctcaggatcttaaaggttcagctgggtcacacatgtccatccctgcacctgtcactgtgcccagggggatggaatgtgtggattggccaggcctgggtcacacggcccagggactggggtgaaggagtgagctcctagggtaagtgcagatgctgatcctggaacagagacagggctgcttgttgggggtgggggcagagtggggtggttcacaagcctcagtgcctccatttctggttcctggcattcctgaaaagcccggagcctctgctttctggcttcatcttcccttcagcttcaccaggactgccctgcactctaaatttcaccatcatcctttcctttcagctctgggcttttgccactatggttccctccacctggaatgcccttgccctactcgtgttgaaatccaacacgtcctctaagggttcagggcccccacctccccttctccctttgggtcagctctgcctaccctccatggtcttccgtgactacctgtgtcatttcctccacttctccacccacgtggcttggcattagggttgtctgtggatgagtctcccccaaccaggcgtgggtctgagcacattgctgttccccatggggaggaagggaagggatcagctggttatggagcgcctactgtataaaaggccagagctggacactcaagattccgtgttgccctttgtttttccaccattgttgtaacatgggtacgaatgatcctattctgtagatgactaaactgaggctcagagcaacttggtgtcttgcctgggtcactctgagagcccacagtggaggtgggacaggaatctgagactgtctgaagccaaaggccagccagtgcctggtaaaatgttggcaaatgtgcagttgagtcaccgttggcccccaggactcccagacactgatctgcagcctttcctctgcaccctatgactgacccagcatctccacccaggaaggctacaccctgacctgtgtcttctggaaggagggagccaggaaacagccctgggggggctggagccctgagggctgtcgtacagagcagccctcccactctcaggtgctctgccgctgcaaccacctcacctactttgctgttctcatggtatgtatgcatcctgagtggggctcagagctacagagggccctgtgtctgtggcagaggagcaaggcaaaagctggtgcaagggacagaaagtccaactgaaatgggcttaagcaaaaaacaaaaaaaactttatggactcatgtttctggaaaggctgggttaggcttcaggcatggcttgatccacgggctgatcactaagatcactaagatagcactctatctttgtccctcaactgtgcttgctctgtgctggcttagccctcaaataggatctccttatgagataataatatagctggcagcagttccaggctcatgccctgctagctttcaggccagtggaataaaatcttcttttacccagttctgccagccatgtgctcatccctgacccaatcgctataggcagaaggagggagggccctgcttgaccaggcctggcacccctttctgcacaaagagggcaaagtggtggaaccccacaggtgcatagggagtgggagaagggaggcactcatagaagaagagggagatgggagatgtggagggggcaaaactgactgtatctgccatggccttgttcaagccaggtccatggctaggcttgtggggaaggggacttggagaggaggcctcaggaggtccctctgactgaggctgggaggaagggcgatactatgcttctggcctccagcccctcttccctcctgcagcaactctccccagccctggtccctgcagagttgctggcacctcttacgtacatctccctcgtgggctgcagcatctccatcgtggcctcgctgatcacagtcctgctgcacttccatttcaggtattccgctgccacagtgctgggcctgccctgcactgtggcacatcacgcttccttgtgtcccatttagtccactagaactgggtgtgcttctccagagggtggggaccaggaggcgggagaccagccttgtggtgcgactgctgtgggatccctgccccttcttcgcctcagtttccctgtcggcatgcacctatgcacccagtgggtagtgctgcctgggtgatgtccctgggccatggaggaccattctctcacctgcaggaagcagagtgactccttaacacgcatccacatgaacctgcatgcctccgtgctgctcctgaacatcgccttcctgctgagccccgcattcgcaatgtctcctgtgcccgggtcagcatgcacggctctggccgctgccctgcactacgcgctgctcagctgcctcacctggatggccatcgagggcttcaacctctacctcctcctcgggcgtgtctacaacatctacatccgcagatatgtgttcaagcttggtgtgctaggctggggtaagcacatcatctctcctcgcctcctcagacttccaggtgggcagggtattgatcccctttagtcctttctttcccctcctcctcatcgtcatagtggccattacatgaccaccagctgtgaactctgtctacacccacctctactttctatgttactaattttatcacctcttccacctccatcatcatcatcgtcacctcctccaccaccattatcacctcctccaccttcattatcaccatcacctcctccacctcctccaccaccattatcacctcctccaccttcattatcaccatcacctcctccacctccatcaccaccatcatcatctcatccacctctgttatcgccatcacctcctccaccttcatcaccaccatcgtcacctgctccacgtacatcaccaccttcttcaccaccatgatcaccttctccacctgcatgagcgactgctacagcagaggtaacgatcgatggcagagtgccttgaccgtgcaacgaactgatggaactggctttagcactgcggagtaagaggcgggagcagaaacgaagcacgttgctgaggcacgcagataagattgatgaatagagtgtgcgtaactctactgtatacagcttattgcagcgtatcagtgactatgatttacgcagactgtgtgcgcgctgtgagcgagcgtgcgatcaggtaactcgcgatcacctgtgtgagaggatacgtgtgtgcgaactcgcgggagcttgcgattgtattgacagagaggagcctgcatccgagcgagatatgaacgagagattgacaagcgctgcgtgcacgcgggagacaatcacatgaggaacagctggttgcaagagatggggatgactgcatgatgtgacatcggttacgagatttatatgaacgatgtgtgagacgactgatatgagatgttactgtgacgtgaggtgtgtcatgatacgtcttgcatgcgcacatggtgtcggcccaggttgtcacattaggacgtcgcgatactacgcggtgacgatgcatcg

SEQ ID NO: 1630 - protein, 460 aa, Homo sapiens
MDHCGALFLCLCLLTLQNATTGCLQPPLTLTPLRALASLAISLGCSQLHQLEQMLLNTSFPGYNLTLQTPTIQSLAFKLSCDFSGLSLTSATLKRVPQGRIFFLLWLEAARCGRRCGRGQKPWLLLGPWGDQLDPWQGLGLVLGLGAEAGGQHARGQHAMQFPAELTRDACKTRPRELRLICIYFSNTHFFKDENNSSLLNNYVLGAQLSHGHVNNLRDPVNISFWHNQSLEGYTLTCVFWKEGARKQPWGGWSPEGCRTEQPSHSQVLCRCNHLTYFAVLMQLSPALVPAELLAPLTYISLVGCSISIVASLITVLLHFHFRKQSDSLTRIHMNLHASVLLLNIAFLLSPAFAMSPVPGSACTALAAALHYALLSCLTWMAIEGFNLYLLLGRVYNIYIRRYVFKLGVLGWAYCSVSVTMIYADCVRAVSERAIREEPASERDMNERLTSAACTRETIT

SEQ ID NO: 1631 - DNA, 11388 bp, Homo sapiens
  source (1)..(11388)
  CDS (201)..(305)
  CDS (2392)..(2556)
  CDS (3433)..(3627)
  CDS (10949)..(11188)
tccaagggcagttttagccattcattgcctgccctacgaccctcacattagagagtactgtactttctctccaaactatggatggccactaacagtatttcttttccatttttttcttcagagagcactgcagttgccctatcacttatcaatctcttggggatattctgaatgcatccttttttagtaaacgaaaagggatgcaggaagtaaaactgaactcttacgttgtgagcggcaccgtcggtttgaaggaaaaaatttccctctctgaacctgtgttcctgacttttcgccataatcaggtgagaaacacccagggctgggtctccatgcagtaccttaaagggtgagcaggtgcagtcagcttcccaagtaggaaacggaattcagaagtaagagaacacacaagacacgctgaggcatcttcaatgagattttgcttcaccacagtgaggatggctattaccaaaaacttaaaatatcagtatgtggcaaaaaaaaaaaaaaaaaaaaaagaggaacccttatagatctgctgatgaaaatgtaatgtggtacagccattatggaaaacagtacagaggcctctcaaaaagttataaacagaattatcgtctgttccagcgattccactttggggtatgtggccaaaagaattgaaatcaggatctcaaagagataactgcactctcgtgtttattgcagtattattcacactagctgagatatggaaacagcctaagtatctgtcaacagatgaatgaagattttttttttttttttgagacagagtctcgctctgtcggccaggctggggtgcagtggcgtcatctcggctcattgcaacctccatctccccagctgaagcaattctcctgcctcagcctcccgagtagctgggattataggagtgtgccactacacccagctaatttttggtattttcagtagagacggggtttcaccatgttggccaggctggtcacgaactcttgacctcaggtaatccgtccaccccagcctcccaaagtgctgggattacaggtgtaagacaccatgcctggccaatagtttttgttttttttttttcttaagggacagggtctcactctgtcacccaggctgaagtgcaatggtgcaatctcggctcactgcaacctctgcttcctgagttcaaatgattctcccacctcagcctcccgagtagctgggattacagacacctgccatcatgcctggctaatttttgtatttttagtagagacaaggtttcaccatgttgaccaggctggtctcaaactcctgacctcaggcgatctgcctgcctcagccacccaaagtgctgggattacaggcatgagccaccatgcccagcctaatgtacaacactcaatgtaactacacttaataatgtattgtacacttgagatctgctgagagagtgcattgcaagtgtattcaccacgcacacacacacacacacaaaaatatgtgaggtgttggatgtgttagcttcattgtagtaatcatttaaaaatgtatacatctatcaaaacgtataaatacaaattcttctttgttaatcacactttagtaaagctcaggaagaaaggaagtgttgaggcatccagagcttgccacagtgagatgccattctcacgttgaagccaaaaggcaatggaggagaagctctattgagctcagtggaagctggaggcaggaatgagggatcgctctgcagaaactggagatggctcaaagcagaaagggcacagggaagaaatactttatttctctctcttctctcacccagtgagtctcaccaatgcctctctttgcttctataaatagcaaggaagctggcgaagccattcagagggtcaactccagggtgctgagctgaccagagaagggcagaatagatggagaataaacccaccgcaggcgtggtgatgtgaaactcttcccctacaagtgtatttccgatccagtttccaacactgtgcattgtgattaacctgtaaagttgaaataatatgccaggcatgttggctcatgcctgtaatcccagcactctgggaggccgaggcaggcggatcacttgaggccaggggttcaagaccagcctggccaacatggcaaaaccccacctctactaaaaatacaaaaattagccaggcatggtagtgttcacctgtagtcccagctacttgggaagctgaagcaggagaatcacttgaacttgggaggcggaggttgcagtgagctgagatcacaccactgcactccagcctgggtgacagagcaagactccatctcaaaataaaataaaataaaataaaaaataaaaccaggaagagacccactttcatactattctctttccagcctggtgacaagagaacaaaacatatctgtgtctactgggagggatcagagggaggccgctggtccacggagggctgctctcatgtgcacagcaacggttcttacaccaaatgcaagtgcttccatctgtccagctttgccgtcctcgtggctcttgcccccaaggtaccaagattcattcctgtgaacctgtgtatgtccgagaatttgtgagttatcctctgcatttcttacaaaaagattctaaaggtcgggcgcggtgtctcacgcctgtcatctcagcactttggggggccgaggcaggtggatcacttgaggtcaggagttcaagaccagcctggctaccatgatgaaaccccgtctctactaaaaatacaaaattagctgggcatggtagtgcacacctgtaatcccagctactcaggaggctgagggaggagaattgggtgaacccaggaagtggaggttgcagtgagtcgaggtcatgccactgtactccagcctcggtgacagaggaagactccatgtaaaaaaaaaaaagaaaagaaaaagaaaaaagattctaagacaaggagtcaaatggtagtagcttacttgaaaggggattacaggaaacactagtgggggactgagacaatgagatggaagtaagacaggtgtcagtgcagacagcattatcaagccagttaccaccataggtaactggaatttattccctctgggggactctgggagtcagtgtagaactcacatctctgggtcattctatctgagcagcaagggagctggagtatttatacactaactcccattagtcatttgttaagagctgtatccagcactggtctagttgttttggtttttaacattcctgtgtgatgagtgttactactgccctcattttgaagatgagaacactaagtctcagaaaggtaagtcaattgtttcagggactgaactaggaagcccatctggcactacctcaggaaaataacaacaccatcggacaccataatggattccccctttggtgttttgcaggaggaccctgtgctgaccgtgatcacccaggtggggctgaccatctctctgctgtgcctcttcctggccatcctcaccttcctcctgtgccggcccatccagaacaccagcacctccctccatctagagctctccctctgcctcttcctggcccacctcctgttcctgacgggcatcaacagaactgagcctgaggtaggtaatttacccaaattacctcattgccataacgaatccagccatcttgtcccacaagaagatggagagcaaggcattagtcagcagtgatgatgtagagaggaaaagtatgagctccatttcagttgtcctcctatagaagttggaataagacctttacattctgaggggccatttagcaaagtgatggagtgtcaggctgatggtattaaatagggtaacattagcggttgttaggatcaactccagaatgtcacaggcttgccacagtaggagttattttttccttatgtatcagtagagggtgagcaaacaggtctgaagagtgtctatcctgcaccctcaggttgagggaggctctgtcattttccatacacagctcccaaggtcatcgtggtgttcacatatcagccaacccggagggggaaaagaacatggctgagttcccatgggggaggttaacatgtgccacatcatgaagtggtgcatatcacttcccctcacactctattggctaggactcggtcacatgataacacataactgcaagggcagttgggaaatgtggtctctgtctgggaagccacttcctagtgacaaatctatactctggatttgagggtggggaagaggcttgcatttttggtgggcagtgggtttgctgcactgatctgcgcttgaatcgcagctcttcaccctacttgctgtaagacctgttgaagtgacttccccttttaatttatttaaatttaatttttaaactgaaaaatataaagtatatgtatattttttttctgtacagcatgttttgaaatattatacgtcatagaatggctcagttgatctaattaacatttgcatcacctcacatactcagctttattgtgtgtgtgtgtgtgtgtttgtgatgagaacactaacgtattcttttaaaagtttttaagaatacatacattgttaccatgcaactatgatcaccatgttttacaatagatctcttgtggcttcccctttttaaacttcctctgcaaaacaggggcctaatcataggatttagtaagaacttagcaagacaaaacataaaagattatgaattaatcactcagagaacaatgttcacttttatctttatcatgatcctggccatcatattatccaggaagatttaaagctagatggttctctaagtctcctgttaaccctaaaacactatgatcacacagctagaaagttacaaaagcactctgtttatatttaaattttttttcctgagaaatagtatagttttatggttaagagtaagtacattttctggagatagtttaggttcaaatccaattttattttttactcgctgtgagatttgggggccagattttaacctcttggtgtttcatttgaaaataggcagaggttgggaagacacagtcctcaggccaaatctggcccaccttctgtttttgtaaataaagttttattaaaacacagcctcatctattcatttatatattgtttgtggctgcttttacgctacaatggcagaatggtgtaattgcaatagagatttgactgcatagcttaaaatttggcccttaaaatttttttgtctcagagtattgagacaataatatgagttaatacttaacaaagcaatttgatcagtgttcacccatagttaagtgctcggaaggtactaattacttctctgataaaattttcaaatgatgtttttaaaaactgtaaaaataatattgtgggtaagatggagttgacttagtcatcttgaaaatatatgcttttatataatgctctaaaatcctacctcttattttatttatttattcatttgatggatattttaaaaatacccactgtgtgtcaggcattgtgttgcaaatacattaataattaggggactaggggaactacctcagttactttccccatagagttcacagcttagaaacatgtgctgaggccaggtgcggttgctcacgcctaatccgagcactttgggaggccgaggtgggtggatcacctgaggtcaggagtttgagaccagcctggctaacatggtgaaaccctgcctctactaaaaatacaaaaaattagccagacctttggtgggcacctgtgatcccagctactcgggaggctgaggcaggaggatcacttgaacctgggaggcggagcttgcaatgagccgagattgcgccactgcactccagcctgggcaacagagcgagactttgtctcaaaagaaaaaaaaaaaagcagccacagataaaagtaaatgaatgtgtgtggccatgtgctaataaaactttacttataaaaacagatactgggccagaactggcccaaagccactgatttcctaaccctgctcaaggcagcagtggaaaggacttcaagctgggaatgacagaaaatacttatcaggacaacaaaagttgaaggtaaagataactgcagtgagatgaaactagcagcagaaagaatagcaacagggctatgaatggtctaagtgggagttaataaaaatatgggccgggcgcggtggttcacgcctgtaatcccagcactttgggaggccaaggcgggcagatcacaaggtcaggagttcgagaccatcctggccaacatagtgaaaccccgtctctactaaaaatacaaaaaattagctaggcgtggtggcgggcacctgtaatcccagctacttgggagactgaggcaggagaattgcttgaacccgggaggcaagtgttgcagtgagcggagatcatgccactgcactccagcctgggtgacagagggagactccatctcaaaaaataaaacaaaataaaaaaataaaaacatgaacactgctaaaggaagtgggccagattttagaaatgtttgtaaggggagttggtaagacttgaggcccaaatagatgtggaagtggtgtgtgtgtgagaaagcagaaataaggatgaattagaggtttcccatttgggaggttgggtagatggatggcgagaaagaggaacagacttggagcgagacatagaatgaattcgggtttaaatctgttagttagaggtgctggtcagacactggaattgagacatacaatagaaaattggaaataggaattttgagcccaggagagattgaagcaggagaaagggatattggagttttctacacgaaggagacacttcaagctacagaaataacgatcagtgataagtaaaatggattaagaataaagctctgtggaggaggaaggaggcggtagagggaggaggaggaggaagaggaagagggggcgttgggacaggaggaagaaagttccacacgtggtctctccataattctctccagagtccttgaggccatgctctcagaatagaggccactcagtaaggagggtcttcacaggtgccaggccctctgcaaacacctatgaggtagggaccaccaggatgtaggagccacagtctccacattctggatggggacacaaaggcttagaagtcaccccagcctagtccacattttaattgccaattatacttcaaaccagttcttccttaagcctgaattctattttctcttgaaaatccccagagcaatggttctcagcatctttgaagttggatccctctgagaattttgttgaaagctaaagccctttttcccagacaaatgtacctatacacaaaattttgaataaaacttcagttaattcagggacaggaaaagcaaattcaggccaggcgtggtggctcacgcctgtaatctaaagattgggaggaggaagatacatgagatagacgagaagactcaaagataagcaggtgagaattcctggatagatgaatgtccaggacatcaaaggacagaaagtgccaactaggttgatcagcttctgctgaaaggccaagtagaaggacgggcacagtggctcatgcctgtaatcccagcactttgagaggccaaggcgggtggatcaggagttccagaccagcctggccaacatggtgaaactccgtctctactaaaaatacaaaaattagccaggcatggtggcacgtgcctgtaatcccagttactctggaggctgaggcaggagaatcgcttgaacctgggaggtggaggttccagtgagccgagatcatgccactacactctagcctgagtgacagagcaagactctgtctcaaaacaaaaaacaaaacaaaacaaacaaacaaacaaacaaacacacataaacaaacagaaacgccaagtagagagactgctggatttggtagttaagaggctgtgttagtcagggtttctggagagacagaaatagtaggatgtgtgtatattacctgattggatttacctgctttgttgcatgcctgctattttttgtttgaatgccattcttggtgaattttaaattatgagtgctgtatcttttcaaaaaaattatttaaacagttttaggcttttgaggggacataattaagtgactggaaacagtttgatacattcaagtcttgattctaagattgaatagagtggtcacggaattctctttcgtctagggctcatttggccccattaatgatataatactctcctgataattttacctgaaattctggatgttaggagagtctgctctaacatacagagagcctgtttacagaaaatctgctctaacatacagggaatctgtatatcagactcccctaacacacagaacttcaggtaaaattgggtaataggaacaaaccatttggacaataggaacaagctatttccagttctgtgtgaactcagaagattgttctgcctactcctctttaggagccttctcctagttttggttagtctccttgcaagcatttgctgataagtaatcaaaccctctgccaatctctccccttccccgcttcccaaccccactgtagctccctaccctgtggtattttgcctcataaattcttttttttttttttttgagataaagttttgttcttgttgcccaggctggagtgcaatgacgcagcctccgctcacggcaacctccacctctcgggttcaagtgattctcctgcctcagtctcccaagtaggtgggattactcgtgcctgcctctatgcccagctactcttccgttttggttttttttttgtatttttagtagagacggggtttcaccatgttggccaggctggtctcaaactcctgacatcaggtgatccacccgccttggcttccgaaagtgctgggattacagatgtgagccactgcgcccagcctgcctcatacattctagataacttggtctctgtctccattttctagagctgtcataatgaagagccaccatatggacggcttaagcaatataaatttattgtctcacaggtctggaggccagaagtctacggtctatgtgttgatagggtaggtttctttttctatttgtttttattttttattttttttatttttttagacagagtcttgttctgtcacccaggctggaatgcagtggcttgatctcggctaacagcaacctccacttcccgggttcaagtgattttcctgcctcagcctaccgagtagctgggattataggcacatgccaccacacttggctgatttttgtatttttagtagagatggggtttcaccatgttggccaggctggtctcgaactcctgacctaaggtgatacatgccttggcctcccaaagtgctgggattacaagcgtgagccaccttgtccggcctttccctccttttagaaatcactgtaaacataaatattcaatgcctattctccaatatctgtaactcataatgtcatacatgtcatttagcatttagttgtttaatgtgggagagtaaatcccatcctcattatgttatcacgattagaaatggaagccttattccgcacattgaatggaaaattttgtgtctgtgaacacatctggagaattatgagaaatcatgaagcatgacttctataaaagtatattcatttgttctggctgccataacaaggtaccacaaacggagtgatttaaacaatggaaattaattttctcacaattctggaggctcatggtctgagatcaagatgtcagcagggttggctttttttgagacgtctctcctcggcttgttgatggccatcttctccctgtgttctcacttggtcatccctttgtgtgtgtctgcactctaatctcctatttttaaatttttatttatttattattattttttaagatggagtttccctgttgttgcccaggctggagtgcaatggcacaatctcagctcatcgcaacttacgcctcccaggttccagcgattctcctgcctcagcctccagagtagctgggattacaggcgtgagccaccacgtctggctaatttttgtatttttagtagagagggggtttctccatgttggtcaggcaggtcttgaactcccaacctcaggtgatccaccctcctcggcctaatctatttttagatgtacataacttgtattggattagggcccacatatctgaacttattttaacataatgacctcttgaagagccctgtctccaagtacacccaccttctgtgatactggggattagaacatcagcacatgaaattttttttttttttgagatgaagtctcactcttttcacccaggctggagtgcaatggcacaatctcagctcactgcaacctctgcctcccaggctcaagcgattctcctgcctcagcctcccaagtagctgggattacaggcgtgcaccaccacacctgcctaatttttgtaattttagtagagataagatttcaccatgttggccaggctggtctcaaactcttgacctcaggtgatccacccacctcggcctcccaaaatgctggggattacaggcatgagccaccgcacctagccaatagatgtttccactatagacatttggagctcaattccaccgaggatctccagggggcagtgtagagcacatgtcttagattggtagattctaccaatttttgtttattatacatttgggggctgttcccacgacatgtattccttgggtttctaccctgctctatgcatgatgtaaacagacttcaatggctagcagaagtcttcagaaaatgtgtagcccccaggcaaaatgttacagatgctcaaattgaaattccaggccacatccaggaaatgctaagtgctgagcatataatcaggtacagaccacatctgctgcacacccctaactcttctgttccctccaggtgctgtgctccatcattgcagggctgctgcacttcctctacctggcttgcttcacctggatgctcctggaagggctgcacctcttcctcaccgtcaggaacctcaaggtggccaactacaccagcacgggcagattcaagaagaggttcatgtaccctgtaggctacgggatcccagctgtgattattgctgtgtcagcaatagttggaccccagaattatggaacatttactcagtaagcataatgtgtgtctttatgatggtagtagcaatggctactgtaaagaataacaccaatattacaactatcaaagccctatggtgcatcaaaaatcgtgcttcctctatgcagtagctcatgccattctcaccatgaccctatgacgtcagcagtttatttccttacgcacaggacacctgggcctgagtgcatttcata

SEQ ID NO: 1632 - protein, 234 aa, Homo sapiens
MQEVKLNSYVVSGTVGLKEKISLSEPVFLTFRHNQPGDKRTKHICVYWEGSEGGRWSTEGCSHVHSNGSYTKCKCFHLSSFAVLVALAPKEDPVLTVITQVGLTISLLCLFLAILTFLLCRPIQNTSTSLHLELSLCLFLAHLLFLTGINRTEPEVLCSIIAGLLHFLYLACFTWMLLEGLHLFLTVRNLKVANYTSTGRFKKRFMYPVGYGIPAVIIAVSAIVGPQNYGTFTQ

SEQ ID NO: 1633 - DNA, 8360 bp, Homo sapiens
  source (1)..(8360)
  CDS (201)..(406)
  CDS (3710)..(3809)
  CDS (5106)..(5414)
  CDS (5775)..(5891)
  CDS (8035)..(8160)
taacactcgccgtgagggtccgcagcttcattgttgaagtcagctacaccaagaacccactggaaggaaccaattctggacacagggggacttcgtgcacgcagcactccatgagaccatgagctttctcaccgggcaggaggagcccatccccagctacacgtctgggcccagcgctctcggagctgctttggagaaacatgcttggcgttgtctatgccaatggccaggctcctgggactctacaggtttctccaggtaagtactcagagccgtaccctcccctaatatttgctgtggtattggccacaatgggggtgacgctgaggccctaccacggagggtcctggctccccgccaatgccctacagcctgacgccatcctccccctcaccatgacctctctgtaagagaatggtgatcgctgctgcattcaccaggacactgagattgagggaactagcagtgacacgttgcagctcacccagcactggggcgctgaagctgggttttgagtccaggccatagggcttgtgccgccagcctccacacggccccgccccgctggggcctcctgactctcaggccctcgggtgtcattcccataatagtagctatgtctagaggcaactttttttttctgtttattttatgtatgtatgtgggtgtattgagatggagtcttgctgtttcccagggtggagtgcagtggcacgatctcagctcactgcaatctccgcctcccgggttcaagcgattctcctgcctcagcctcccgagtagctgggtttccaggcgccccctaccacctcccggctaatttttgtatttttagtagagacggtgtttccccacgttggccaggatggtctggaacttctgtccttaggtgatctgcccacctcggccccacgaagtgctgggatcacaggtgtgagccactgtgctggggcattttaatttttttagtgatggggtctctgtcgctcaggctggagtgcagtggcatgatcacggctcactgcagcctcgatttgctaggctcaagcagtcctccggcctgagatataatccacataccgcgtaactcactcatggcttttggtatgttcgagttgtgtagccatccccacagccaatttgagaacattttcatcaccccacaaggaaaccccaacccctttagccagcagtttccatcagctccacctgccggcaaccactaatgtatgttttgtctgtacagatttgctttttctggatacttcctataaacggaatcatacgctgtgtggtcctttgtgactggcttttctcactaaatatattttcaaggttcatccacgttgcagcctgtgtcagagcgtcgttcccttctattgattaattttccatcataggctgggtatagtggccctgtgggaggccaaggtgggaggattgcttgatgtcaagaggtcaagaccagcctgggcaacatagggagactccatttctacaggaaaaaaaaaaaaaaattagtggcatgcagctgtagtcctgggtactcagaaggctgaggcaggagaatcacttgagtcggggggcggggggggtgggtcaagggtgcagtgagctataatcgtaccactataatccagcttgggcaacagtgcaagaccctgtcttaaaaatccgttgtatgaatagagcatgtcgtgtgtatccatttattagttgatgtatatttgaactgtttccattttgggcctactgtgaatagggctgctatgaacatttatgtatccgtttttgtgtgtatgttcagtgtgttttcaattctcttggttgtatgggtagaatttctgggccaaatgttcatgctatgattaactatctgaggagctgctggagtgttttccaaagcagcgcaccattttacattcccaccagcattgtatgacgagtccaatttaatagattcatgttccactgagaaacctgtaaatttgggtttacaggattcctctgcccttgaacgccttaaatttgcaaagtttgctggcctgctgggggagaggcctgccttcctacctgtgaagcagggggccctgtaaatcacagaacaggttggaagggttttcctggggcggtgtgaatgttggggccacaaagaaagctcaccccttcaccccttactccttcagggtgggttgtcatgtattggggagtttattctgaggtgtgacacttcaggtatgggcttgatcgtacgatcaatttagtccagtcctatcctgataaaaaggagagttgatttctatagaacctctgcaaataaccgcatagctattctaggtgcttttaaccccaaagtatcaagccaggctgatttttttccaagaattcaccttgattacttcccacttggattcttacataaaatgcttctgaactagaagtttctatatgtagactttcttttctttccttttaattcaagcacatttaaaggattagagactcaattttttttttcctttttgaatttttttgagacgaagtctgactcttgtcgcccaggctggagtgcggtggtgcgatctcggctcactgcaacctctgccccctgggttcaagcaattctcctgtctcagcctcccaagtagctgggaccacaggtgcccgccgccatgaccggctaatttttgtatttttagtagagatggggtttcactatgttgcccagtctggtctcaaactcctgacctcaggtgatccacccgcctcagcctcccaaagtgctggaattacaggcgtgagacactgcgcctggccttttttaaaacaaaacaaaacaaaacaaaacaaaactctccctgtgttgcccaggctggcctgcaactcctgggcttgtgatccacctcagcctcccagtgttgggtttacaggcatgagccactgcgtgcagctgcaactgcatttcttgactgcagctcaagaagctgttttcctgtacctgtagggttgccagataaaacagtacccccagtgaaatttggttttcagataaacaatgaatagtcctttttagtagaatttggtcccaaatattgcacaggacatacaagacatacttatgctaaaatattagatgaatttatctgaaatttaaacttaattgggtatcctgtttttttattttcaaatctgttagctctacctgttgcgtcagccttatgggtctgtgtaaaccaatcagaccagagcaccgttccgttcagaccccataacctttgcatagcctatttccttactaccctctggcggtaggagaatgttttgcacccacacgaggagcgtgttaaagtctctgatccaacagaccccagagaccgagcagtttcatcctgtgcctcagccacaggtcagaagcaaacacagacacaaaacctcgttgaccccgatttcatagaactttatcttccggggcacgaagagtagtctcttcattggcaaatcgacaagcaggcaaaaactgacaaagatcacagcgtggccaaacaacacaagtaggttccgagtcattgccactgccagtgaagaactgtccgtccgcgctgtgtgaaccgtaactagaatccgaaccccaggcccggcatggtggctccagcctgtaaccccagagttgtccacgctgtggaaaccggaactagagtccgaatcccaggccccgcacggtggctccagcctgtagccccagagttgtcggcgctgtgcaaaccggaactagaatcggatccccaggcctgctgaggcaggaggatcacgtgagcccaggaattttaagaccaggctgggaaacatagaccccatctctacaaaataattttttttaactgggggtggtgggtggtgcacatctgtagtcccctgaggcaggaagatctcttgagcccagtaggtggaggatgtagtgagctgtgttcctgccactgcactctagcctgggtgacagtaaaaccctgtctcaaaaaaaacaaacaaaaacccagcttggcaaaggagcagaaacgtaagtttgaagtgggcaaaacgagaggaatgaacattaagttcaattattccttggggctgggtgctgcggcttacaactgtaatcccagcactctgggaggctgaggcaggccgatcacgtgaggtcaggagtttgagaccagcctggcctcaagtgatctgcccacttctgcctcccaaggtgctgggattacaggtgtgagccaccacatctggcctttttctttcttcctttccttttctcctttttttttttttctgtgcctgcttggctcgctctctctcccctcctccatccctccctccctccctccctcctctccctccctccctcccttcttcccttcctgcctgccttccctcctgtttctctgtctgactctgtctctctgtctctgtctctgtctgtctctgtctgtctcttcctctgtgtgtctctgtgtctgtctctctctctctctctctgtgtgtgtgtctctctttctgtgtgtgtctctttagagtagggggtcatactgtgttgcccaagctagtctcgacctcctgggctctagcagtcctcccaccttggcctcccaaagccctgggatgtacgtgagccaccatgcccagacttatgtgggaatttttttttttttttgagacggagtctcattctgtcacccaggctagggtgcagtggtgcgatttcggctcgctgcaacctcggcctccagggttcaagcgattctcctgcctcagcctaccaagtagctgggattacaggcacccaccatcatgcctggctaatttttgtatttttagtagagatggggtttcactatgttgttggccaggctggtcttgaactcctgacctcaagtgatctgcccgccttggcctctcagtgctgtgattataggtgtgagctttcagtgacaaaattgggggacacacccagggccaccagggacgtgtgggtcaacctggctttcttttgaacctggtggtcagcaggtgcctgagctgctcctcacccctccccattgccctggcctcttcctgcacaggtcagcccctcctccacactggccagcctcagcgacaggacccagttcccatccttctttcagaccctgctcagtcacctcacgaccacccatgcagtggtgcagctgatgcttcacttccgatggtcttgggtgagcgtcctggcgcagggggacgactttgagctgcagggcaggtctctggtcgtccaggagctgggccaggctggggtctgcattgaattccaactctgcatccccacccgggagtccctgaagatgaaaaacatcatctggctgatggagaactgtacggccaccatcatcctggttttccttaacagctagcacttcagactcatcctgcagtgcctggcaggccgaggcatcctgggccaggtctgtgtcagctgggacactctgcacatggcgctggtcctgactgtgccagtgccttctgggttctgcagggctcattcagcctcctgctttgcaacagccagccccccgacttccctgcgccttgccaggaccccagaagacatgttcatatggagattctgggaggtcaccttcaagtgcacatagccccatagcagctgggggccagcagggaaaagcacagcggctgcaggagtccagttctgctcaggaaatgagagtctgagggttgagcactaccctttccagaaggaaagcaaagtacacatcgcctacacagtggtctatgccatcgcccaggccctggcaggctgcaagcatggggaccaggggtgtgccgatgcctgggacttccagccctggctggtgagaggcgaacgtgtggagtggggctgagcatggtggctcacgcctgtagtcccagtactttgggagaccaatgtgggaggatcattcgagcccaggagttcaagatcagccagggaaacacagtaagacactgaatctacaaaaaaatttttaaatcagccaagcatgggctgggcacagtggctcacgcctgtaacccccacattttgggaggcagaggcaggtggattacgaggtcaggagatctcgagaccatcctggctaacacagtgaaaccccatctctgctaaaaatacaaaaaattagccaggcgtgatggtgggcgcctgtagtcccagctactcaggaggctgaggtaggagaattccttcaacctgggagggcagagcttgcagtgagccgagattacaccactgcactccagcctgggtgacagagcgagactatctttaaaaaaaaaaaagtcgtgatggtgcacgcctctagtcacaactacttggaaggctcaggtgtgaggatcgcttgagcccaggaggttgaagctacagcaagccatgatggtgccactgcactccagcctgggcaacagagtaagaccttgtctcaaaaacaaactgtggagtagatgattcagggaaggggagacagcaggaaactcacttggtctcctggtggggaggacaggggcagtgctcctcagtgaggatatcttgtattcacagccctaagccacatcttagcaggagcactggacgaagatttttttttttttgagacggagtttcgctctgtccaggctggagtgcaatggtgtgatctcagctaactgcaacctctgcctcctgggttcaagcaattcttctgcctcagccttctgagtagctgggattataggcatgtgccatcacgcctggctaattttgtatttttagtagagatggggtttcaccatgttggtcaggctggttttgaattcctgacctcagatgatttgcccaccttggcctcccaaagtgctaggattacaggcatgagccaccgtgccgggctgaggaattttttgttttgttttgtgttaagacagtgccttgctttgttgttcaagctggaatacagtgatgcattcacagctcactgcagtctcaacctcctgggctcaagcgatccttcagcctcccgagtagctgggactacaagcatgcaccaccacgcccagctaatttttgtattttcaccatgatgcccaggctggtctcaaacttctgggctcaagcgatctgtccactttggggtaagtgttgggatcacaggcataagctaccatgcctggccaggatgaggggtcttaagtccatgctaggtttgtgactgagggatcaggatgtctaggtgttcagggactgacctgtgtaggtcccgccaggattttactccacttggagtgtgatgggaaggccaaggaggaagtgtttgctcagacggaatccctggagcaggggccacactgtggcttttgtgcgttccttcctccgtggaaaaaaaaattcttaattcaattttaccattgccttggtctaaagatgaatatatcctgggttggactcattattatatgttcattattacttttttttgagacagagtcttgctctgtcgcccaggctggagcgtagtggcatgatcttggctcactgcaacctccgtctcccgggttcaagtgactcttctgcctcagcttcctgagtggctgggattacaggcgtgagccaccacgcctggctaatttttgtatttttggtagggacggcatttcaccatattggtcaggctggtcttgagctcctgacctcgtgatctgcctgcctcggcctcccaaagtgctgggaccacaggcttgagccaccgtgcatggcccattaattactttttaatttttttctttgcttttacaagcagttaacattagaacattttcatgggaccctgcaaatatcacagccctgggtctcccgtgcctcatggatacgttggccctgcctgaggcagcccctgctcaccacggtggctgaggacctgatgcattttgcacaggccctgggactggccctgcccatctacagtgtcatccatccttccccagctgcttcgtcctctcaagaacgtgcatttcaagacccctgatgggacagagatcatgtttgatgccaacggagatttaattacagaatttgatgttgtctatggacagaagaccactgagggctgattccactttgtccacataggcatagtcaacccgtgagcccctctgggagacagaatgacagtgcatgtgacaaaggaggacctctaggtcagtttccagggtgcagaaatgatcccagttctggtgtattcgagtcagagggaagcacagaggccagcggtgtccctatttggtacatgaagttggtgcagctctaaatt

SEQ ID NO: 1634 - protein, 285 aa, Homo sapiens
MLGVVYANGQAPGTLQVSPGKYSEPYPPLIFAVVLATMGVTLRPYHGGSWLPANALQPDAILPLTMTSLPRTVAPACSPRVVGAVQTGTRIGSPGLLRQEDHVSPSSTLASLSDRTQFPSFFQTLLSHLTTTHAVVQLMLHFRWSWVSVLAQGDDFELQGRSLVVQELGQAGVCIEFQLCIPTRESLKMKNIIWLMENCTATIILKESKVHIAYTVVYAIAQALAGCKHGDQGCADAWDFQPWLLLRPLKNVHFKTPDGTEIMFDANGDLITEFDVVYGQKTTEG

SEQ ID NO: 1635 - DNA, 1279 bp, Homo sapiens
  source (1)..(1279)
  CDS (201)..(377)
  CDS (419)..(627)
  CDS (878)..(1079)
tgtatgctgagtgccggtcccctgggcccacttttctttctctacactttgtctctgtgtcttatttcttttctcagtctcttgtctccaccttgcgagaaatacccacaggtgtggaggggcaggcccccttcaatcagtaatgaataggtgtgaaacgctggtaaggctggtttagtgcatagggagccttccttcacatggctggtgtcattacgatcctgtggcagacgcagggatgtgtgtctcccacaggtacgaagagatgtcttctgtgcccagaggagcagtactcaagccgcaccagagatggctgcctgcccaggacagagaccttcctggcctttgacgaccccctgggactcatgctcgccttggtggcgctcatgctggccagcctggcagtgctggtcctcagactgttctgaagcaccgagacacacctgtggtcggggccaacaacagagctctcagctgcacgccgctcacctccctgaccctctgtgccctctgtcccttgccttgccttggttgtcccacagctgccacctgccgcctctaccagaccacagttgctgttgtgttcaccatggctgtctcttccgtcctggccttcagggtcaccaggtgacagggtctgggtgtgcctgggacctggcgcttccacctcggtggtccttgctgcttccttggtgcaggttgttctctgtggcatctggctgggcacttccccaccattcccagatggggacatggcctcagagcccagccacattgtcatccagtgctgagagggctctgctgtcgctttctcctgtgtgctgggctacctgggcctcctggctgggggcaccttctttgtagccttcctggccaggggtctgccagacgccttcaacaagtccaagttcctcaccttcagcgtgctgctgttctgcagcttctggacaaccttcctgcccctgtaccacagcgcacagggcaagtccactgtggccgtggagatcttttccatcctggcttccatggcagggctgctgggtggcatctttgccccaaatgttacatcatcctgctaaagcccgagcggaatgccccagactgggtgaggcgaggacactgggatcggtgggaaacgtggagccaggagctcctcagacctgcgccataaacccacgagccaggccttgttgaagatatcagggcccctgatttgagctctgggcttctgtgtggattaaaagatagttaaaggatgggcgtggtggctcacgcctgt

SEQ ID NO: 1636 - protein, 195 aa, Homo sapiens
MAGVITILWQTQGCVSPTGTKRCLLCPEEQYSSRTRDGCLPRTETFLAFDDPLGLMLALTVLKHRDTPVVGANNRALSCTPLTSLTLCALCPLPCLGCPTAATCRLYQTTVAVVFTMAVSSVLAFRVTRGLPDAFNKSKFLTFSVLLFCSFWTTFLPLYHSAQGKSTVAVEIFSILASMAGLLGGIFAPNVTSSC

SEQ ID NO: 1637 - DNA, 6987 bp, Homo sapiens
  source (1)..(6987)
  CDS (203)..(314)
  CDS (816)..(929)
  CDS (1029)..(1142)
  CDS (1255)..(1422)
  CDS (1901)..(1928)
  CDS (2422)..(2507)
  CDS (3684)..(3797)
  CDS (4629)..(4825)
  CDS (5352)..(5502)
  CDS (6330)..(6787)
cattaagtgggtaaggcactctctggaagcttctgcttgataagccgcctgtctaatttgagaaacagccctgatggagggtagcaggtggaggtgccaggtgcattgtgtcaggagggagccatgaaaactgctgaacagtgcttgtctatggcttcacaagtccttcagttctttttttgctttactttgtttcatagatattaatgactgtgagagcaacccttgtagaaacggtggcacttgcatcgatggtgtcaactcctacaagtgcatctgtagtgacggctgggagggggcctactgtgaaaccagtgagtctgccactctttggggagctctgggatgtatgggtcatgttggagggatcccacttcaacgtgggaaaactttctttgtactggaaatctctggaagcaagaccgcagtgatttctgcactgggacagtatcacttgtgtctcatttgcatttatgagtcctgatgatagcttatggggaggagcttctgctgaggacctatagaattagactgtgtaataaatattcctgcttgcaaggaaagtcatatttctactttcatttccatgggacttccagaggcccaccccacatcttgcctaacttgtggcattcaaagtaacccagttgggagctcctttattcctggaaaagcctgattgtgttaaagtactacgactgtggctgttctcagaataggatgttggatgtaagcagtaggaaaggcttggctctcgcctgtcgtgaatggtcctggatctcgtcttcagccgattgtctcccctttgattctagatattaatgactgcagccagaacccctgccacaatgggggcacgtgtcgcgacctggtcaatgacttctactgtgactgtaaaaatgggtggaaaggaaagacctgccactcacgtaagtggtagttggccttggatgctatctctgggacccttccctctgtcttctgtgggagggggccactgggactcacactgaaatattttcctccaggtgacagtcagtgtgatgaggccacgtgcaacaacggtggcacctgctatgatgagggggatgcttttaagtgcatgtgtcctggcggctgggaaggaacaacctgtaacataggtaactttatgccccacgtgggatctgcagtgggcatggccacctgggcgtgtctgctggttggcccctggagcttatgatatttctctgggcctggttcttgcccctccagactgtttctggatactcagggagggtggtcgtgtctgctcttcttttatagcccgaaacagtagctgcctgcccaacccctgccataatgggggcacatgtgtggtcaacggcgagtcctttacgtgcgtctgcaaggaaggctgggaggggcccatctgtgctcagagtgagtgtcctccccccttgaactctcccagggctgtcggagcagatcctgacacccttggggacttgcaatggaaaccagaagcagagctgtttgatgtctgcttttgtatcacctgggtctgcattaatgacttgatgggatacagccctgacctgggcatgagaaagtcgccaataagataagtggagacagatggcgtctcagttcccagctctgggtctgaccagcagcctgtctccttccattctcacccccacccctatcccctaccagggcctcttcctgtgtacatgtgtcccacagcaaatgaaactaagtgtggtgcgggcctggttccaatttagcaaaggtattttgctggtgttaactacgactttatcatttgggtattaggaaaataagtggtggttttacttagggctaagaccgctttccctgttgaagtcctcactattaagttgtcttttctttgcagataccaatgactgcagccctcatccctggtaagtgtgacatccttttaagccagcactcatccactatcgtgtgtgtgtgtgtgtgtgtgtgtgtgtgtgtgtgtgtgagaatcacccagggattgtgtttaaaatgcaagttctgagtcaggaggtctggggtggggcctcagactgcttttctaacaagctcccaggtgaagcgatcctgctgccccatggaccacactttaattagccaggttgtgtcctcatttagagcagtgatttttcaaccttggctgcacaccagaatcacctgggagcttttaaaaatcccgctgcctgggctgcaaccaagacctgtgaaattagactttctgggggtgggacccaggcatcagtattcttttaaaattccccaggcaacggccatggggtgagagccactgactgtaactggtgtggtgacatgtgagtgattggcagccagagtaatggactgggaggttggtaaccaaggtggtctttgctttcttagttacaacagcggcacctgtgtggatggagacaactggtaccggtgcgaatgtgccccgggttttgctgggcccgactgcagaataagtaaggactgtctccgtctggttttcccaatggctttaccgcttcattccatgcctcaccccaagactttcatctttaaaaacaaagccaccattccctttaagtagctctcatagagcaaaggatctctctcctccagctgggattaagatatgccaggctggatcctcccaggtacctgctggtagttccctgggtggtgtagccctccttgttcttggggagagagtgccagtcacagaatctgatgattaatctacagtggggtcctgaagaaagtatgtgcatttccccatgactaacatgaaattatgggcaagcagatgttaaccacagctacactggtataggataaagctaatacaaacggaagggaggacgactgtggcttccagaggcttgtctgtgctgggtctgatcaggccctggagaaatgactaaaacaggaaaataggggcaggcaacgcagtttttcaagaggcttaaagcatattattttgagccttttctctacttttttacaagccctttctcttacagaacaaaaaaggtgctagagtagttatggtttgattcttgtacccaaattgtctgaaattttactggtgcttgaaatccaagtctgggattaactagtcttcagcactagatgggggcaggttgtatctgtttcatgtttctaaataaacagttggcaaactgtggcccaggggccgtatccagcccactgtctgtttttataaatacagttttcttggcacacagccacacattcatttatgtattgtctatggctactttcatgataccacaagagttggatagttgtgacagagactatataccccacaaagcctaagatgtttactgtctgaccccttccaggaaactttgccaggcttgctgtaaattgcactgtcaaaggaatcaaattaaaaattgctgcctcccaaaatggttctccactgttagaactcaggatggtggtggtctttgggagccagtgattggaggtttttgcaatagatctgtttcttcttttggatgctgcttacctgagtgaaaattcatcaagcttatgatgatatgcttttcttgtatgttatgtcaataaaaacaatctcaaaacattgccacacaccatcagtccctaaacttgaactccatttctcctagacatcaatgaatgccagtcttcaccttgtgcctttggagcgacctgtgtggatgagatcaatggctaccggtgtgtctgccctccagggcacagtggtgccaagtgccaggaaggtatgtgtgccaggcttcagctgcccatgggtcttctggggtgagcgagctttgcagtcaccatttgacttttcacaaataagccactgtgctcagggaagggaacacacagtgggactacaagggaaagggaacgtgaagagtcttccccaaaacaggtagctgttgtttttggtcagctgttgccacaaaactgtgtaccaaaccatcccaaactgctgtggcttgcagcaagcattatttttattgctcatgatatgcagcatgggcagagagattgcgctgtgggttgggttcagttcgaccagtggctgtgtctggggcatattcctttcatcgccagtgggtaggtgtgcaagaggctagtcaaaggctctgctcacatcacatctgccaatgttacattggccagagcaagtcttgtggccaagcgcagagccagcaaaggcaggaagtacacatgctgttactgtgggaagaatgatcttaacatggcaaagggcacaggcataaccatttcataacagggaccaaagaattgaaccccgatccggttcacagaaaaataaactgctcacccgtctccacctgtcagtttcagggagaccttgcatcaccatggggagtgtgataccagatggggccaaatgggatgatgactgtaatacctgccagtgcctgaatggacggatcgcctgctcaaaggtaggacatgatggctgccgcagttcacctgtgttctggaatcagggatgagcatgcctgctaagctgccagcttctgtttttctccaggtctggtgtggccctcgaccttgcctgctccacaaagggcacagcgagtgccccagcgggcagagctgcatccccatcctggacgaccagtgcttcgtccacccctgcactggtgtgggcgagtgtcggtcttccagtctccagccggtgaagacaaagtgcacctctgactcctattaccaggataactgtgcgaacatcacatttacctttaacaaggagatgatgtcaccagtatgtaacaacctttgttttttttttgaatggtggatgtctgcttgcttgctttaaaggaggaatgccatgagctaggatctacttctccctagcttacattcctgttttataataaagtaagcttgaacttagccagcctcaaagagaacatctcagccttttgttcttcctctcaatcttacacgtgtgtgggtttttaaaaatcgttttagggtcttactacggagcacatttgcagtgaattgaggaatttgaatattttgaagaatgtttccgctgaatattcaatctacatcgcttgcgagccttccccttcagcgaacaatgaaatacatgtggccattgtaagtataagacccattcacacctcattattcgatggcaaggcagttcggttaaccagtgtctgaatggagcaaattcactgacaaaaagctttgcagacacagattgtcgagtaattttgaagaaaggctgctttgagtattcctctgactctcaagtctgacaattgtttttccagtctgctgaagatatacgggatgatgggaacccgatcaaggaaatcactgacaaaataatcgatcttgttagtaaacgtgatggaaacagctcgctgattgctgccgttgcagaagtaagagttcagaggcggcctctgaagaacagaacaggtaggtgtcaagtgggactagtttgtgtgatgatagtagatgatctcattatactattcaataaagccatcaggtcgagggattatctggcagtgccctaccctcgcaggagctcccaatttaactgagaactgagggcagcctactttactaaggtcacatggcccatgggaacagaggtctgcctcatattttccttcccaacacactatgcaacgttccctgcagaacaggtattgtgctagatccgtgacaaagccctaggacactgcttgtcctttgtccttgagtttgaagctgtacaaagcctgacttggcattttggtgtcctgggacagcctagccactgctgagctctgtgaggctcgatggccccgcaggggtgtccaggcttccctcctgaggatctcgagcaccgtttcagccaagggagagattgggcatggagccatggcacgtttgagctgtctgtgctaatttgaatcggatttctagttctgaaaaccaactcctgtactgagctgcctcagtagccagacttaacaagacactgctctccccatgcgaagtcaaagagcctgtaggagctgccgctccacccagtctctccagggataagagtatcaaggtctacaggggcctgatcccagcatttgcttatcaagttgtgaagtgaccatatgcaatgatgaaaagggacttgtccctgtggcccccctcttagggataaagggcaggagaaccactgttggtattcttttgttcctgcgatgatgcttttttctttctttcttggagagttaattggttttgtgcctgccttacagatttccttgttcccttgctgagctctgtcttaactgtggcttggatctgttgcttggtgacggccttctactggtgcctgcggaagcggcggaagccgggcagccacacacactcagcctctgaggacaacaccaccaacaacgtgcgggagcagctgaaccagatcaaaaaccccattgagaaacatggggccaacacggtccccatcaaggattatgagaacaagaactccaaaatgtctaaaataaggacacacaattctgaagtagaagaggacgacatggacaaacaccagcagaaagcccggtttgccaagcagccggcgtacacgctggtagacagagaagagaagccccccaacggcacgccgacaaaacacccaaactggacaaacaaacaggacaacagagacttggaaagtgcccagagcttaaaccgaatggagtacatcgtatagcagaccgcgggcactgccgccgctaggtagagtctgagggcttgtagttctttaaactgtcgtgtcatactcgagtctgaggccgttgctgacttagaatccctgtgttaatttaagttttgacaagctggcttacactggcaatggtagtttctgtggttggctgggaaatcgagtgccgcatctcacagctatgcaaa

SEQ ID NO: 1638 - protein, 513 aa, Homo sapiens
INDCESNPCRNGGTCIDGVNSYKCICSDGWEGAYCETNINDCSQNPCHNGGTCRDLVNDFYCDCKNGWKGKTCHSRDSQCDEATCNNGGTCYDEGDAFKCMCPGGWEGTTCNIDCFWILREGGRVCSSFIARNSSCLPNPCHNGGTCVVNGESFTCVCKEGWEGPICAQNTNDCSPHPCYNSGTCVDGDNWYRCECAPGFAGPDCRININECQSSPCAFGATCVDEINGYRCVCPPGHSGAKCQEGHSECPSGQSCIPILDDQCFVHPCTGVGECRSSSLQPVKTKCTSDSYYQDNCANITFTFNKEMMSPSAEDIRDDGNPIKEITDKIIDLVSKRDGNSSLIAAVAEVRVQRRPLKNRTDFLVPLLSSVLTVAWICCLVTAFYWCLRKRRKPGSHTHSASEDNTTNNVREQLNQIKNPIEKHGANTVPIKDYENKNSKMSKIRTHNSEVEEDDMDKHQQKARFAKQPAYTLVDREEKPPNGTPTKHPNWTNKQDNRDLESAQSLNRMEYIV

SEQ ID NO: 1639 - DNA, 6901 bp, Homo sapiens
  source (1)..(6901)
  CDS (201)..(513)
  CDS (1633)..(1937)
  CDS (3480)..(3614)
  CDS (6546)..(6701)
gggcttcccctccagggtggcctccgagccctatctccctccctccgtgggtcatccccctgggccttatgctggtcacgagcctgtttgagctgagagcaccctcctgacccttgcattgggccctctgtgtcagtggcctcacccctgcagcatcctgcctggatgtgcccggccctgtacttccccatcctccccacatgcaggcagcagtctcccggcatgggcagcccggcccacccttctctcccgcccctgccatactcggggccccttctgctcctgtgtggccgccttctccaggctccccgaggcccacactgggctcttgccgtccctggctcgtgaaggcccagcgtgatcttgcttgggcccccccactgacctgccagcactgtggaaagggccagggcctctgccattgtgctgtcccattgctgcagccagggggacaacgcctgaaaggttttagttataaagtcattgatgcccatcgcaaaaaaatccaacacggtgccgcagcgtgcaaagcagaaaactgctgtttgctacggggaatcccagcattttctgcttgtctgtgttgggttgatgccagacacagatgcagatggtcactcacagatgcaggtggtcactcccggtcatgagtggtgggccttacaacccatccccagtctatgggtaaagtcaccatttccatttttcttacacgaggaaaacactgagatgaatgcccttctacctacatttttgtttccaaattctaataatgaccctcaggtggattcctggaaggggaatggccaggttggagagtatgtgcttttgaaagcaggtttctgtcaatattgcaggtaccctgcaggccggcatgcgggcttcctccccgtcaggatggtggagtggcctccccaccctccctgagcccctgacgggccggctgggctcccagcctttccttaaccagagtgaggccggccggcctgctgtggactgagtggcccctgtgtgtctcctgactctgttgggactcgctttcctccctgctgatctggggagcattcatctgtatcatgtattttcaatcacctgtgcccccatcacgccccacactcgtctgcctttaattcaactcacagtgtttctgagtgtccttggaagcaccctgggggctggcctgggctctgccctgcccagcgctggcatccagaagctcgtgtttgtgctcagttctccctgttgttcgtctgcccttcatcccactgacctgctcaccgggacctctgtgtgcttctctcgtcctccctgctgccggcctgcctgcctgcccccgagcctccactgtccccactgtccccccgtctccagtgcccagcagcacagacacctctgcccttctccaaagggttcctgggcatttttgtttattttttcttcaggtgaactttaggacattttttgtccagttcttttttttttttttttttaagcactttgcagattttaattggaactgcatcggaagactagtttctttgcagagcaccagaagcctggcgtgtcacctctccatgtcaggaatgtggtgccttcattcctggacatgttcatgccaccgctcacctccagggcccgccctgcctggctgccactcacctccagggcccaccctgccctgctgccactcacctccagggcccgcagtaactgactgccactcacctccagggcccgccctgcctggctgccactcacctccagggcccgcagtaactgactgccactcacctccagggcccgccctgcctggctgccactcacctccagggcccaccctgccctgctgccactcacctccagggcctgcagtaactggctgccactcacctccagggcccgccctgcccggctgccactcacctccagggcccgcagtaactgactgccactcacctccagggcccgccctgcctggctgccactcacctccagggcccaccctgcccgctgccactcacctccagggcccgtcctaacctgctgccactcacctccagggcctgccctgcctggctgcctctcacctcctgggcccaccctgcccgctgccactcacctccagggcctgcccgggcatacccagctgctattcacctccagggcctgccccgcctccaggcccccctcccccccaattgccactcacctccagggccctcccgggcatacccagctgctactcacctccagggcccgctctgcccagctgccactcaactccagggcctgccctgcctggctgctgctcattcaccgactctgtggtttcactgctcttctaatttatcaaacatttaaccgtgaaagactttcattctagacttttctgtctgtgcccagaggttctcttgatgatgattttctgaatgttttgagacgcccgtgacctggtctgtcccagagctcatgggagcccttccaggtatcttctcgagtttgtgttttgtgacacccattgtataggttcagcatccctaatcaaaacagccagaattcagctgggcgcagtggctcacacctgtgatcccagcactttgggaggctgaggtgggtggatcacctgaggccaggagctcgagaccagcctggccaacatggtgaaactctgtctctactaaaaatacaaaaattagctgggcatgatggcgcgtgcctgtaatcccagctactcgaaaggctgagacaggagaattgcttgaacccaggaggcagaggttgcagtgagctgagattgtgccattgcacgcctgggcaacagagcgagactccatctaaaaaaaaataacaaaaaatccagaatttgaaatactccaaaatctgacagtttttgagcaccggaaagacaacccggtggaaaatcctgtacctgaccttgtttgacgagtctcagaacacggtcaaaagtttcttcatgcacaaaattactccagaactcagggtgaggccctgggcagtagcaggcaacccctttggcttgcaaatgtttgtcaggtattatataaaatcaccttctggctgtgtgtgtacagtgcatatgagcataaatgcatttcgtgtttagacttgggttccatcctcaagacatctcattatggacatgtgaatattcccaaatccaaaactactggccccaggcattttggataagggaccctcactctgtactgagccagggggacacggcagctcccagaatggcccctcgagggtggcctgggtgctggctcctgcctggcaggggcgggcatgtgtgggagagatgggggcctggtggggggcttgtgcgtgccctgggaccccgtggctgccgggcgggtcatgggctggtgggagccgggctgcaggcttttccctgtggctgctgcttattctcccagcagcgcctgatctgcccgctcttcccgttcagctttcagattgcatcttctctgtctaaagagctctgtgccctggtcttcggggtcaacacgttctttgccaccatcgtcaagaccatcatcactttcattgtctcggacgtgcggggcctgggcctcccggtccgcaagcaggtgagcccatttcaggcctgcgtcctcggggatggaagctacttgtggggacattgttgaggcctcctggtgcccgcctgatgtggagcccactgtgggctgggggcacagggtgcgggcctggggcttccagtgggacacaccaggccagcgagagcaggaagtgagagagaccctagcggggctcagttgttgtgggcgggagcctccgtcaggccctgggcctcagtgggagcagctgagcctctgctcgccacggcggagctgtccttgtctccgctctctgcctgtggctgccggaacttggtgtccttgagccctggctggaggccacgtgacctttgtcctcttcaggaaggagagctgagcagagccactcagcagtgtcagtgcgcaggcctctgcgggtgccctcccctttcccacctctcgcgggcctctgctgcttctgagaagagctggaaaacacacatttaactcctgagggtcccagccaaggccgggtctccgagtgagctggaatcagccatggtgggcgtggtgtgagaggtccttccaggctcctcaggactgccccagcctgcagctagacagatgcccttggcgggtgggacaagggctttgtccacctggggcccaggtctcactgggcaggaggactgtcagggttagtcctgatcctctgagggtgcggagtctgttcagcttcagtgactccagagctcagggtaaggcccgggcaatagcaggcatccccttcggctcacaaatgcctgttaggtgaggatggctgttgctcactcatcgaaatgcattcttcagcccaagagtgtcattagggcctgtccacgctggcaggccacgtggccctgtgccacagagccctctgggtacaacacccccgacccaggtgtgaacactcagggcgggtgagtctccaaggcccaggggtgaacgcttagggtgggtgagcctccgaggcccaggtgtgaacactcagggcaggtgagcctccaaggcccaggcgtgaacactcagggtgatgagcctccaaggcccaggggtgaacgcttagggcaggtgagtctccgaggcccaggggtgaacactcagggcgggtgagcctccgaagcccaggggtgaacgttcagggcaggtgagtctccgaggcccgggggtgaacgctcaggacaggtgagcctccaaggcccaggggtgaacgctcagggtgggtgagcctctgaggcccaggtgtgaacactcagggcgggtgagcctccgaggcccaggtgtgaacactcagggcaggtgagcctccaaggcccaggcgtgaacactcagggtgatgagcctccaaggcccaggggtgaacgcttagggcaggtgagtctccgaggcccaggggtgaacactcagggcgggtgagcctccgaagcccaggggtgaacgttcagggcaggtgagtctccgaggcccgggggtgaacgctcaggacaggtgagcctccaaggcccaggggtgaacgctcagggtgggtgagcctctgaggcccaggtgtgaacactcagggcgggtgagcctccgaggcccaggtgtgaacactcagggcaggtgagcctccaaggcccaggcgtgaacactcagggtgatgagcctccaaggcccaggggtgaacgcttagggcaggtgagtctccgaggcccaggggtgaacgctcagggcgggtgagcctccgaagcccaggggtgaacgctcaggacaggtgagtctccaaggcccacgggtgaatgtgtccaggcccggcctgggtggacacagcctcctggtggccgggctggtctcaggtctgcagaaagggggcccagaaggcttctgttgaatgcatggccccagggcggggtgctggcagcagtccagctggctttggaggggctccagcacccgggaggaggtcctccccattcttggagccccgagttacctctgtccccagacagcagtggctgccagcatgtatgggcagggagtgcccgtcccagggagaccctcagggccctgtgtggccccagccaggctggaactggcttctgacctgcctctgggtgctgactgcccctgactaccgttgccgccccacctccatccctctgtgactgcctcttgttcagcccttggcagctggaggggcagatgcctgagggctctttagggactctgtgcgtgtgctcccctgtagctgccctgtggaggggacccctcacggtgggcttctaagggcccatgggggcttggtgcagggggtggagcagttcttccccagagagctggtcacgaggaagccctttcccttccttagctggtcctggtcctggtgtggccgtggaggctgtgggggagacagctctggggaggtggaggcaggttctggcctgtggttcctggctgcctcttgtcacatagaaaaaaaacacatggacttttctctggctggtttgatttctaggttaaaaagttaactagtggggcattttgctcatggctggacatcctgttgggtctagaggaggtggtgcgggctcatcttgcccccgtgcctgttactgggtgccgagtgtccactctctttcctccagcatggggagaacagctgggccaggagttcaggcttggtcgggggtagagtctggagacgggagggagccgtgatggagcatggggggacagacagggctagagcttgcctgggtttgcctgctttttaaattaagctttatatttgggtaatcttatattcacatgctgtttaataaataatacagggagatccatgtaccccgtacccagttttcacagtggtcacgtcttacagttctgtagcacatcacaaccagcatggcgacagtcaggatccagaacattctatccccacagggatccctcatgctgctctttatagccaaggcccaccctactcccagcctcacgtcctctttaacccctggcagccactaccctcttctccgcttgtatgagtttgtcatttcaggagtgttgtataaacacggctatgcattgtgtatcgtttagggattggctcttttcactcaacactgttctctgaacattcatccatgttgttactgtggctgtggctgattccttcttgctgctgagtgctgttccagggtgtaggtacagcacactttatttattcaccgttgaaagacttgtttccagtgtgaggtattaccaataaagctgctatggacattcttttataggttttt

SEQ ID NO: 1640 - protein, 302 aa, Homo sapiens
MQAAVSRHGQPGPPFSPAPAILGAPSAPVWPPSPGSPRPTLGSCRPWLVKAQRDLAWAPPLTCQHCGKGQGLCHCAVPLLQPGGQRLKGFSYKVIDAHRKKIQHGPALPGCHSPPGPTLPCCHSPPGPAVTDCHSPPGPALPGCHSPPGPAVTDCHSPPGPALPGCHSPPGPTLPCCHSPPGPAVTGCHSPPGPALPGCHSPPGPAIASSLSKELCALVFGVNTFFATIVKTIITFIVSDVRGLGLPVRKQGSLMLLFIAKAHPTPSLTSSLTPGSHYPLLRLYEFVISGVLYKHGYALCIV

SEQ ID NO: 1641 - DNA, 1697 bp, Homo sapiens
  source (1)..(1697)
  CDS (201)..(239)
  CDS (601)..(1497)
  modified_base (480)..(579): a, t, c, g, unknown or other
  modified_base (609): a, t, c, g, unknown or other
  modified_base (614): a, t, c, g, unknown or other
  modified_base (617): a, t, c, g, unknown or other
  modified_base (1181): a, t, c, g, unknown or other
  modified_base (1199): a, t, c, g, unknown or other
  modified_base (1208): a, t, c, g, unknown or other
  modified_base (1288)..(1387): a, t, c, g, unknown or other
  modified_base (1419): a, t, c, g, unknown or other
  modified_base (1421): a, t, c, g, unknown or other
  modified_base (1440): a, t, c, g, unknown or other
  modified_base (1450): a, t, c, g, unknown or other
  modified_base (1453): a, t, c, g, unknown or other
gtgctacctcccagaaataaccaccattaatatcttggtgcctaacattccagatttattgccttcctttcttccttcctccctccctccctccctccctctctcccttccttccttccttcctctctctctctctctttccttctttcattttctttttttttgacggagtctcgctctgtcacccaggctggagtgcaatggtgcgatctcagctcactgcagcctccacctcccgggttcaagcgattctcctgccttagcttcctaagtagctgagactacaggtatatgccaccgtgccctgctaatttttgtattttttgttggagacggggtttcatcatgttgcctaggctagtcttgaactcctggcctcaagtgacccgcctgcctcggcctcccagagttctgggattacaggcgtgagccaccgtgcctggcccagatatctttctatacatgtattcacacgcatannnnnnnnnnnnnnnnnnnnnnnnnnnnnnnnnnnnnnnnnnnnnnnnnnnnnnnnnnnnnnnnnnnnnnnnnnnnnnnnnnnnnnnnnnnnnnnnnnnngggtgacttgctgactcgcaggtcggactnctagnagnatcccccttcgccagcgtcaacaccattgtcgtggtgtcagtggatcgctactgggggcgcatccaccctatctcctacccgtccaagatgacccagcgccgcggttacctgctcctctatggcacctggattgtggccatcctgcagagcactcctccactctacggctggggccaggctgcctttgatgagcgcaatgctctctgctccatgatctggggggccagccccagctacactattctcagcgtggtgtccttcatcgtcattccactgattgtcatgattgcctgctactccgtggtgttctgtgcagcccggaggcagcatgctctgctgtacaatgtcaagagacacagcttggaagtgcgagtcaaggactgtgtggagaatgaggatgaagagggagcagagaagaaggaggagttccaggatgagagtgagtttcgccgccagcatgaaggtgaggtcaaggccaaggagggcagaatggaagccaaggacggcagcctgaaggccaaggaaggaagcacggggaccagtgagagtagtgtagaggccangggcagcgaggaggtcanagagagcancacggtggccagcgacggcagcatggagggtaaggaaggcagcaccaaaattgaggagaacagcatgaaggcagacaagnnnnnnnnnnnnnnnnnnnnnnnnnnnnnnnnnnnnnnnnnnnnnnnnnnnnnnnnnnnnnnnnnnnnnnnnnnnnnnnnnnnnnnnnnnnnnnnnnnnnaggttgacttgcatgcacgccgttcgactctnanagaatccccccagcttttntggccccagnagnaatgcacagttagaggaatgagacaatgggggacaatgttataaatactgatagaagttagctcaagtattatgggggtttaatccactctagagaaaatggagtaaaggaagaattctctgtgatggtggggtaaatgaaaagcttttaatgaacaggtgatagaacccagtgagagggggcctaactgggtcagccactagggggcatgtgagtacgggtctgcaactgggaaagaggctcc

SEQ ID NO: 1642 - protein, 311 aa, Homo sapiens
  MOD_RES (16): Variable amino acid
  MOD_RES (18)..(19): Variable amino acid
  MOD_RES (207): Variable amino acid
  MOD_RES (213): Variable amino acid
  MOD_RES (216): Variable amino acid
  MOD_RES (243)..(276): Variable amino acid
  MOD_RES (286)..(287): Variable amino acid
  MOD_RES (293): Variable amino acid
  MOD_RES (297)..(298): Variable amino acid
MVRSQLTAASTSRVGXLXXSPFASVNTIVVVSVDRYWGRIHPISYPSKMTQRRGYLLLYGTWIVAILQSTPPLYGWGQAAFDERNALCSMIWGASPSYTILSVVSFIVIPLIVMIACYSVVFCAARRQHALLYNVKRHSLEVRVKDCVENEDEEGAEKKEEFQDESEFRRQHEGEVKAKEGRMEAKDGSLKAKEGSTGTSESSVEAXGSEEVXESXTVASDGSMEGKEGSTKIEENSMKADKXXXXXXXXXXXXXXXXXXXXXXXXXXXXXXXXXXVDLHARRSTXXESPQLXWPQXXCTVRGMRQWGTML

SEQ ID NO: 1643 - DNA, 934 bp, Homo sapiens
  source (1)..(934)
  CDS (201)..(734)
  modified_base (477): a, t, c, g, unknown or other
  modified_base (503): a, t, c, g, unknown or other
  modified_base (542): a, t, c, g, unknown or other
  modified_base (545): a, t, c, g, unknown or other
  modified_base (549)..(550): a, t, c, g, unknown or other
  modified_base (561): a, t, c, g, unknown or other
  modified_base (567): a, t, c, g, unknown or other
  modified_base (602)..(701): a, t, c, g, unknown or other
  modified_base (736): a, t, c, g, unknown or other
agcagaggtaggaggggtgcaagggaagccaaggcctgctgaaggtgtgctaggaagagtctggagaagagcttatgtctccccgtgtactgttacatctggccacacaggagctctcagcttggaaggcaagtgtgggcgggggagttgtgtggtcagatgtgtctcataagatcccgcctctcatttgaccctcccaggtttcctggggccattactctggggatgaagaggacgcatactcggctgagccactgccggagctttgctacaaggccgatgtccaggccttcagccgggccttccaacccagtgtctccctgaccgtggctgcgctgggtctggccggcaatggcctggtcctggccacccacctggcagcccgacgcgcagcgcgctcgcccacctctgcccacctgctccagctggccctggccgacctcttgctggccctgactctgcccttcgcggcagcangggctctttcaggctggagtctgggnaagtgccacctgcccgaccatctctggcctctacttcgnctncttnncacgccgcttnctcttnctggcctgtatcagcgccgaccgctacgtggcccnnnnnnnnnnnnnnnnnnnnnnnnnnnnnnnnnnnnnnnnnnnnnnnnnnnnnnnnnnnnnnnnnnnnnnnnnnnnnnnnnnnnnnnnnnnnnnnnnnnncttactggcttgctgcctaactgtgtactctagaaagactcctgnagtgagtgctatagttttggcccacattcttactcgggggagactgatgagaaactctgattttctgtgggccaggcttctttgaattaatctctaaataactcagctgtgttctcacgtggcctcttggggagatcccacagaaccgtttgcagtactgaaaccactgttcaactctttggcaactc

SEQ ID NO: 1644 - protein, 177 aa, Homo sapiens
  MOD_RES (93): Variable amino acid
  MOD_RES (101): Variable amino acid
  MOD_RES (114)..(115): Variable amino acid
  MOD_RES (117): Variable amino acid
  MOD_RES (121): Variable amino acid
  MOD_RES (123): Variable amino acid
  MOD_RES (134)..(167): Variable amino acid
VSWGHYSGDEEDAYSAEPLPELCYKADVQAFSRAFQPSVSLTVAALGLAGNGLVLATHLAARRAARSPTSAHLLQLALADLLLALTLPFAAAXALSGWSLXKCHLPDHLWPLLXXLXTPLXLXGLYQRRPLRGXXXXXXXXXXXXXXXXXXXXXXXXXXXXXXXXXXLTGLLPNCVL

SEQ ID NO: 1645 - DNA, 949 bp, Homo sapiens
  source (1)..(949)
  CDS (201)..(749)
  modified_base (58)..(157): a, t, c, g, unknown or other
  modified_base (189): a, t, c, g, unknown or other
  modified_base (867)..(949): a, t, c, g, unknown or other
ctgagcagagaaaagaacaggatatagacttctcactgtgaccacttcaagttagatnnnnnnnnnnnnnnnnnnnnnnnnnnnnnnnnnnnnnnnnnnnnnnnnnnnnnnnnnnnnnnnnnnnnnnnnnnnnnnnnnnnnnnnnnnnnnnnnnnnngcactgcgtacgaataccccctctgtggtggnaaaaaccccccctgcggtacccatccatcattactaatcaatttgtggccaaagctagtgtcttcattgtggtgcggaatgcgcttcttactgcacccattcctatcctcacttccctgctccattactgtggggaaaatgtcattgagaactgcatctgtgccaacttgtctgtgtccaggctctcctgtgataatttcacccttaacagaatctaccaatttgtggctggttggaccttgctgggctcagatttattcctcatcttcctctcttacaccttcattctaagagctgtgcttagattcaaagcagagggggcggcagtgaaggccctgagcacatgtggctcccacttcatcctcattcttttcttcagcaccatactgctggttgtggtgttgacaaacgtggccagaaagaaggtccccatggacatcctgatcctgctgaacgtccttcatcaccttattcctcctgcattgaaccctattgtgtatggggttcggaccaaagagataaaacagggaattcagaagttactgcagagagggaggtgaatatgtaaagcatttctaatacctcctgttcttcctcttcagtgattttacctaggcagcgaagtagagaaatgtcagttagtgagtgtttattgcatgcactgaggctcccttcatnnnnnnnnnnnnnnnnnnnnnnnnnnnnnnnnnnnnnnnnnnnnnnnnnnnnnnnnnnnnnnnnnnnnnnnnnnnnnnnnnnn

SEQ ID NO: 1646 - protein, 182 aa, Homo sapiens
LRYPSIITNQFVAKASVFIVVRNALLTAPIPILTSLLHYCGENVIENCICANLSVSRLSCDNFTLNRIYQFVAGWTLLGSDLFLIFLSYTFILRAVLRFKAEGAAVKALSTCGSHFILILFFSTILLVVVLTNVARKKVPMDILILLNVLHHLIPPALNPIVYGVRTKEIKQGIQKLLQRGR

SEQ ID NO: 1647 - DNA, 2678 bp, Homo sapiens
  source (1)..(2678)
  CDS (201)..(1189)
  CDS (2061)..(2478)
  modified_base (431): a, t, c, g, unknown or other
  modified_base (463)..(562): a, t, c, g, unknown or other
  modified_base (582)..(584): a, t, c, g, unknown or other
  modified_base (590)..(594): a, t, c, g, unknown or other
  modified_base (596): a, t, c, g, unknown or other
  modified_base (601)..(602): a, t, c, g, unknown or other
  modified_base (630)..(637): a, t, c, g, unknown or other
  modified_base (653): a, t, c, g, unknown or other
  modified_base (671)..(672): a, t, c, g, unknown or other
  modified_base (899): a, t, c, g, unknown or other
  modified_base (901): a, t, c, g, unknown or other
  modified_base (903): a, t, c, g, unknown or other
  modified_base (1012): a, t, c, g, unknown or other
  modified_base (1033)..(1034): a, t, c, g, unknown or other
  modified_base (1047): a, t, c, g, unknown or other
  modified_base (1050)..(1053): a, t, c, g, unknown or other
  modified_base (1057): a, t, c, g, unknown or other
  modified_base (1070): a, t, c, g, unknown or other
  modified_base (1076): a, t, c, g, unknown or other
  modified_base (1078)..(1080): a, t, c, g, unknown or other
  modified_base (1082): a, t, c, g, unknown or other
  modified_base (1142): a, t, c, g, unknown or other
  modified_base (1144): a, t, c, g, unknown or other
  modified_base (1147): a, t, c, g, unknown or other
  modified_base (1155)..(1156): a, t, c, g, unknown or other
  modified_base (1168): a, t, c, g, unknown or other
  modified_base (1445)..(1544): a, t, c, g, unknown or other
  modified_base (2301): a, t, c, g, unknown or other
  modified_base (2340)..(2440): a, t, c, g, unknown or other
  modified_base (2623): a, t, c, g, unknown or other
ttcccgactggaaagcgggcagtgagcgcaacgcaattaatgtgagttagctcactcattaggcaccccaggctttacactttatgcttccggctcgaatgttgtgtggaattgtgagcggataacaatttcacacaggaaacagctatgaccaaaataaaaattagagctcggtacccctgctggcgcacaacctcagcatgttagccttacgtgccggagcacagcgttttcatgcccagccgctgagcgccaatgacacgctgaaaaataaactcctcgccgccttaccgttcaagccaacgggcgcacaggcacgcgtagtggcggagatcgagcgcgatatggcgctggatgtgccgatgatgcgtctggtgcagggcgatgtaggttccggtaaaacgctggtcgccgccctcgccggtttcctntacaccccagcggcgagtcagcaactcagtcnnnnnnnnnnnnnnnnnnnnnnnnnnnnnnnnnnnnnnnnnnnnnnnnnnnnnnnnnnnnnnnnnnnnnnnnnnnnnnnnnnnnnnnnnnnnnnnnnnnnttttctcttctattatccannnaaaagnnnnngncaggnnaacacccccccaaacaacacgggagagnnnnnnnnagacacacccccaganaaacccacgcagacgagnnccccgccagaaaacggaggaggggaaggaaagagccacgggcagggaccaacaccggcagggcgccagccgcgcggcaaacgcggcccgagacgcgacgccgagaaaagacggagcagcgacaaagcagggagaggagacgagagggacgcaaaggagaccagagccggacagacgccaaacacacaccgcacccgcacgcgcggcccgcccggcgcgggggcgagncngnccccgcgccccgcgccccgcgcgccgcggccggggcgccggcccgccccgcccgcccccgccggccgggcggggggcggggggggcgccgcccccccgcgcggcgcggncgcccccgccgcgcgcccccnncgcccccccggcncgnnnnccgnggcgggggggcgngggggngnnngncgccccccgcccaggggggggggcccccctggcccctccgcccaggtgcttgccaacctncnagnctattttnncttggttctttncaccaacattgtcaccccattgtgtttgacgatttcatcccagccctccatctatattgaaaggaaaagcagctctgattctttttcttttcttttcttttctttttttaaagacagggtctcactttgttgcacaggctggagtgcactggcgagatcatagctcactgccacctcgaactcctgggctcaagggatccacctgcctcagcctcccaagtggctgcaaatacaggcattgtgtatctctaagccgacgggagtcagcactagtcgnnnnnnnnnnnnnnnnnnnnnnnnnnnnnnnnnnnnnnnnnnnnnnnnnnnnnnnnnnnnnnnnnnnnnnnnnnnnnnnnnnnnnnnnnnnnnnnnnnnncgtccccaagtctgggcaattgaaggaggtatttctccccattttacagatgcagaagttcaggaatattaaatggtttaggtgcggcccttgagtaggaaggagagcaaagacacagaggctgctactggggctcctggttctgacccttccgcatcccagcgtctccacagaggtaaggagaatcaaacaggctatcacctgggaaaggaagagtggatgcaagagggaggaaagtgatcaattcctcttctcaggtattattcattccaattttctcaatttgccacaagtgccagaaaatgccgcaacatgaaaagtgacaaccatagcttcttaggggactcccctaaagccttcatccttctgggtgtgtctgacaggccgtggctggaactccctctctttgtggtcctcctgctgtcctatgtgctggccatgttggggaacgtcgccatcatcctggcatcccgggtggatcctcaactccacagccccatgtacatcttccctcagtcacctgtccttcctggacctctgctacaccaccacgacagtccctcagatgctggtcaacatgggcagttcccagaagaccatcagctatggaggctgcactgtgcaatatgcagtcttccactggctgggatgcacggagtgcatcgtcctggccgccatggccctggaccgctacgtggccatctgcaagcccctgcactatgccgttctcatgcaccgtgctctgtgtcaggggatncctctagagccgagcctggatgtcagcaacgccatgtcnnnnnnnnnnnnnnnnnnnnnnnnnnnnnnnnnnnnnnnnnnnnnnnnnnnnnnnnnnnnnnnnnnnnnnnnnnnnnnnnnnnnnnnnnnnnnnnnnnnnnttttatttattgttggtgccaggcaacccatcggctgaaggaaaaaggcagtgatttcttttcccaagacccacgctaaaattgaggactttaaggctattttgcaaaggaagaacccaaaatttagagaatgtaagtaacttgtctcaaagttaacatataggacaaagaagactttaatanaatctataaagcagaaataacacagaccacacagatactggtaacaaataaaatt

SEQ ID NO: 1648 - protein, 468 aa, Homo sapiens
  MOD_RES (77): Variable amino acid
  MOD_RES (88)..(121): Variable amino acid
  MOD_RES (128): Variable amino acid
  MOD_RES (130)..(132): Variable amino acid
  MOD_RES (134): Variable amino acid
  MOD_RES (144)..(146): Variable amino acid
  MOD_RES (151): Variable amino acid
  MOD_RES (157)..(158): Variable amino acid
  MOD_RES (233)..(235): Variable amino acid
  MOD_RES (271): Variable amino acid
  MOD_RES (278): Variable amino acid
  MOD_RES (283)..(286): Variable amino acid
  MOD_RES (290): Variable amino acid
  MOD_RES (292)..(294): Variable amino acid
  MOD_RES (314)..(316): Variable amino acid
  MOD_RES (319): Variable amino acid
  MOD_RES (323): Variable amino acid
  MOD_RES (410): Variable amino acid
  MOD_RES (423)..(457): Variable amino acid
MLALRAGAQRFHAQPLSANDTLKNKLLAALPFKPTGAQARVVAEIERDMALDVPMMRLVQGDVGSGKTLVAALAGFXYTPAASQQLSXXXXXXXXXXXXXXXXXXXXXXXXXXXXXXXXXXFLFYYPXKXXXQXNTPPNNTGEXXXDTPPXKPTQTXXPPENGGGEGKSHGQGPTPAGRQPRGKRGPRRDAEKRRSSDKAGRGDERDAKETRAGQTPNTHRTRTRGPPGAGAXXXPRPAPRAPRPGRRPAPPAPAGRAGGGGGAAPPRGAXAPAARPXRPPGXXXXAGGXGXXXRPPPRGGGPPGPSAQVLANXXXYFXLVLXTNIVTPFHLSFLDLCYTTTTVPQMLVNMGSSQKTISYGGCTVQYAVFHWLGCTECIVLAAMALDRYVAICKPLHYAVLMHRALCQGXPLEPSLDVSNAMXXXXXXXXXXXXXXXXXXXXXXXXXXXXXXXXXXXLFIVGARQPIG

SEQ ID NO: 1649 - DNA, 1771 bp, Homo sapiens
  source (1)..(1771)
  CDS (201)..(283)
  CDS (689)..(1118)
  CDS (1278)..(1571)
  modified_base (1)..(9): a, t, c, g, unknown or other
  modified_base (22): a, t, c, g, unknown or other
  modified_base (58): a, t, c, g, unknown or other
  modified_base (100): a, t, c, g, unknown or other
  modified_base (741): a, t, c, g, unknown or other
  modified_base (744): a, t, c, g, unknown or other
  modified_base (746): a, t, c, g, unknown or other
  modified_base (749): a, t, c, g, unknown or other
  modified_base (752): a, t, c, g, unknown or other
  modified_base (771): a, t, c, g, unknown or other
  modified_base (784)..(883): a, t, c, g, unknown or other
  modified_base (1550): a, t, c, g, unknown or other
  modified_base (1557): a, t, c, g, unknown or other
  modified_base (1597)..(1696): a, t, c, g, unknown or other
nnnnnnnnncagggttactcanagtcaggcttggacccagcaagagttggatccagangatgcatgatgttttagcagcaatgatattcatgaagctttntgcttcactccttgttatggtttgagatcccacagcagaccctgagacaaagacctggaggcaggtggttaacttgggaggtggggtcaggggaagggagatggggaagggagaggagacagggcaggtgcttcccgagactggtgctctgttgggagctggagcacagtctcgaaaggacaggtgtgaaacgtccaagagctgacctgccagcagctgcctcctgcccctcaccacagagggtggctgaagcttttatgccctggctctcccagctgccctgcacgggctgctgctcaggctaaggaccgagaagtgctgatgcttgagggactcatggtcagtgaggacaggctgtgagctgagctctgagctcggggcgaaccaaagatgggagaggagcatcagtgccccccgccccatcaccacattagaatcctgcgggaactggctgggttctcgaaggcgttgttatcgccctgtgctcacacataaggaccctgagacccagggccactagggtgaggcgacagggcagggcctgatgcacctgtcgaaatccacttctagctcccaccctgcccccagagacatgcgccccagggccggcacacagcaagggactcggggcgagggggttnctntnagnacnagggacgggggttctgcancagcaagtagttnnnnnnnnnnnnnnnnnnnnnnnnnnnnnnnnnnnnnnnnnnnnnnnnnnnnnnnnnnnnnnnnnnnnnnnnnnnnnnnnnnnnnnnnnnnnnnnnnnnncaatgggggctgccaccaggactgctttgaagggggggatggctccttcctctgcggctgccgaccaggattccggatgctggatgacctggtgacctgtgcctctcgaaaccattgcagatccagcccatgtcgtgggggggccacgtgcgtcctgggaccccatgggaaaaactacacgtgccgctgcccccaagggtaccagctggactcgagtcagctggactgtgtggacgtggatgaatgccaggactccccctgtgcccaggagtgtgtcaacacccctgggggcttccgctgagaatgctgggttggctatgagccgggcggtcctggagagggggcctgtcaggatgtggatgagtgtgctctgggtcgctcgccttgcgcccagggctgcaccaacacagatggctcatttcactgctcctgtgaggagggctacgtcctggccggggaggacgggactcagtgccagaacgtggatgagtgtgtgggcccggggggccccctctgcgacagcttgtgcttcaacacacaagggtccttccactgtggctgcctgccaggctgggtgctggccccaaatggggtctcttgcaccatggggcctggtctctgggaccaccatctgggccccccgagaggaggacaaagggtttctttnagagtcngcagcgcggtttagtcaagtctagtcccttttccataacnnnnnnnnnnnnnnnnnnnnnnnnnnnnnnnnnnnnnnnnnnnnnnnnnnnnnnnnnnnnnnnnnnnnnnnnnnnnnnnnnnnnnnnnnnnnnnnnnnnnggttaggtcatcaaagctgggaagtgttcttgcaggggagctgccttgtgcccactgggagatggcaagccctga

SEQ ID NO: 1650 - protein, 268 aa, Homo sapiens
  MOD_RES (46)..(49): Variable amino acid
  MOD_RES (56): Variable amino acid
  MOD_RES (60)..(93): Variable amino acid
  MOD_RES (262): Variable amino acid
  MOD_RES (265): Variable amino acid
MGKGEETGQVLPETGALLGAGAQSRKDRDMRPRAGTQQGTRGEGVXXXXRDGGSAXASSXXXXXXXXXXXXXXXXXXXXXXXXXXXXXXXXXXNGGCHQDCFEGGDGSFLCGCRPGFRMLDDLVTCASRNHCRSSPCRGGATCVLGPHGKNYTCRCPQGYQLDSSQLDCVDGCTNTDGSFHCSCEEGYVLAGEDGTQCQNVDECVGPGGPLCDSLCFNTQGSFHCGCLPGWVLAPNGVSCTMGPGLWDHHLGPPRGGQRVSXRVXSAV

SEQ ID NO: 1651 - DNA, 964 bp, Homo sapiens
  source (1)..(964)
  CDS (201)..(764)
aattctcccgcctcagcctccctagaagctgggattacaggggcatgccaccacacccatctaatttttgtattcttagtagagatggggtttcaccatgttgaccaggctggtcttgaactcctgacctcaggtgatccacccgcctctgcctcccaaaatgctgggattacaggcatgagctaccgtgcccagcctccatgtacttcttcctgacaaactttgcaggtctggagatcttctactttttcaccattgcccctctgactctggccaatgtcctacccatggggagaaacctcatttccctgcccggctgtggaggccagatgttcttcttcatcttcctgggaagggctgactgcatcctgccggccatcatggcctttgactggtttgtggccatctgttgtcctctctgttacggcctcatcatgagctggaggttgtgtgtccagctgaccctggggtctctgctgttggggttcttcttagccatgcagctgaccgtgcttatcttccaactccctttatgcagcagcaaagaaatcagcacgttctactgtgatgtcctccctgtcatgagactggcctgtgcagatacctgggtccatgaggccactatgtctatggtcagcaccacctttctcaccgtccccttcctgctcatcactctttcctatgtctccatcatggccgccatcttgaagatttgctgtgcagaggggaggcacaaggccttctccacctttcctcccacctgactgtggttctcctccaggactgatgtacacgcctcgccttcttgtgtcccagctctagctactatcctgagaggggccaggcagtgtctgtggtttacaccttcattacccctgtgctgaaccctttgatctacagcatgaggaacacagaacttaaggatgctttgaagagagcaatgacgagggtcccgctgctctaa

SEQ ID NO: 1652 - protein, 187 aa, Homo sapiens
MYFFLTNFAGLEIFYFFTIAPLTLANVLPMGRNLISLPGCGGQMFFFIFLGRADCILPAIMAFDWFVAICCPLCYGLIMSWRLCVQLTLGSLLLGFFLAMQLTVLIFQLPLCSSKEISTFYCDVLPVMRLACADTWVHEATMSMVSTTFLTVPFLLITLSYVSIMAAILKICCAEGRHKAFSTFPPT

SEQ ID NO: 1653 - DNA, 26393 bp, Homo sapiens
  source (1)..(26393)
  CDS (201)..(230)
  CDS (20107)..(20364)
  CDS (25843)..(26193)
  modified_base (7759): a, t, c, g, unknown or other
  modified_base (13567)..(13666): a, t, c, g, unknown or other
  modified_base (17422): a, t, c, g, unknown or other
aagaatctggtaaattgggacgaggtaaaaaatgatggaaggaaggaaagaagaaacaaaggggagaaaggaaggaaggaggaagacaacactggtgaattgggacagagaccatgaggtctggcagtcaagcataggcacatgagctaggtttaaagtgctgaattaggttgaagttaattaattaatctatttattggatgaccggaggtctcgctctgtacacccaggttagcagggcgagcatctcggctcactgcaagctccacctcccggcttcacgccattctcctgcctcagcctcccaagtagctgggactacaggtgcctgccaccacgcccggctattttttttttttttttttttatatttttggtatttttagtagagacggggtttcaccgtgttagccaggctggtctcgaattcctgacctcaggtgatccgcccgcttcggcctcccaaagtgctgggattacaggcctgggccactgcgcttggcccagaattagaatttaaccagtagtttttgtagatgctacaccccgcgaggaagacacaagtgccccctgctggccaatccttttagtttatcttctgtatgtatcagatttagttattatttacgtagctaaaagaatctcgggtctattggttacttggttacctaatacttgacctatttggaaatagaaaaggatgtttcctgtttgtttagaggcattccaaaggttctacagacagtgatatttcactacctagtcatagccttgtccatgtcaagtagttcgggtgctttcttaccttgggtcctcacacattcttagttcttagctgaatcttctatttttgaaacagggtcttgctctgtcacccaggctggagggcagaggtgtgatcgtagctcactgcagccccgatctcttgggctcaagcaatcctcccgcctcggcctcctgagtagctgggactacaggcatgcaccaccatgcctggctaattttttctttttttaattgtagagatgcagtcttgtcatgttgcctaaagtgatctccaactcctgggctcaagcaatcctccctcctcagcttcccaaagtgttgggattacgggtgtcagccaccacgccagacctcagctaaatcttttctatctttgaaaatgctacagtacccgatgtttcctagaatttagatggcaagctgtgtcatagggacatctcgtgcaggaggggaaaagggtgaaggcatgacgcattgctgaacaagactagtagtaatacttagttggcggggggggcgggtcttgaaatttatggccgggcgtggtggcccacacctgtaatcccagcactttggggggccgaggtgggtggatcacctgaggtcaggagttcaagaccagcctgaccaacatggagaaaccccatctctactaaaaatacaaaattagccggatgtggtggcacatgcctgtaatcccagctactctggaggctgaggcaggagaatcgcttgaacccgggaggtggagtttgcggtgagccgagatcaagccattgcactccagcctgggcaacaagagtgaaactccgtctcaaaaaaataaataaataaaaattaaaaaataaatttggaaagccattcccaagggcatgtagccctagatgattttccagggagtctgaaaagcaatacttacgaagacagttagtcaatttgtaaccttagcattgactaggaacaagtagagcttgaaagggcagctgaggctgggcgcggtggctcaagcctataatcccagcactttgggaggccgaggcgggcggatcacgaggtcaggagatcgagaccacggtgaaaccccgtcttcactacaaatacaaaaaattagctgggcgcggtggcgggcgcctgtagtcccagctgctcaggaggctgaggcaggagaatggcgtgaactctggaggcagagcttgcagtgagccaagactgcgccactgcactccagcctgggcgacagagcgagactcagtcagtctccaaaaaaaaaaaagaaaagaaaagaaagaaaagaaaagaaaagggcagctgaacccctggagaggcagagaatggggcacttctgtcaatcagcaccacagtggtagatgtctctgccccagttcctgtgggtaggtgggctgtgtgtgtatggagtcaggattgtgtctctctagttcgaggaactgaatgggagataggaaggactatgctccccatgaccactccaccagacaccagcacccaataatcctgctttcttgtctctatgaatgtgatgactctaggaacgctaacaataaagtgggattaatacgagaaatgtgttccttttggttgaactgcctttattttcacgttaggaaaacgtgtcatcaggttcacccacattgtagcatgtgtcacaatgtccttcctttttaaggctgaataatattccattgtgggggccaggagtggtggctcacgcctgtaatcccagcactttgggaagccaaggcaggcggatcacttgaggtcagcagttcgataccagcctggccaacatggtgaaagcccgtctctcctaaaaatacaaaaattaggctgggcacggtggctcacgcctgtaatcccagcattttgggaggccaatgccggcggatcacctgaggtcaggagttcaagaccagcctggccaacatggtgaaactctgtctctataaaaatacaaaaaataagccgagcatggtggcaggcacctgtaaccccagctactcagaaggctgagacaggagaattgcttgaacccaggaggtggagattgcagtgagccaagatctcgccattgcaccctagcctgggcaacagagcgagactctgtctcaaaaaagaaaaaaatacatatatatgttatatatatatatgcaaaactagctgggcgtggtggtgccctataatcccagctactcaggaggctaagatgggaggattgcttgaagccaggaggcggaggttgcagtgaactgagatcacgccattgtactccagcctgggcgacagagtgagactccatctcaaaaaaaaaaaaaaagaaagaaaaaaaaattccattgtggggatggaatatatttttttaatccattaatctgccaaaggacatttggatggtttctacatttggggcattgtaaataatgctgctatgagcaccggtgtataaatacctgcttgagtctctgttctgctttcaattcttttcaatatatacccagaagtggtgttgctggattatctggtaattctatttctaattttttttttaggaagcatcatactcttttccacagttggggcaccatttagactcccacccgcggtgcacaagtgttctaatttctgcacatcctcagcctcatttgttataatatttttatgttttcctgtgttgttttgtttgtttttgtagcagccacctaaacggatgtgaagcttacagtgctcacatggtgaataatctctccctccttcagcagtcacacttaactaattaatgtaagttgcatcctcataggatgcacattaaaacaattccagctttcaccaggggttaggaagaggggcttgcttgtgtcactggcacccaccctcctatttctgacaaccaaaaatgtctccagatatgacaaatgtctcctgggagacaaaaatcacattcagttgataaccactgtttggaggcagcatgtaatttaattcagattttacagttactcggtcacatagggcgtttattcccaagacactggaggttcagagaggtttccttatttgtccagaaagtagcagaggtgggatttgaacccaagctgtccaatatcagtgtctcctctgttaactgctctgttgtgctgcttataaagtcatcatcccaatacaaggtcgggcgcagcggttcacgcctgtaatcccagcactttgggaggccaaggcaggcagagtcagaagttcaagaccaccctggacaacatggtgaaaccctgtcgctactaaaaatacaaaaattaacctagtgcggtagtgcacgcctgtaatcccagctgctcaagaggctgaggcaggagaatcgcttgagcccgggaggcggaagttgcaagagagtcgagatcgcaccactgcactgcagcctgggcgacagagcaagattctgtctcaacaaataaagggaacagaactagactcctaggaaagggaggacctaacacccagaggcaaggagcaggaggcagcaggaagaacctcagcagggctcctgccttgaaccccttctgcctgcctgggctggttccctccaaggagacacctggggaatcatctcccagcaatgggaaacctgcctgtttatgtgacagggttggtggccacactcacagcagccccatcaacgccatctgcctctaggacactgtggatatggagagagaaggtgagcgggtagatgagagggtcagggggaggatgaggaccgggctgtctctcctgcctgctcctgaggaagccagtgtttgttcattttttttttcccctcttttgagacagttttgctctgctgcccaggctgcagtgcagtggttcaatcatggctcactacagcctccaacttctaggctcaagcaatctgtccgcctcagcctccctagtagctggaagtataggtgcatgccaccatacccacctaatatatatatatatatgtgtgtgtgtatatatatatgtgtgtgtgtgtgtgtgtgtatatatatatatttttttatggagatgggatttcaccatggtacccagactaatttcaaattcctgggatcaagtgatcctcatccctcagcttcccaaagtgctgggattacaggtgtgagccactgtgcttggcctgttttttgttttttgtttttgagacagggtctttctctgtcaaccaggctgtaatgcaatggtgcaatcatagttcactgcactctccaacttctgggctcaaccaatcctcctgactcagcctcctgagtagctgggactacaggcactcaccgccatgccagcctgccaatatttgtgagtaaggcagaagacacagagtttacttacacagtcctcagattcaaatcacctttctctttttttggggtggtggggagacggagtctcactctgtcacccaagctggagtgcagtgatgcgatcttggctcactgcaacctccacctcctgggttcaaacgattctcctgcctcagcctcctgagtagctgggattacaggctggcaccactacatctggctagtttttgtatttttagtagagaacatggggtttcaccatgttggccaggctgttcttgaactcctgacctcaagtgatccacccgccttggcctaccaaagtgctgggattacaaggtgtgagccactgtgcccagcccaaatcatctcttgaagactcattttctttccttcctaaaatcaagccaattgcaatcttcccagagcaggaaacaaaatgcacagtgggaggaaaatgaaagaagtggactcagtgggactcaagtcccaattactcactgtgtgatctggggcaagtcacttaacctctctgagccttgtctcctcatatgcccaacggggataacagcagagggctgttgagatgatgcagtgatgtgatccaccatgcagggtgaaggaattaggacttaataaactcctgttactgtttttttttggggcggtggggcggttttttgttgtcattttgtttttttatttttgttttttgtttgtttgttttgagacggagtcttgcactgtcgccaagctggagtgcaatggcgtgatctcggctcactgcaacctctgcctcctgggttcaagcaattctcctgcctcagcctcccaagcagctgggactacaggtgtgcgccactacgcctggctaatttttgtattttgagtagagatggggtttcactgtgttagccagaatggtcttgatctcttgacctcgtgatccgcctgcctcagcctcccaaagtgctgggattacaggcgtgagccaccgcccagcctgttactggtttttattatttattattatttaattattattattattattatttattttattattacctacccacggagctgatgagtgacgccggggaggaagggtcgtgggtcaactgcctggtggctccaagtgttccttggtctgtggtttgggcaaagaccactgcgtcgaaaggcagccctgtggaggaagaaccaagttggttatcccagcaggaagtagaacgaaaaacataaaaaaaaaatttcttctggacttgctcttctttccataggaatctctgcatagtgactcgttcatttaccatttcatttatttaatatttattccagaccctcagtcactcattcatccaaccagcaaatatgtcttgagcaccttttatacgacagctgattctgaaaccaacccgatagtctcatagacagtatttatatacctatttaaatacttgaaactgacatttgttattgtttaactattttaggtttggggctacgtgtgaaggtttgttatataggtaatctcatgtcacggggtttgttgtacaaatgattttatcacccaggtatgaagcctagtacccaatagttattttttctgctcctctctctcctcctaacgcttaccatgaagtagaccccagtgttttttattcccttctttgtgttcatgagttatcatcatttagctcccacttctaagtgagaacatgcaatatttggttttctgttcctgggttagtttgctaaggataatggcctccagccccatccatgttcccgcaaaagcaatgatcttgttcttttttatggctgcatagtattccatggtgtatatgtatcacatttgctttatccaatctgtcattgatgggcgtttaggttgattccattgtctttgctattgggaatagtgctgcaatgaacattcacgtgtatatgtctttatggtagaatgatttatatttctctgggtatatacccaataatgagattgctgggtcaaatggtagttctacttttagctctttgaggaattgccacactgctttccacaatagttgaactaatttacactcccaccaacagtgtataaatgttcaattttctccacaaccttgccagcatctgttattttttgactttttaataatagccattctgactatggtgagatgctatctcattgtggttttgatttgcatttctttaatgatcagtgatagtgagcatttttttcatatgcttcttggctacatgtatctcttctttcaaaaagtgtctgttttttttgtttttggttttttttttttgatacagtgtctcactctgtcgaccaggctggagtgcagtagtgatcgcgcctcacagcaacctccgcctcccaggttcaagtgattctcctgcctcagcctcctgagtagctgggattacaggcgtgcaccaccgtgcccggctaattttgtatttttagtagagacagggtttcaccatgttggtcaggctggtctcgaactcctgacatagtgatctgccgcttggcctcccaaagtgctgggatgcagttgtgagccaccgtgcccggctttgccactttttaatggtgtgtngtttctctgtaaatttacttaagttctctatagatgctggatattagactttgtcaggtgcatagtttacaaatatttctcccattccggggaaacttacattgttttatctgagttccttcctcattaaaggacccccagtcctctcaaaaagtatcaaagaaaagaaactcagcagatcatcatatccagacaagagatgtcagacccctcattcctcatgatgcttcctgacccctctgatttccgttttactacacgtagtcacatttcttccctgctatataaacctgtaattttagtggtcagggagatggatttaagactgagctcccattttctcactgcagccaaggagattaaagtcttcttccttggtaataatcgtgtctcagtgatgactttctgtgtggtgagcagcaggacctagcctggacccctgggtttggcaacaattccaagttggggcacagagtgaggaacaagacaagtctttactccctcaaaaagtttatgtccagaacagaaaaccaaatactgcatgttctcactcataagtgggagttgaacaatgagaacacatggacacaggtaggggaacatcacacactggggcctgtgggggtggggggctataggggaggtataacattaggagaaatacctaatgtagatgatgggttgatgggtgcagcaaaccaccatggcacatgtatacgtatgtttgttaacctgcacgttctgcacatgtaccccagaacttaaagtataaaaaaaaaagtttacatcctagtggagaaagcagacaacgattcatccaacagataaataattaatgtccttgcagagagtgaagggaattttgaagtcactctaccaatgggagagaagcataattttccatagagtcatcagggaagacttctcataggaggtaatatttaaggagggccctgagagatgagaaggtacttatcacaggggaaatgtgcttgtgatggagggaactatatatgcaaagccccagaggctggaataaacctgacccactcgagaaatttcaagaaggccagggtggccagagtgcattgagaaagcactggagtgctttctggctggagtgtaaggcgaaaccagctgggtaagcagaggtcagatctaatgaggagaaagaggaggaagggttgtaaaccagtgatgtatgaagtttagattttcttggaagtgcaatggaaagtcacggaggatttgaagcaacgggtgagggttgtgaccaggttagcattattaagagataattctgccagaaagcaaggaagtgctcaagactaaggagatgatgttacaggacaagaagaggctataaagtcctcagattggccaggcccgtggctgatgcctgtaatcccagcattttgggaggctaaggtgggtggatcacgtgaggtcaggagttccagaccagcctggccaacatggtgaaaccccatctctactaaaaatacacaaattagctggtaatcccagctactcaggatgcctgaggcaggagaatcacttgaacctgggagtcggaggctccagtgagccgagatcatgccactacactccagcctgggtgagagagccaggctccatctcaaaaatggatgaataaataagcaaataaagtcctcaagatcagaggctatgacttcaaactatactacaaggctatagtaaccaaaacagcatggtactggtacaaaaatagacatatagaccaatagaacacaatagagagcccagaaataatgccacatacctacaaccatctgatcttcaacaaaactgacaaaaacaagcaatggggaaaggactccctattcaataagtggtgctgagataactgggctacccatatgtagaagagagaaaaaaaaaaacaaaaaaggaaaaagaccatgggatgtaaaaatgtgaatgactgaaattttggggaaacttttattggatgtgtattttcatacctacagccctcaccaagaaaatacacacaaacacacacacacacggtcctactgaatggcactaaattatccacatactcctgatagattatttcactccctacaaacttctgagatggaagaagccagcttcctagggctccagggaggagaggaatttatgataagatagagcaatcccagtttcttagactaactagccaaaccccgtcaacctaaatagcaaacagagacagactctctaaaggaaaatatgttcatttgggaatagaacattgcagtgggaatatgcatgccactgtaatatacgtgcctattcaggaagacaaagctttttagaggaaaaattgaggagaattgcataatagttttgaaatatttgtccttggctacaaagatcgataacaaggataacaccttttctgtagagacagcgtcttggaaggctgggcacggtggctcatgccttaatcccagcactttgggaggctgaggcgggcagatcacaaggtcagagtttgagaccagcctggccaatatggtgaaacactgtctctactgaaaacacaaaaattagccaggcatggtggcgggagcctgtagtcccagctattcaggaggctgaggcaggagaaccacttgaacccgggaggtggaggttacagtgagctgagatcatgccactgtactccagcctgggtgacagagcaagactccatttcaaaaaaaaaaaaaagagagagagagcaggctgggtgcggtggctcaggcctgtaatcccagcactttgggaggctgaggcggatggatcacgagatcaggagttcaagaccagcctggccaacatggggaaaccccatctctactaaaaatacaaaaaattagccgggtgtggtggtgcgtgtctgtaatcccagctactcgggaggctgaggcaggagaatggcggtgaacccaggaggcggaggttgctgtgagcggagatcacgccattgcactccagttccagactgggcaacagagcaagactccatctcaaggaaaaaaaaaaagacagacagcgtcttgggttcaagggatcctcctgcctcagcctcccacactgctgggattacaggtgtgagccaccgtgcccggcctgcaggagtattttttgcgtaaggttgaggtggcctttgtgcaaggttgtggcttttggaatcttttgtgatagttgttatcaggcataccagcatgagaaccctcctttcatggccctccgtgactctatttgcccccttcattcatgcaacacatatttattgcacaactactatgtgccaggtactgcaacaggctgcatttggcaatgtctgaagacatttttggttggtgggagtgctgctgccatcccgttgtagggaacctgggatactgtttagcacttgaccaatatatgggacagcccaccctacctccccaaaggattatgagacccaaatccattgacatttgtgctgggattgagaaacctcgcttcagtgggattggtccaggttgtagcatacagggttgttgccatggagacaggcagataacgaacctgttcagtgggttgagagcagcatcccaaataaataaataaataagagaatataatagaattaaaaggcatcaggggctgggcacggtggctcacgcctgtaatcccaacagtttgggacgctgaggtgggtggattacctgaggtcaggagtttaagaccagcctggccacatggtgaaaccccatttctactaaaaatacaaaaaattagccaggcatggtggtgggcaccggtaatcccagctactcgggaggctgaggcaggagaattgcttgaacccaggaggcagaggttacagtgagccgagatcgcgccattgcgctccagcctgggcaacaagagtgaaacatcttctcaaaaaaaaaaaaaaagaaaagaaaaaagaaaaaagtattttcatcatgcatctataagcaaaactggtcacaatggtaggaagtggtactggtacactggtacacaatacattgcacactggtacacaatgtgcaatgtatttcttaccatggatcccagtctaaaaagactattagactttttagctaatagctaataattaatgttagctcctgcatcagctcatcgtctgataggcagcacctgccttcctccctacctcatctctttgcctcgttctctcaatactgggagtcactgagaaagaggatgtctcagatcacaggggagctgggtcagaatcactagggtcttacagacccagtctgcccagggtcaaagcccagccctaccacatagcagctatgtgcccttggacaggttgcataactaactgcgccttggtttccttttctgcaaaatggaaatgataataggacgtacctcctattgtcctccaagttgttatgaggatttaatgaattcatatctgtaaagagcttaaaagagtgcctggtacatgttagtgttccctgttagctattatcattatcatgacttgctctagaatagcacttaccccagagtgtaattctttttattattaggggaagggggcaatgtgggttcagagtcactgagagggggtggatcagagccaggataaggatgagaagcccggctcagattcactgtgtgttggggacagggttggcagagctgcaagtgctaggacaagtgcaccaaacaggtctgacaagggttaaatgaagcagatgggattgttcagggtgggatgaaaggtccagggagggtggggacaatcaggcaggctgcctccctgcaccgcagtgtttgtttccttgacaggtgggaggcccagctccactcaggtatgtggccagaccagccagggcagccccctggacctctcatcccaggcagagatgaggagagggacagggtggggccctccagcccaggatggccccggcccacctcctctctcccacccaggaagggctgagccactttggacaatgggctgagtccctggccccattcagccccactggcctggcctgtccccacagggactgctggaggtccttggggggatgttggcaccaactgctcctttgtcttgctacttaccctagaaagaacaagctaagggctctcctccccaatctgaggaaagcaggatattttgccacgagcggcaaaggaggacccctgctgccccagaggaagaggagggaaaacatatttacccacacatgcacacacacaaacactcatgcacacatctctcacacttatgcacacacaaaaactcatttgcatgcatgcacacgacacgtcttacacacggacacacatgcacgaatacaaacactcagtgcacacaccttaaacttatgtacatacatcacacagtctcacacatgtgcagactcagtcactcatgcacacgctaatacacacacaaatgcacatacatatgtatgcaaaatacatatgcacacacacacagctacacactcacatgtaagcattcaaacacacccacacatggacacacatgctgaaaaacaagcacaccctcattcatgcacacccacaaacctatgcacacatgcatacacacatgcacacacatattcacactcgcacacatattcacacatgcttatgcacacacgctcagtcacacactgtgcacaactcaaaaatcatcgacacacttgtagacacataggtggatgcaacaaagtatgagcaagcactaattgaaaatcacacatgaccgtgagnnnnnnnnnnnnnnnnnnnnnnnnnnnnnnnnnnnnnnnnnnnnnnnnnnnnnnnnnnnnnnnnnnnnnnnnnnnnnnnnnnnnnnnnnnnnnnnnnnnnggagatgaactccaggcagcatttatcagattatgaggagcttggattaatagagaatcacaccccacacacagcacccctgaggattgtaagagcactccgaaaactgttgaggcagccagggatttttggaaaatgtgttggctttaggcagggcacagtggctcacacctgtaatcccagcactttgggaggctgagacaggcggattgcctgaggtcaggagttcgagaccagcctggccgacatggtgaaaccccgtctctactaaaaatacaaaaaattatccgggcttagtggtgggcccctgtaatcctggctacttgggaggctgaggcaggagaatcgcttgaacccaggaggcggaggttgcagtgagctgagattgtgccattgcactccagccggggtgacaagagcgaaactctgtctcaaaaaaaaaaaaaaaaatgtggtagaaatacacaatggaaaactattcagccataaaaatgaaggagatcttgtcatttacagcaacatggaaagaactggagcatattataaatgaaataagccaggaacagaaagttaaacactgcatgttctcactcacatgtgaaagctaaaagaaaaaaaatgatttcatagaagtaaaaagaacagaggatactagagtctgggaagggtagagggagggggcagataggaagagatttgttacagcatacagaactacaggcaaattggaagaataagttctagtgttctatatccctgtaggatgaatacagttaacaataatatgctatatagctaaacagctagaaggaggatattgagtgttcccaacacagagaaatgataaatgtttgtgataatagatgtgctaattacccagatctgatcactatacattacatatatggaaacattactatgtacctcataaatatatacaattaaaacattttaaaaggagtcagagtattttttttttttgagacagagtttcgctcttgttgctcaggcaggagtgcaatggtgcaatctcagctcactgcaacctctgcctcccggatataaatggttctccggcctcagcctcccgagtagctgggattacaggcacccaccaccacacctggctaatttttttgtatgtttactagagatgggggtttcaccatgctggccaggctggtcttgaactcctgaccacaggtgatccgcccgcctcggccttccaaagtgctgggattacaggtgtgagccaccgtgcctggccgagtcagagtatttttctatctcaaggaagccagtgaatgctctgtgattaaattactaatggaatcaaggaactgatctcagacatcctcctgccctgacacctaagctttcactgaattactctgtcactcctcattcttctacagctcttgggaaaaatttaagtatcaggaacccgaagattcatcccttaagcttcttgatgagcctctctctaaggaagcaccagtcctatcctatctggacctctgcactctgtgtctaagatctctcagcctggaatacttgggaatctccaagggcttccaagacccaacatggggaataacacaaacttctgcctacagaagtactgaggaggaagccatctgttccttcaggcactcaagtgggcttggaaaagaaagtccaggctgggcgcagtggctcatgcttgtaataccagaacttgggaggctgaggcgggtggatcacctgaggtcaagagttggagaccagcgtggccattatggtgaaaccccagctccactaaaaatacaaaaattagctgggtgtggtggcgggcatctgtaattccagctacttgggaggctgaggcaggagaatctcttgaacctgagagatggaggttgcagtgagccaagatcatgccactgcactccagcctgggtgacagagtaagactccatttcaaaaaaaaagtctagttacgaagaaaaacagtgctacaaataatcatggtttttaggtaaaggactggtagcatcacaactaaaccaggctgagctagtttggtaagaagagccattggattctgggctgacaagtgggtgctgattgaccagacagaatcttccagtgtcggccgagcacagtgaattccagtactttcggaggctgaggcgggtgatcacctgaggtcaggtgttcgagatcagcctgaccaacatggtgaaaccttgtctctactaaaaatacaaaattcacaaggcatggtggtgtatgcctgtaatcccagctactcgggaggccgaggtaggagaattgctcgaacctgggagtcagaggttgcagtgagccaagatcgtgccattgcactccagcctgggcaacaagagcaaaactccatctcggtgggggaaaaatgttcaaaaaatcagctgggtgtggtggcacatgcctgtagttccagctactctagaggctgaggcaggaggattgcttaagcccaggaggtagaagctgcagtgagctgtgattgtgccactgcactccagcctgaataacagagcaaggttctgtctctaaaataaataaatcagtaaatcaataaataataaaaaagaatcttccagtgtatctgagatcattgagcttggcttcattaattttaccaacattcgttcagtctctctctctctctctcagctcactcactgggctatctttcctcttcttgacaccatcacccaggcatgagttaaactggctcagtgtcctcccagcaggtactagatgatgaagttagatgtttgggccagcagatgctacatagaaatactgggaagttgtcctcctggtccaaagaagaaaagctagggtgggggataagttgtaggaaccgagggaatatttacaatttctgggccataagaagtcaattccccaagctccttgttacacaaattgtccaatttcatctctagtccctgaatagttctgtttcctatgggggctgggatgtggcagtaagaagcattttatgtcttcatgaggcaacttaggggtaagttgcatgattcctaactttctctgcaccctctcttccaggaacaaactctccctgtcttctaaactcagtctttccaatgcccagggcttcttatatcagaaggttccattcttattggaagccaatgttcctcatcacttaaagaattaagaaatggccgggtgtgatggctcacgcctgtaatcccagcactttgggaggctgaggcgggtggatcatgaggtcaagagattgagacaatcctggccaacatggtgaaacactgtctctactaaaaatacaaaaattagttggcatggtggtgcacacctgtagtcccagctactcaggaggctgaggcagaagaatcgcttgaacccaggaggcagaggttgtggtgagccgagattgcaccattgtactccagcctgggcaacaagagcgaaactccatctcaaaaaaaaaaaaaaaaaagaaaagaactaagaaacactccaaacattttcccacgtccacccagtgatctgtcaccaagacccagggctgcctgctttcatcactcaacctcaacagaacactctctataaagggatcatggctttcattcagttctgcaaaggagaaactagagcctaccctaatggatgtacatggagagagtggttggctgactaagtctgcagccagattctcactgagtattgggaccatggtgncattactgggaattttcaggaatttggttttataaggtcatgcccagattgttgggttgtgtctactcagtaaacactcatgaaactgatggatacatgaaggctcagtttttcaagcctttagctatgtaaagagcaaatactaggttgagccatatgcaatgtcaatattctaccatttttgatcaacaaaactggcatttttttttggtatgcctcagcttcatataatgaaatcctgtgtgcccaatcactcagcttccacacctaccaagtcaagcctctgttgaatctgtgtcctacctactttgacctctctcttcccagagataatttcagagcaaattccatatgtataatgattttggtatgtcttcaaaaaacaaaaagctctttttgaaagcataaccacaataccattattattattattattttgagatggagtctcgctctgtgatccaggctggagtagagtggtgcaatcttggctcaccgcaacctccgcctcccgggttcaagcgattctcctgcctcagcctcctgagtagggaggctcccaagttgtatttttagtagagacaggatttcaccatgttggccaggctagtcttggactcgtgacctcaagtgatccacccacctcagcctcccaaagtgctgggattaccgatgtgagccactgcgcctagcaattattttgattcaaaatattaataataattatataacattttcaaatacccaattattattcaaattacccaaagttgcctcatatatttttagttttttacatcagaattcatataatgtccatagattgcagttggttgattactgttttaagtccttttaatctataggtttttctgttttcctttcttatttttgaacagggtgtcattctgtcacccagggtagagtgcagtggtctggtcataacccactgcagcctccaattcctgggcttacgtaatcctccctcttcagcctcctgagtaactgggactacaggtgtgtgccatcaatcctggctaatttttaaaaaatttttaatgttttatagagatggggtcttgctatgtttcctaggctggtctcaaactcttggccccaagggattcttctgcctcagcctcctaaatttttagaaatttggttttatgaggccatgcccagattatggggtaatgtgctcactcaataaacactcatgaaataaaaacctttcatgataaaaattctgaagtgctggaattacaggtgtcagccaccacacccagccaaaagctcttgtttctcttttacctattacttctttaatgcttttcctttatttacgtagatctgagtttctgacctctattatattcttctctataaattacttcttttaacattttttttctttgagacggagtttcactcttgtcgcccaggctggagtgcaatggcatgatcttggctcactgcaacctctgcctcctgggttcaagcaattcacgtgcctcagcctcctaggtagctaggattacctgtgtatgccaccacgcgcagctaatgtttttgtatttttagtagagacaggatttcactatgttggagagtctggtcttgaactcctggcctctagtgattcgcccatctaccatagtgctgggtttacaggcatgagccaccacacacagtcctgaagcagtttttcaggttaactttagaatgcctttggccaagaggaggggtcccttcagatggatgggggtggttatttttggcttacaagcacttgctgggtttgtttggagagtcaacagttgacagtagcatcaatattaatggttatattacttttttatttttttgagatggagtttcactcttgttgcccaggctggagtgcaatggcatgatctcagctcagtgcaacctctgcctcctgggttcaagtgatcctcctgtctctgcctcccaagtagctggaattacaggcgcctgccactacgcccagctaatttttgtactttcagtagagacagggttttgccatgttggccaggctggtctcaaacttctgacctcaaatgatccgcccgccttggcctcccaaagtgctgggattacagccgtgagccaccacgtccaacctaaaattttttaattaataaaaaaagaagaagatgagttgctgtaaacatttcatccatggttcaaggtgcaacctatatataagctgttgtcaggccaagtgtggtggctcacacctgcaatcgcagagcttcggaagtcctagatgggaggatcgcttgagcccaggagttcaaggccagcctggacaagatagcaaaaccctctctccaccccccaaaaaagaagataaataggccaggcatggtgatgtgtgactgtagaccctgctactagagaggctgtggcaggaggatggcttgagtccaggagttcaaggttgcaatgagctatgattgcaccactgcactccatcctgggtgacagagcaagatcttgtctctgaaaaataatatatatattatagcatatataatatttatattttagagacagggtctctaaagttaaaggttaaaattaaaggttagagttcatctaaccttccaaaaccatctccctggcattcctataacctcccctttccatacttccagaggaatcacacccatggaaccaggaaaccaaaccagtgcatctcaattcatcctcctgggactgtcagaaaagccggagcaggaaacacttctcttttctctgttcctctgcatgtacctggtacagtcctggggaacctgctcatcatcctggccatcagcatagactcccacttccacacccccatgtacttcttcctggccaacctgtccctgattgatttctgtctggccaccaacaccatccccaagatgctggtgagccttcaaaccggaagcaaggccatctcttatccctgataatgcaaacattcctgggctctctatggggaagctgtggccctgtgcctgaccccaaggcactgggagagaaagcctttcctgaccccaaggtgttacaggaaaggggtccaatccaaatcccaagagagggctcttggatctcaggcaagtccacaaagtgaaaacaagtttttaggaaagcaaaggaataaaagaatgactactccatagacagagaagccccgagggctgctggttgcccattttcatggttatttcttgatgatatgctaaacaaggggaggattattcatgcctcacctttttagagcatctggggtaacttcctgatgtcgccatggcatctgtaaactgtcatggtgttactggtagaaggtgttcaggttcttggattcccaaacaaagaattggacaaaacacaccaacaaagcaaaagcaaaagcagccatgagccacagtgcccggcctcaagctgacatgatattaagcagaatggctttgaataatcaaacctctgatttatttgtgttacttttcttccaagagaattaaattttaatttctcaggtgaacaaacagacctccagatgtggccctgctgtagatttctataagtaagtacacaggttggaaagacgaagaaaatctgctttctggtgactattctggtgaatgaaacacagaatttgaccggggatggtggctcatgcctgcaatcccagaactttgggaggccaaggcaggtggatcatttgagatcgggagttagagaccagactggccaacatggtaaaaccgcatctctactaaaatacaaaaattaactgggtgtggtggtgggcatctgtaatcccagttacttcggaggctgaggcaagagaatcacttgaacccgggagtcgaagattgcagtgagctgagatggtgccaccacactccagcttgggtgacagagcaggactctggcaaaaaaaaaaaaaaaaagaatggccaggtggcacggtggctcacacctgtaatcccagcactttgggaggcagaggcaggcggatcacctgagatcaggagtttcagaccagcctggccaaggtggtgaaacccggtctctactaaaaatacaaaaatttgccaggcgaggtggtgcgcacctataatcccacttacttgggaggctgaggcaggagaatcacttgaacccgggaggcgggggttgcagggagccaagatcccaccactgcactccagcctgggctacagagagagactccatttcaaaaacaaagacaaaaacagaatttaagataattggaagttgggaggattgcttgagaccaagttcaaggctgtagtgtgcaatgattgtgcttgtgaataaacactgtgctccagcctgggcaacatagcaagacccttgtctcaaaaaaaaaaaattaaactaaaaaaataaagtaagcctgggcgcaatggctcatgcctgtaatcccagcactttgggaggctgaggcggctggatcacgaggtcaggagttcaagagcagcctggccaagatggtgaaacctcgtctctactaaaaatacaaaaaaatcagccagacatggtggtgcacacctgtagtcccagctactcgggaggctgaggcaggagaatcgcttgaacctaggaggcagaggttgcggtgagccaagatcacgtcactacactccagcctgggcaacagagcgagactccatctcaaaaaataaaatacataaaaaataaaataggccaggtgcagtggctcacgcctgtaatcccagcagtttgggaggccgaggcaggtggatcacctgaggttgggagttcgagaccagccatgaccaacatggggaaaccccgtctctactaaaaatacaaattagcagggcatggtggtgcatgcttatagtcccagctactcgggaggctgaggcaggaaaactgcttgaacccgggaggtggaggttgtgatgagccaagatcatgccatcgcgctccagcctgggcaacaagaacaaactccatctcaaaataaaaaaataaataaataaacaaataaatataaaataagatgagagtttgccatggagagtccatgattctggtcagggcctttttggagtaaccagaaaccatgggaaagcgaaactacagctctctcttcttgcaagttccctaaactctcttgccataggcacgcaggtgattacagtgctaattgacagaaggctggaattgccagagacttgggaagttattacaacctgggggctgctagaaatttgggaaaatccctccctctgtatccagcttgagctgaagcatttatttagacccctccctcccctgtgaaatgagaaatgcctcaggcaccaataaatctcttaagattctgtcagccaaacaaaaacatctccaacttgctctgtgttaagaaataaaggtttcctaaagtgctggctctacaggcatgagccaccatgcccagcagaggtgggtagattgcttgagcccaggaggttaagaccagcctgggcaacatagtgagatcccatctctaccaaaaaagaaaaaaaaagtagccaggcctggtggtgtacacctgtagtctcaactacctgggaggctgaggaaagaggatcagcagaggccgggaggtccaggctacaatgagccataattgcaccactgtactccagcctgggtgacagagcaagatgctgtctaaaataataataataataataaacttaaggccgggtgtggtggctcacatctgtaatcccagcactttgggaggccgaggcgggcagattacctgaggtcagcagtttgggaccagcctggccaacatggcaaaactccatctctactaaaaatacagaaattcaccaggcgtggtggcgggcacctgtaatcccagctactcggcaggttgaggcaggcgaatcgcttgaacccaggaggtggaggttgcaatgagccaagatcacaccactgcactccagcctgggcaacagagtgagactccatctcaaaaaacaacaaaaacctagacttgggttactgcagttcccaatggagacacacgagggcagaagaaacacgcagcgaggacgtctcaggtgctccagtccctcgggcacttttcacagacagcatctcccgcctagcacagacattttgcttaatcctggtccctttccccacctgacctcagtgccttttgccactggggagccagaagcctatagcccaggggcttcccaagttaaggcacactgggaaagggttgaaagtggccttacgttttccaaatttcccaccccagcccctgggctcggtgaatatcttcccacctaacccaggactggggccatctggtttctgttgtccacagagagatactgaagttatgcaagaaaaagagagagagaagaccggacctggtggttcacgcctgtaatcccagcactttgggagtctgaggcaggtggatcacctgaagtcaggcgttcaagaccagcctggccaacatgacgaaaccccgtctctactaaaaatacaaaaattagtccaggcgtggtggctcaaacctgtaatcccagcactttgggaggccgaggcgggcagttcaagaggtcaggagttcgagaccagcctgaccaacatggtgaaaccctgtccctactaaaaatacaaaaattagctggacatggtggtgcacgcctgtaatcccagctactcggcaggctgaggcaggagaatcacttgaacctgggaggtggaggttgcagtgagccgagattgcgccactacactccagcctgggcgacagagcgagactccatctcaaaaaaaaaaaaaaaaaaaaaaaattagccaggtatggtggtgtgtgactgtaatgccagctatttgggaggctgaggcaggagaattgcttgaacccgggaggtggagattgtagtgagccgagatcacaccattgcactccagcctgggcaacaagagcaaaactccgtctcaaaaaataaataaataaataaataaaaagaaaagaaaaatgaaagagagagacagagggagcgctacagagagagacagagacagagagatactgcagttatgcaagaaaaagagagagggagggaaagagagacagagagatactgtgacaggccaggtctcactaacacaggcctctctaacaactgtttcagcactgactgcgtggttaagttaaatatttaaagatgatagcgccagtgcccttagacaaaggctggaacgtaacaaaagcacaccaagagttttgcccaggcctttcctgggccttgaagcatgacaagataatgaaggaattcttaatggacctgtttaggattaaacaagttttattgggagtctgaagaaactctctagactctaaaatttagcaggagacaagataagggtaactatccctggcacctggacccatctagattaagtaaatttactgaggctcagaggaaggtcttcaggactcagaccttagttacagattaggagaagttaattggcctggtgcagtggctcacgcctgtaatcccagcagtttgggaggccaaggcaggcagatcacttaaggccaggagttcaagaccagcttggccaacatggcgaaaccccatctctactaaaaatacaaaaattaaccaggcatgatggtgcacgcctgtaatcccagctacttgggaggctgaggcaggggaatcgcttgaacctgagaggtgggggttgcagtgagccgagattgtgccactgcactccagactgggtgacagagcaagacttcatctccaaaaataaataaataaataaataaataaataaataaaaattaaactacaagccaggcacagtggctcgcacctgtaatcccagcactttggtaggccgaggtggggggatcacctgaggtcaggagtttgataccagcctggccaacatggtgaaaccctgtctctactaaaaatacaatagctgggcatggtggtgcacgcctagataatcccagctactcgggaggttgaggcagaagaatcgcttgaacctgggaggcagaggttgcggtgagccgagatagcgccactgcactccaacctgggtgacagagtgagactctgtctcgaaaataaataaaactacagcagccacaagcactgacagagtcaagtatcaggcacccacaggacaaggtgggacacagtgtctactcatctgcagagtggggaccagggcaggattgggagaagagagccagggtaagggggaagaaacaatattgacagaataattctgaaagattctccccgcggcctgaaaacttgggaggataaacttggggggatgaataactcctcccttctcaggcccagtcccaaggtgcaaggctacttgccccagcagcatgcgccagcaagatagcagaagcaggaagagagatggccggaagacatgtaccctggccggaagacacgtaccctggccggaagacatctaccctggccggaagacatctaccctggccggaagacacctaccctggccggaagacatctaccctggccggaagacatctaccctggccggaagacagctaccttggccggaagacacctgccctggccggaagacacgtaccctggctggaagacatctaccctggccggaagacacatgcccctgaagatcaagagacgggccatccgggtaccatgtagcagttacgtcagactgggacacttgctgtttacgggagactataaaacccctgccccgtcctcacttggggctgacgccattttaggcctcagccgtctgcacccaggtgcacattaaaacagcgtgttgctccacaccagctcatgttgtttgttggcttgctctcggggttcgaaacgacacaagagccttacaaatt

SEQ ID NO: 1654 - protein, 212 aa, Homo sapiens
MTGGLALYTQRNHTHGTRKPNQCISIHPPGTVRKAGAGNTSLFSVPLHVPGTVLGNLLIILAISIDSHFHTPMYFFLANLSLIDFCLATNTIPKMLAQSQGARLLAPAACASKIAEAGREMAGRHVPWPEDTYPGRKTSTLAGRHLPWPEDTYPGRKTSTLAGRHLPWPEDSYLGRKTPALAGRHVPWLEDIYPGRKTHAPEDQETGHPGTM

SEQ ID NO: 1655 - DNA, 1266 bp, Homo sapiens
  source (1)..(1266)
  CDS (201)..(305)
  CDS (637)..(851)
  CDS (898)..(1066)
  modified_base (178): a, t, c, g, unknown or other
gagggagcaaagttcagttttcagccaaagagtgtctttctctctcttgaaattctctcccgcaccctcttgtatccggtgtcgaaaacaactgccagaggttctttttcttggtccgaagaaaaaagactggccagactaaaaaggagggactttagggggaaagcagcttcctagncctgctgcggccagagggggtgatgtcaccgcttctgcaccgacgggcctgggggtggggcggccgagggggagccgcgccgcggctgcagctgccaagggagcgttccgagcccacgtcaggggaggtgtcgggataaatagggtcccgcaatggccgtggctggctgcgctccgagctgcggagtccgggactggagctgcccggcgggttcgcccccgaaggctgagagctgacgctgctcgtgccctgtgtgccagacggcggatccgcgaccggaccccgcgccccgctttgctgccgactggagtttgggggaagaaactctcctgcgccccagaggatttcttcctcggcgaagggacagcgaaagatgagggtggcaggaagagaagggcgctttctgtctgccggggtcgcagcgcgagagggcagtgccatgttcctctccatcctagtggcgctgtcctgtggctgcacctggcgctgggctgcggcggccctgcgaggcggtgcgcatccctatgtgccggcacatgccctggaacatcacgcggatgcccaaccacctgcaccacagcacgcaggagaacgccatcctggccatcgagcagtacgaggagctggtggacgtgaactgcagcgccgtgctcggcttcttcctctgtgccatgtacgcgcccatttgcaccctggagttcctgcacgaccctatctagccgtgcaagtcggtgtgccacgcgcgcgcacgactgcgagcccctcatgaagatgtactaccacagctggcccgaaagcctggcctgcgacgagctgcctgtctatgaccgtggcgtgtgcatctcgcctgaagccatcgtcacggacctcccggaggtgaggccgtaggaaggatggagggaggcgaggaggcgccggggctgtggctgccaatcgagaactgggcggccacacctaaggctgccaggggcgtctgaggcttgtaggaggtgggaaagaatgggggaaacattttcttcagaaaaagtctggtttctcccataggaattttaggagctagcggagagcactgcaccccataaagaaaa

SEQ ID NO: 1656 - protein, 162 aa, Homo sapiens
MSPLLHRRAWGWGGRGGAAPRLQLPRERSEPTSGEWRCPVAAPGAGLRRPCEAVRIPMCRHMPWNITRMPNHLHHSTQENAILAIEQYEELVDVNCSAVLGFFLCAIRASRCATRAHDCEPLMKMYYHSWPESLACDELPVYDRGVCISPEAIVTDLPEVRP

SEQ ID NO: 1657 - DNA, 32846 bp, Homo sapiens
  source (1)..(32846)
  CDS (201)..(316)
  CDS (3397)..(3842)
  CDS (3912)..(4015)
  CDS (10168)..(10673)
  CDS (14616)..(14753)
  CDS (20636)..(21405)
  CDS (22054)..(22181)
  CDS (22267)..(22617)
  CDS (24759)..(24933)
  CDS (25658)..(25761)
  CDS (26025)..(26141)
  CDS (26262)..(26745)
  CDS (29638)..(29760)
  CDS (29963)..(30082)
  CDS (31453)..(31581)
  CDS (31888)..(32113)
  CDS (32187)..(32646)
  modified_base (35)..(134): a, t, c, g, unknown or other
  modified_base (4055)..(4154): a, t, c, g, unknown or other
  modified_base (9937)..(10036): a, t, c, g, unknown or other
  modified_base (14510)..(14609): a, t, c, g, unknown or other
  modified_base (19198)..(19297): a, t, c, g, unknown or other
  modified_base (26392)..(26491): a, t, c, g, unknown or other
  modified_base (32259)..(32358): a, t, c, g, unknown or other
gagctgctgttccgcagccgcgagcgcctcttctnnnnnnnnnnnnnnnnnnnnnnnnnnnnnnnnnnnnnnnnnnnnnnnnnnnnnnnnnnnnnnnnnnnnnnnnnnnnnnnnnnnnnnnnnnnnnnnnnnnncggtgatctgcaagcggacctgtctcaagggccagtgtcgggacagttgtcagcagtggctccaacatgacgctcatcggagagaacggccacagcacagacacgctcacgggctccggcttccgcgtgggtgagggccgggggcacggctgggggcaggggaaggacaggcaccaggcccggtgggagagctagtggggtcttggccttagagactgggggctgagggtataaagggcagagatccgagggcctgggggaccaggggcctcagggaacttgggaggctggaactctgggggccagagttggagggctgcatggaggcctggactttgaagctttgcgttagggttggggcctaaggggtggggaaatgcagaggtcctggatgacactggcttcccagaaggtgctgagttctgagcaggagcacacagggtttttgaggaatgtgagccggggacaggaagcctcagagaagggctaaatattcccgcaagaagcagacttgctggaagaaacaagaaaagtctttacaaaatgtctaaagtagggcctgccagagtagacacctgcattccctgggaggaggagctaaggtcagggctggggatgggagccggctactggcaaggtctgagtagggagggtgttgaggcctaaaagtagggtgcaggcctgaaggtagggactagttcggggttctcagcctctccttttccaatgcctccccataagctcctaacatcctgcctcagaggccctcagggcccccctcatcctcccccaagcccctacaccctccccagttcagcttggagtccaccccctccccagcatctctctttaaagggccaggcctggggctcagtcatcctcctgctaggccccgtgggccaggctcggggaggtgtcccagcagtaattaccctcctggacagggtaattaggccaggcccaggatggcaccagcaaaacagcccctcttacacattcctatattcactctcccactcacagagctaaggaaccccactcatgtggctcaaatttgtcatgagatggggtgtgcgtgcgtgtgtctgtgcgcatattgcccctgtgtctggggtcatgccatgggcatggcgtggcacactgtgaagtacccgtctttgtgttgtcttgggtgtgtgtctctagtcgctgttagagagtatgtgggaatgtttttgtttttgtgtttttgagatggagttttgctcttgttacccaggctggagtgcaatggcgcaatctcagctcactgcaacctcccccttctgggttcaagtgattctcctgcctcagcctcccaagtagctgggattacaggcatgcgccaccacgcctggccaatttttttgtatttagtagagatggagtttcaccatgttggtcagcctggtctcaaactcctgatctcgagtgatctacctgcctcggcctcccaaagtgctgggattacaggtgtgagccactgcgcccggccaaatgtatgggaatgtttatgtgaacctgtgttggtgtcaggatgagtctctgtgtgtgtgtgacaagaggactgtgggtgtgagtgtacgtgtgtccatctcccaggctccctggccatcctgcccaggctgctgtctccatctgtgctgcccacatcccccaggctcggtgcccaggccacagtgggcgggtgtcattgggaggtcactctcaccgctatgagtgactcactggcagaaaggaaaaagagaatcctacctccccccgcccaggacacacccctctgctctgtgaggcctggccccaagaggccaggcaggatgggctgggctgggatgtgcttagcctgaccctgagggccatggatatgggctgtccctgtgaggcccttctggcatccaggagagcagcacccccgccctcctgccctcctgccctgggaagtgagggcagccatggggtgggcaggagaagggctggggctttgggatgagtcagagccccaaggctggtagtagcacaggttgaaggtgagtatgggacagaaacagacagaggtcccatcctctccctcagtcattctttcattcattcccccgaaccccctgtgggacccagagctgaggccagcctggccctgccttccagagcaccctctataaggaggcagacagacaagaacatagccaagcaggtgccaggcagagctggccagtgggtggtaaggcaggagagggagctcaggggggccggataggaggaaagcctccctcctggtggagacactgagctaggaaggatgagatctgcatatatagagaggggggggacctggggccctgttgtggagggaagggcatggatgaggccaggaggcaggaggcaggcacatttgcaagagggagatgggtcctggggtgtgcagtacacagggaaggagcagagggggatgggctgaaaaggttctggtccatggagtgagcttctgcctgaggcaggtttctctgggacactgagattgtggaccagcaggagaggctggaagccaaggaggggtctgggtggccaggcctgggccagggcaggagcagtggccctagggaggaggggaggcaggttcatgggacattagaggctgtaactgggcaggggagagcaggagggacggagccgtcggggctcagctgtggatgcctggtggccaggtgaagaggaggtggggaggcaggatgctgacttctgacagtatgtcctgggcagaggtgcctgagagagccctggaaaggctgggggctgtgtctgtgtcttgagatgtggacatctttggcagtggtgaggtgggcgccccaggatggtgaagagggagagggtggagagcaggcagagaggactgaggcctgaaggagggaagggtttatgggagaagaggaggaggcgccagggacggagccaatacctttggaaggctcaaggggaaagccagatcaccataattatttgctaccacttattaagcaccctttgtgtaccaggccctggggtaagcatttgtacagcccttacctcatctaacccacacatctctacagatgaggacgctggggcacagggaggggacgtgagttgctcagggtcgcacagctggcacatggcttagcgaggatttaaatcctggacttgagactccagaacccaacataggtgtaaggatgttggggaacctagagagggcagtttccctatgtaggatgtatctcaaaacctggcttcccaagaggacagagccagtgggtggcaaggaagtagggaggaggggaaagagacaggatgtgggtgagggcctgaccccactcttctccccagtggtgtgccctctcccctgcatgaatggcggccagtgctcctcgcgaaaccagtgcctgtgtcccccggacttcactgggcgcttctgccaggtgcccgcaggaggagccggtgggggtaccggcggctcaggccccggcctgagcaggacaggggccctgtccacaggggcgctgccgccactggctccggagggcgactctgtggccagcaagcacgccatctacgccgtccaggtgatcgctgaccctcctgggcccggggaggggcctcctgcccagcacgcagccttcctggtgcccctaggcccgggacagatctcagcagaaggtaccaggcaactggcaaacccgggaaggtcgccagtgggtgggcactagggtggccagggcagggcaggttcagccctggaggagctcagcgcggtgacccgcggcgcggtgcgggcagccctgaggccaccgcgcccgcccccagtgcaggccccgccccccgtggtgaatgtgcgcgtccatcacccgcccgaggcctcagtccaggtgnnnnnnnnnnnnnnnnnnnnnnnnnnnnnnnnnnnnnnnnnnnnnnnnnnnnnnnnnnnnnnnnnnnnnnnnnnnnnnnnnnnnnnnnnnnnnnnnnnnntttttttttttttttttttttttggttttcactgcaatgtgaatcaccttgacatttctgtgaaacaggaagtggctggatgatacaacaataaaaataatcacactcaacttggtgtgtgtgttttctttgggccaggcactgtgttaagagctctttatgaagtatttcgcttattccttaggacaacactggcagctaggtcttatcatcattcccaatttgcaaatgaggaggctgaggcctggagtagtgagagatgtatccccagtcacccagttgggagtggcagggctggggctcccggctggcagccagtgtacctcttgagcctgagctcttaccagtagatttctcccgtgctcaaaaggcggggaagagtggcagggcagaagggccccctgatttatcaagcgtgaaggtagtttcatctcatttccaatcccaactctcagtgtccatcgttttactacccacagtaagtggcacattagaggggtttaatagccactttcagtaaagtgtctttggagagaaatgctttagggcaaccttgtcccctccaggccttcatcacttccatccctcatctttaaagctgatgagcaaggccgggcgcagtggttcatgcctgtaatcccacactttgggaggccgaggcgggcagatcacctgaggccaggagttcgagatcagcctgaccaacatggtgaaacctcatctctactaaaaatacaaaaatcagttgggagtggtggtggtggctgcctgtaatcccagctactcaggaagccgtgacacaagaatcgattgaacccaggaagtggaggctgcagtgagctgagattgtgccactgcactccagcctggcaacagagtgagactctgtctcaaaaaaaaaataaaactgatgagtgtgacccccttcccttctacccacccaccccctcgccaagagccatttctttcttcagagcccagaagcttcccaaagacattcagaactcagagggacaacacatggaggcggcacagcctctgacacacagtcagccctcgtggcacggtggctctccaccagcagcccgtctctcaccaccctgcccatcttggcttgcagatccagacaatgatgaaaaggtctcacatatcctgagtgcttactatttggcaggcatctgctaagggcttcataaatatcagcccactgattccctgcttatttttatttttatttttatttttgagacagagtctcattctgtcgcccaggctggagtgcagtggcacgatctcggttcactgcaacctctacctcctgagtagctgggattacaggcgtgtaccaccacatccagccaatttttgtatttttggcagatggagtttcaccatgttggccaggctagtctcgaactcctgacctcaagtgatccacccacctcggcctcccaaagtgctgggattacaggtgtgagctaccacacccggacttccctgttaatttttttttttttttttggtgggggggaacggggtcttgctctgttgccaggctggagtgcagtggcgcaatctcggctcactgcaacctctgcttcctgggttcaagcaattctcctgcctcagcctcctgaggactaagacgcgcaccaccacgtctggctaatttttgcatttttagtagaaatggggtttcaccatgttggccaggatggtctcaatctcctgaccttgtgatccatccacctcggcctcccaaagtgctgaggaattatcacacccgtgggcccctgcaacctggcccagttttcccttttcacagggaaaattccccggccggggaaaaaaaaaaaaaaaaaaagagcatggtggcgcacacctgtaatcctggcactttgggaggccaaggctggaagatcacttgagcccaggaggtcaaggctgtagtgagccatgatcctgccactgactccagcctaggtcacaaggtgagaccctgtctcaaaaaacaaactaaacaaataaaaagaaagaaaggaacccaaatatttcttgagcacctactatgtgccaggcactgttgaggtgctagggatattgcatgaacaaaaacagacaaaaatttcctgtcctcgcagagcagacaggcaacaagccgatcaataagcagaatctcctatgtcttataaatgctatgaaaaactaaatcagggccaggcgtggtggctcacacctgtaatcccagcactttgggaggccaagtcgggcggatcacaaggtcaggagatcaagaccatcctgattaacatggtgaaaccccatgtctactaaaaatacacaaaaaaattagccgggtgtggtggtgggcgcctgtagtcccagctactcaggaggctgaggcaggagaatggcgtgaacccgggaggtggagcttgcagtgagccgagatcgcgccactgcactccagcctgggcgacagagcgagactccgtctcaatctcaaaaaataaaaaataaaaataaaaataaaaaaatcagagtagaaggaaggagttctgagggttgtgataataagtagggtggcaatgatagaaggctttctgaacagattttgaaagatggttatgggctgggaacagtggttcatgcctgtaatcccagcactttggaaggccgacacgggcgcatcacgaggtcaagagatcgagaccaccctggccaacatggtgaaaccccgtctctactaaaaaaaaaaaaattagctggacgtggtggcgcatgcctgtaatcccagctactcgggaggctgaggcaggagaatcgcttgaacccgggaggcggaggctgcggtgagccgagattgcgccactgcactcccgcctggcgacagagcaagactccgtctcaaaaaaaacaaaaaacaaaaaacaaaaaaaaactgggaaacctgctagacaaattctaaaagacctgtaacactaataagtatttgttgaatgaatgaaatccctcagaatgggctaaccaccatgctacctggatcgtttagggcagtgggatctctggtgctcaccaggcttccccagtgcccagccctggatacacgctagcctattagcgctagggaatgcctgggggcgggagggaggagagaaaactaaagtgggggcgtggcctaggcaggggtggctttgctgggcgggccttacctgtgacctgagtgggagcgatctctacggcgctgcgggaaggaggcaagtccggcaggaaccagcgcatggtcgggggcgagggacgggagatcagctctgcgggcggcagtgcactctggtcagagacgatattgactgaagcctccctttccacttcagtcttggcccggcgccccaccccagcttgactgtccccgagtacttaaactgtgaactccccgcccacccagtgatttagcccttgaggactcatccctacagtgcccagctcaccggggtagggccgggcaggagtcgtggtggcagttgggtggctctgctgcactgacctctcctcactcaccggctgcgggtgacagcagcatgagccctcctgtccctcgcctgcccacccctcccatctgggttctcatactcactgagtccgtggtcacccctaaaagggaagaagatggggccatgaagtgttggggcgggagaagggagtcagatctgggatcagcagctgagtatttgcagttagggtctctgggagttcaacaatcatgtctccaggtcaagggtcaggggttagattctggggttagggtgtgtttgcatagtagtcacatgatcaggttgaatggccttgggttacaggtcaggctgtagaaggcttaggaggttatagctcagggtcaaatatctgggtcaggggtcagagggtcaggtgggaggtcagtggatgggtcagggataaggaattgggggttagactgtgaggtcagatctgtggatcacgggtcaaggggtcaggcctaggggcttggcatgggtcagggatcagaaggggtcaggctagacctctctcttcctctgtgtcctcaggtggtggagcctggctagggctctccggaagctgctggggcttgggtggcccgtcagggtgcaggaaaagggaaaagtcactctcgccctgaatggtgagcgtctggtgggaggtgagaatgtggtatcccttcccagctgggcagatctccttgaacgcagctgcagtcaagacagcagacacaaaagtgagcatttcctggacaggtgcatggacctatgaacccctatccccgggtaaccctgactcaccggtgccatctgttgggcagcgctgacaccgcgcgccccaggccttgccgacactgcagcagcagagctggcgggtcaggcgggtggtcagtgggtgctggcactggtgctcagggctcaccaggcggaaacacaggctcttctcctccggtttgtctgctgcaggggccagtggggggcatgggcatctgagcctgcacattgcccacgtccctctgcccagctgctgcagaccttgcctctccggcccagacaacccttgatcccccatgtggtctctgaccccatatgaccctgaactcatgtgacccctgaaacttatgtgaccactgaccccattgactcccgattctagctatcctggacttcaccactcctactcatcaagcctatgttctgcatgactctgactctatgtaatccctgaccccatgtgactgctaatggcagatctcatgtgaccccggaccctgctgatccctgatcctattggctctgggccttgttcctcctgcagtcaacccttaaccccactctgatctcttgcgatctctgatccttgctcccacccatgccttgtgacctcccaggaacctgagccccaggtctcaccaatgcactgtgtacgggaggggcctaaactatggccaggtgggcagacacagcgataggagccagggttgttgaggcagtcaccatggcgacacacgcccggcattgcgcactcgttgatgtctgtggtaagtggaagtttggcccctctggtctggggccatggggtgacagcaggctgctccaagaacctcagggtcttgccccagccccacctcctctctcgcccaccttgggaccctccccacccccagtgatggctggcctgcccctccagcccacagaatctcctagctggccatacctggcagtgggtgctgttaagcctcttgtagccctggggacagtcagcgcccacttccccacgtacaggccctggcttctgcactcctgtgtctgcagagagaggatagcttggcaggggagggtgaggagggaactggggaggggcacagcagatgtagagaggaatctggtgacctggggactcccactgcagggatgggtggggtgggtggggaggggccaccagatagggaacgccccctgagcccaagcactcacactgcagctggggacacttgtggcacttgctctggccccaggcagtgccgatgctaccgcagcagtcttcctgcttggtgaggccggggagggggttgctgccacactaggggaaggagggggaggtggggtcacagagcaccccgccccggtgccgcctgttagggttgggccttttcctcttcccccgcccctcagttttctgctatccgagtgagttggggcagagcaaccctgagagaaggaaaggcagatcccgactgtgattcactnnnnnnnnnnnnnnnnnnnnnnnnnnnnnnnnnnnnnnnnnnnnnnnnnnnnnnnnnnnnnnnnnnnnnnnnnnnnnnnnnnnnnnnnnnnnnnnnnnnncgattactcactttgtttttaggggatttcagggccccctcccgccgatcggcggagtttggtgatgtcactctgggccgggtctggagcaaagccagggctactgggctgcggccgcccgccccgcgcagggaaaagcccgaccgggccttctgctccgcagaggccgggtggttgaactccgcgcgggtttcctaaccgctaaaggtgcctttcggtggtggctgtctcagaagcacgttaaaatgtcctacccaccccaatctagatgcggctgtgggggaatgggagcggccggacctcccagcctgacagtgcatcaagagctttgcggagcctacagcccggatgggacgactgaggccctcccgctggcgagctggccgagggctcgtccctctccagctaaagcgccagcttacgatacagccaaactgccggctctcatcggctgtgggagcaggaggcccccaggggtaaatcccggagcctcgtctctgaagcctggcgcttgtgtctcagaaggtgcgggacccacagggacacttgaatcagcaggctcacgaccccccacccccctgcccccgcctgtgtttgccctggacctccagctagggctgaccactaattctgtcatgtgaccccacagtgcaggtagctcccccaagaccaagcccaaggcgcgtccgtgtggaggctggggctgacgcacccccaccccaggcctcatccccaaaggaggatgctccactgcagggggcggagtcttctccagatggagaaagacttttttattttctctgaattcgtcttaaattaggaaatcatgtgggaattggaaaagattggaaattctgacttgtttcccaggctctgaagaaacaggaagagaaaagtgaaaatagagttagcaccccgcccactcatttcagtttctccagtggctggccctgattagaaaagtgtttacttttggcagggggcgggggaggccgacttcaggtgacagaatggattaattaaaatctttggttaatgatatacaattatcattgaaccttgcatggatcctcttcttaaaattcatgtatatttataacttttaaattaatacgataaacacccatgtacccattgcaaaactcaaggggccaccaccatccagaattctgtattgtattgtattgtattgtattgtattgtattgtattgtattgtatttatttatttatttattttttgagacacggtctgtctctgtcgcccaggctggagtgcagtggcacaatctctgctcactgcagcctctacctcctgggctcaagcaatcctcccacttcagcctcttgcatagctgggactacgggagcacaccaccatgcccggctaagtttttgtattttttgtaaagaagtggtttaaccttgttgtccaggctagtcttgaactcctgagctcaactttcctccccgcttggcctcacaaagtgctgggattacaggcgtgagccaccacgctgggccagaattctgtattttttaaattaattaattaattaatttattgtaaatagagatgggtctcactgtgttgcccaggctggtctcaaactcctgggctcaagcgatcctcccacctcagcctcccaaagtgggattacaggcatgagccaccacacctggcccagaattctgtattttaaatgaaaaaaaaagttatatctgcatgcctacacaatatatcttttggttttccttagttttgaacttttttttttttttttttgagacaaagtctcactctgtcgcgcaggctggaatgcagtggcattctgcttactgcaacctctgcctcctaggttcaagcgattctcctgcctcagcctcctgagtagctgggattaaaggggccaaccaccacgcccagctaatttttgtatttttttagtagagacggggtttcaccatgttggccaggctggtctcgaactcctgacctcaggtgattcgccagcctctgcctcccaaagtgctgagattacaggtgtgagccaccgcacccagccagttttgaacttttatgaagagggcatcatatgatttgttgtcctttgttacttgcttttttcactcaacctgttactatgattcatgtttcacagttaattcactttttcactgctgtatactattttgttgtgtaaatataccacagtttgtttattcatcctgaagataggcatttttatttttatttttttgagatggagttcctctcttgtggcccaggctggagtgcaatagcaccatctcggctcactgcaacctctgcctcccaggttcaagtgattctcctgccttagcctcctgagtagctaggattacaggtatgcatcaccatgcccggctaattttgtattttttttttcttttgagacagagtttcgctcttgttgtgtgcaatggcacaatctcggctcacagcaacctctgcctcccaggttcaagtgattctcctgcctcagccacctgagtagctgggattacaggtgcctgccaccatgcctggctaactttttgtatttttagtagagacggggtttcaccatgttggccaggctggtctcaaactcctgaccttaggtgatccacctgcctcagcctctgaaaatgttgggattacaggcatgaaccactgcatctgactaattttgtacttttagtagagacagggtttcaccatgttggccagggtggtctctaactcctgacctcaggtgatctgcccgtctcggcctcctaaagtgctattacaggcgtgagctaccgtgcccagccatgggcatttggacttctaattttttgctgccataagctttagagcactgagtaatatataaaaacagcaatcatgtagtttttaaaacttagtctggggttaaagaagtatgtaaacaactatgttttcttaaagatttataggagcattgtgactggaccaaggacaaagaagttcccaacctcctcagaccctcgctgctgcccagatgtctgccatggggtacttcttgaccacaccctccttctcttccctgcccttaacatagaaagagcctaagattgtactgacttaaaatggtactttagaacgctagtacaccgtcctctcagtcttgctggctttcagaataaatcagtaaacctactttttctcccaccaacgcccctatcagttgggatcctcttacctcggcctcccaggtagctgggactataagcactcaccaccacacacagctaattaaaaagaaaacaattttttgaggcagggtctcactctgtcgccatgctggaatgctgtggcatgactcgttgctcactgcagcctcaaactcctgggctcaagcaatcctcccaccttagcctcccaagtagctaggactaacagcgtgcaccaccacactcagctaatttcttttttttaatttttagtagacacaagatcttgctatgttgccaaggctggtctcgaacctctgagctcaggcgatccttctgtctcagcctcccaaagtgttaggattacaggcatgaactaccaaacccggctgagttttttaaaatcttaatgaatgcatggatttaaatatattagctgtgttttaatcaagtatagttattgaaattcaaattattcgtctttggttagggagaacttcttcaagttggttgttcttcagtccttttgacacaattccaatatatgagtcttggtggctcatacctgtaatcccagcactttggaaggctgaatggggaagactgattgaggccaggagtttaagaccagcctggtcaacatggcaagatccctatgtctattaaaaaaataattttaaaaaagcaattacagtagcctgtgatagcttctttgctgtttggtatgaaaagatatttcttttctttttccttttttttttttgagatggagtttcgctcttactgcccaggctggagtgcaatggtgcaatctcggctcactgcaacctctgcctcccgggtgcaagcaattctcctgcctcagcctcccaagtagctgggattatgggagtgtgccaccacgcccagctaatttttgtatttttagtagagatggggtttccatattggtcaggttggtctcgaactcctgacctcaggtgatccacctgccttggcctcccacagtgctgggattacaggcatgagccacagcgcctggcctgaaaagatatttctagactcatctagtaaattttctgccccagatctggaatcagacagctttccaaggagtcctgatttctcttagtaggaaatgatatttaaagactacagcttgagtacttcggatacttattgctactgagtcagtcattgtagatgttttcggtgaatagttagtactttttttttttttttttttttgggaaacnnnnnnnnnnnnnnnnnnnnnnnnnnnnnnnnnnnnnnnnnnnnnnnnnnnnnnnnnnnnnnnnnnnnnnnnnnnnnnnnnnnnnnnnnnnnnnnnnnnnttccagagggccctcacctgggaccgtctgggccggccgcggattcctccgggcggggcggggcggggaggcctgcgtagagcgagataccgaggctgagggagagaggtggccctgccgggtcacactgacgatggaggccgggtggagccggagcccaggccttccagctctttcccagcctcccttgcaaacgtgggggtctcagggccccaaagtaacttctcgttagtgctggtccaatcccctctgaggaaagggctaaagggtggggacagcctttggccagggctcacggaggtcccaggaggaagtctgtggggtccagaagaggagcagaaagaacaaagctagaacccagcttccctgccagccccctcggaatggcttcctggtgcccaccctgccacctcccccctttcctttcgtctggccgtgctggcggggctggctctgggcctcagacactctggaatcgccaaggtctgagctcagggcctggcccccttcccaggctaacagccgggaggacgggggcgctgtccgagggcccaggggctggagaggggcacagcagagccccagggcaggtgctggcagcggctgggggtgggggtcttcaggttggccatggctggagaggagcatagttccagaccaggcttgtccgctggtctggaaggaaaggctgcaacgtgcgggggcccaggccttactgtggggcctgccaggagaccccagggttccgtctctgactcacagaactcagcaggaggtggggacggctagggcacatccaggaaaagcgctgccaagtcagggcggcaccagaccctctcccggacagcacccggggcagcagtctaattggggagaggaggttcagggactcactttcaggcacacctgtccaaggaactctgtttttactttgagcgtaagttgatgtgggtagctttagggggacgcttagtaagtcccccttactaagcggtgcagggctgggagggacaatcacatgtccccagggatccctgctgccggaatccaggatggggtgtgaggggcaagcccctgcttcttggggccctggtccacacggaggcagggaataatgctaggtgccgaccacctgccaggcacagggctgagcattgtatactcattttttcctaacactcatctgaacctgtcctgactctgcctagagctggctgtggctcaccatggagcacagcacagtcaaacagtccagggttggattcttactgtctctaagccccagtttccttgcttgtgagatgggtatctattcactcaacatctatgttcaactactggtaataaaaaacaaaaaattaaaaaataaatgtaaaaaattcactcaacaaactgagactccaccacatcctaagctcttggccacaaatagaaccagtcctgccttcctggagctgctgtactaggagagctggatatgtgccagatcaattcacacagaactgtggctacaacagaggctggtaccgtgacagagaagggcagggaagcaggacaggagagggctgggacctgggagacaaagagagtcttccatcggaagctggaagatgagtaggagtgagtcacacctgtgggcatctgacctcaggggaggctgcagggggaggctatccagagaactgagggaaggccagtggaacaacagggtgtggtggagagggagagccgaaggtgtagtggtggtgggaggggccggccatggtgaggaatttgcttttattctcattgcagtgggactgtgtcagggcaagagcgggcactctgccttcatcccaggagagagatctcacttggccctgggagagatgtatttgggaggggagatgtaaagactgggtgaagtaggggtgctggagaggtaggtggcatgaatggcccccagattcctggcctgatctctggatgggcgaagaagaggggaggcagaggagctggaaacatggggcagggtccacagctctgttctggtcctgctgagtttgagatgcttgtgagtcatccaagtggaggtgcccgaacccgggagtctgcagctcagacaggatgtctggcctggagacagaggcttggggttatacagggggcatctacgacagcgggaaagggtgggcttactatggagagaagagagcccagggtgcccagggagatcactgttcccgggtcagggagaggaggcggagtcaggcagggagaggaggcggagtcaggcgaaagaccagaaagagcagctggagggagcagagaggaaaaccaggagtgtggtggggaagagccaggaggacggtgtggccctcggtgtctaaagctgctgccagtatgatggggggataacagcccttcttcaggggctgatgaggggactcagtgagaaggatcaatgaaagtgtccagcccagtaatgatgcccaactcaaatgatatccaaccaaattccttcagctctcagggcctccgcaggaaatagctgaaaccactggggctagcaacagagggacatcactccagtgcacattgctccactggcataaccagggagggtgcctgagaggtgtggcctgaagcagagcagcagcccctggccctctgcagtctgcagggagggcgctgggggaacaattatcaccctaatctcttcctagccacgggtctccagctgggccaaccgtgggctgaacccagaagaaagcctgtgggctgaggggcctgggggtacagcaggtggagcttagctttccagctcagcagggaggtcaggaatgcagaaggggtctgcagggcaagctgacaaagcccaacacacatggtctctttggcctgaacatcttttctaacctcatcactacatgtggcacctcatttgcctagaatctgccagcacactttttttttttttttttttttttgagacagggtctcactctgtgccagggctggagtgcagtgacatgatcttggctcactgcagcctcaacatcccttaagcagcctcgagggatcctcccacctaaaccccccctcccaccgccgcctcagtaggtggaaccataggtgcacaaccatgcttcgctaactttaggatttttggggtttttttggattcttttggagacaagctcttgctctgctggagtgcagtggtacgatctcggctccactctgcaaccttcatctcccgggttcaagcgattctcatacctcagcatccccaatcagctgggactacacgctcatgccaccacatctggctaaattcttttgtatttttagtgaagatggggtttcactatgttggccagactggactcaaactcctgacctcaagtgagccacctgccttggcctcccaaagtgctgggattacaggcgtgagctaccacgcccggctgccggcacacttttattcctccatgatgtacattctcctgtaagtccaaggagaccatgatcttcctgattacttcagatcattcctggcaataacaggtcttcccactgctactctgcatcatctggtccctcctcctcctggtgccggagtcacctttcaaaacctaattccaccatgactctcctccttaaaatacctccagtgatttcccttgctcacccgagcctgccaggtccactgttcctcagagtggctgagctcattcctctgtctggggatgctcttctgccaacttcatggtcctcatgtcagggttcctgcagatgcttttctctaaaacagccatcccttggccaggcgtggtggctcacgcctgtaatcccagcactttgggaggcctagatgggcagatcagttgaggtcaggagtttgagaccagcctggcgaacatggtgaaaacctatctctattaaaaatacaaaaattagctgggcttggtggcgggcgcctgtaatcccagctacttgggaggctgaggcaggagaatcacttgaacccgggaagcggaggctgcagtgagctgagatcacagcactgcactcctgcctcagtgatagagcaagactgtgtctcaaacataaataaaataaaaattaaaaaatttaaaaaaatgaaatagccatccctagccctctgggtcatatcacctgtgtttttccctggtattccacaaaatctgaagcattctttgtggatttgttgacttgcttattgtccagcttaccaccctctcagggagggacaaccttgtctccagatcccagaacaaggcttggcacagatagggtgccgaagtttgttgattgactgcacagagaggccacaagagtgcctgccatctaccatgcactttacactgtggggtcacgtcatcctcccagtgaccctgcaaagggaaaaccaagactctgaaagatgaaatgactagactcagctgggcgcggtggctcatgcatgtaattgcagcactttgggaggccgaggcaggcgaatcacgaggtcagaagatagagactatcctggctaatacggtgaaaccccatctctactaaaaaaaaaaaaaaaaaaaaaaaannnnnnnnnnnnnnnnnnnnnnnnnnnnnnnnnnnnnnnnnnnnnnnnnnnnnnnnnnnnnnnnnnnnnnnnnnnnnnnnnnnnnnnnnnnnnnnnnnnntgggctggggagccgactcttgcttggttctggaggccccagacgaagggtgtgtggagcccctcctccacccccctccggcccagccccgcatgatgttgctggatgctgcatgaagacccaccattagatgcctgtacccccagtggaggttccccagctccctgtcctcactgcctactccatccagggcttgcctgggtgtggcttccctcaagttctcacaccaccatttgcacctgcctctggcgtcacgtttccgcacttagcaggtccctggggctttgggtgtctcaatcttgcatcctgtgagaccttgaacctcagcccaacacccaccccccaaaacctacgcacacagacagcagtgggcaggtgcagccctgcttagggcctggagatgggcagacccaggctcacatcctagctctgacacggaattgcttcaggcaagagcatctcctctggacctcatctgaccatctgtcacatggggttcagacctccctgtctgcatcagtgagaccaggtaggcagaggtccctatgggtccctgtcattgtgactcctcttgcccccaagcctgggcacagtagcctgcaagaaggtgagttggcctgtccttcagggcagggtgactggggtcccatgacagctgctgtgaccccagcaccttcctcaggatgtgggggcctggcagagggctgggcccacagttggggctacttcctgtgctgaaggaagtcctcttgccattcctgctgccctgccgctgcctccctgggaacccatgtgtccttgtggtattgaggccttgaggtccagggcactgagatcagacctctctgggtgatcagctctccagggaccctgaaggaagtgggaggggcaaggaggaaggtctctggggacaggacgtcctccctttgttaagtgggcaggacccagacaccagtggcccctgggtttcccgtcccagccaatacaagtcatctgtccggttgggctaggtcctggtgggacccttactctgggcccaggccaaagctaaggtgtgtgggtggcgactgggggaccctggcagtcccagggctgcccaggctccaggaccctcaggaccaagacccaacagcccagcctctagccttgcccagctaagctggggagggggctggaaactttagccctaggcagacaaggaagtggcctggaaagcggaagcagctttgatggtctcggagggggccggaagccaacacgggtggtggaggaccaggctgggggcctgggttcctgttttctgcccaggcccctctgagcagccccctcctccttcagggcaggaactgctgccacaacctcaggctgggcaccaaacacccgtgcccgccaatgcggcccagcccccggagagtcaggcccacagagcatgcccatgtgggccggcggtgtggggagccctcggcggggcatggcccctgcgtccacagatgacctctttgcccgcaagctgcgccagccagcaaggcccccgctgacaccgcacaccttcgagccgaggccagtccggggcccactcctgcgcagcggcagcgatgcaggcgaggccaggccccccacgccagccagcccccgtgcccgtgcccacagccacgaagaggccagccgacctgcagccacttccacccggctcttcactgacccgctggcactgctggggctgccagcagaggaaccagagcctgccttcccaccagtgcttgagcctcgatggtttgcccactatgacgtgcaaagcctgctctttgattgggctccgaggtctcaggggatggggagccactcagaggccagctctgggaccctggcttcagccgaggaccaggctgccagctcggacctgctgcatggggcacctggctttgtgtgtgagctcgggggtgagggtgagctaggcctgggtggaccagcatccccacctgtgccccctgcactgcccaacgcggccgtgtccatcctggaggagccacagaaccgaacctcggcctacagcctggagcacgcagacctgggtgctggctactaccgcaaatacttctatggcaaaggtgaggaaaggcagttccagggagtggaggaggggggctgaagaagaggtccctgtcacctgcagtgcacacagtagggctcatgaactgtccatttcctgtaaagtccctggccctgggagggctcaagagctgagctggggtcctcctggacctactttcaaccaccttcttaaggctaatccctggctcctcacccccagccagggctggtccctctgcctccgtattggttcatcctccatctggttcaacctgccaggctggggagagattccctatgggcttttctgtggggtgaaaactcaggcctcaaatccctgcatccgtgaaccttgttcgcaccagcactgcggagagagggctccaggacatagaagggagaatgagggcgtggtgggtggagccaaggcaggatttaggcctgggagctggccgcgtgggtctaggtctgggtctgggtccacctctgggtcaggttgagatcaagatattgagctcggggctacagaggggcgggacttagtctagggtcaacatttggtggtgagatgaagcctagggcggggcttagtgatgcgcgtggtcgagcgggggcggggctgccagagggcgggaccaatcgttttcttcggcgcggtcccccagaacatcagaacttcttcgggatggacgagtcgctgggcccggtggcagtgagcctgcggcgggaggagaaggagggcagcggagggggcaccctgcacagctaccgcgtcatcgtgcggaccacgcaggtgggccgggatcgcgggatcaggacgtgggttgcctccccgacaccttgtatgcatcctgagtgcccttacaccccttcctcagctccggacactccgtggcaccatctcggaggacgcgctgccgccggggcccccacggggtctgtccccaaggaaacttctggagcacgtggcgccgcagctgagccccagctgcctgcgcctgggctcagcttcacccaaggtaccacggacgctgctcacactggatgagcaagtggtgagtggcgggccgcggagcccccagccatacagctggccccagtctgaacccagcctgcccagctcccaaacccctagccttgaccctgatcctgggctgggtggtgaccccagaagagctggcttttcagagacagggcatcagagttcatctggagccttgcgtctcaaagtgagctctgtagaccagcagtatccacatcatgtagaaatgcagattctggggccccaccccagaccatctgaatcagagtttgcactttatttatttatttatttatttatttattttgagatggagtctcgctctgtcacccaggctggagtgcaatggtggaatctcagctcactgcaacctctgccttccgggttcaagagattctcctgcctcagcctcctgagtagctgggattacaggtgcatgccaccacgcccagctaatttttgtatttgtagtagagatgggggttttaccatgttggccacgctggttttgaactcctgaccttgtgatctgcccacctcggcctcccaaagtgctgggattacaggcatgagccactgcccttggcccagagtctgcattttaaaaagatatttgcagccctagatgccctggtctgactcaccccactggtcctgcagttcccgcatcattcctggccaatttcccccacagcccctgctgggtttcctctaacatgtggtgctcacagcttcctggagcggctccttccatcccccactccatgctgaaagctgcccattggctgagtcttctcctctgtatcattcaacccatcagtcattcaacaaacatttcttagacctttttggtgccaggcctcagactggatgctggggacaggtctagaccaggtgctttgcttgagtagctcacagctgggtgggagaaagagacccacagagaactgctgaaacacaggagcagtactggaacactgaaagggaatgttgagggctgcctgggccacgacggtagtgatgagagcccttccttggccagggttttccagcatggagaacacaaaagggctcaggcccggataagcaggtgttttctggtcagaaggaataacttgtgcaaaggcttggagaatgagagcatggcacattaggcagtcagttcagcgtggctggggttgggattgtggggaggggcgggggagaagcttgcatttgttcccgtggacactggggagccatggagggatacggtgcagatctgagaggggcagctctctggctgcagcatggggactagactgtacggggcggggatgccaggctgaaggctattgcagttgcccaggctagacacagtggcagcgatagtggaggtgaagaggaggtgacagtccaggaaggactgggtagtcatgtggctgactggaaggggtgaagtgctaggatttcccagcttcttggcccccaggagtggtggtttaaggaggaggagcagggtgggggagtcacagcaaggtgagacattaggcagccggagaaaaaggcccggggtttggtaggccggtctgaatgggaggcggagatgggggtgtcatccttgctgcagccagggagggggaggagcatgggtggagaagaggcccaggcagaagagggcggggttcctggggccctaggcaaggtgagtttccagctatccccagtgccacctatggctgagagggtaccaggatgaggccacatctggggaccatatggggagtggggggtgcagggggttgggaggaatgaaatcgaagtggggactgtaagtgcagacaagtttagttgtagaaaagggaggtgaccgctggaggggagcctgtgctgtttggaggagttcagagcaccttgagctgggcatggttatccagttatccgcagagggaagagccgggaagagggcacagaaatgggagcatggggggcagaggtggtgcctggcctgcaggggctggggtgggggtgccttggattcaggggtgcagaggacagtccagccttgagataaggaggatgataatgtgtatgtttattggaagggtcctttctgtgaatcaccttctctactgccacatgggaaccagcctcctcccatcccttcctacctgtgcactcccaagcacgaggagcacaacagactgtactcacctgacaggcaagggcacaagtggctcagagagggctggtgctcagccccaggccagcgtcccatccattccctaagagctggtggggtggggctgcaggggactgagacctatgccttctgtctcccacccacagctgagcttccaacgcaaggtgggcatcctgtactgccgggcgggccagggctcggaggaggagatgtacaacaaccaggaggcgggaccggccttcatgcagtttctcaccttgctgggcgatgtggtgcggctcaaaggctttgagagttaccgggcccagctagacaccaaaagtgaggcccaggggcaggaggggtgggagcagatctgtgctgaaggggtgagcacaaattgccttgtcactcctttgtccgtacaatcctggggctggggactggagagttctttgggtgagctaaggatctgagtcagggctatgagggccaagctatgggctgaaaagaggggctgggactgtccctcaaggcccaagtaccctactgcctgagctggggctaaagtggtttgggggcactacccctccaccaaacacattccagcagctcagcctcgtggaagagaggtgcccctacctccctggtggaaggggccccaggacccctgggaggtgttgtactgagcaccccctgcctgcttttcactttcccagcatgccacacatgcttgggcctggagtgacacctgtcctcctaggacacctgaccctgccctccctctgagaccacttctcatttctgtcttcattctatttcaactctcccatcctgaccccccttcactctggcatggggctggagcctgtggagggagaggaggaggggcacccagggctgaggcccttgaatctcgctggctgggcattggctggtggcatgactggttgtccacctgctgtttggggcacagaggctcctgtgtacaggcaggaatggcaagttcaagccacttagattccccttgttttctccttctgtgtccctaacttcctggccacagcggattccacaggcacgcactccctctacaccacataccaggaccacgagatcatgttccacgtgtccacgatgctgccttacacccctaataaccagcagcaggtgtgagggggaccaacgtgggggtggggcttccgggaaccatggagggccctgcatggcccatgacgtttgagctttggccggagctctgttggccccaacagcccgcccctctggtggccccttcccaaagacagaaacaccctaggtcttcaccaggggcagtgggggagccattggtgccttggctttctcctgcctgaatgaggaggggtttggggcacagaagacctcatcacgagcccctactatccaacccctagctcctccggaagcgccacattggcaacgacattgtgaccatcgtgttccaggagcctggcagcaagcccttctgccccaccaccatccgctcgcacttccagcacgtgttcctagtggtgcgggcacacacaccctgcacgccacacaccacctacaggtgggcaccggagtggtcccaggtctcccgtgggcattggagtcctggcgcccctcactaacgccctccctccccgcagggtggccgtgagccgcacccaggacacccctgccttcgggccagcttctgcctgctggcggaggccccttcgcagccaacgccgacttcctgggccttcctgctggccaaagcgctgaatggtgagcaggnnnnnnnnnnnnnnnnnnnnnnnnnnnnnnnnnnnnnnnnnnnnnnnnnnnnnnnnnnnnnnnnnnnnnnnnnnnnnnnnnnnnnnnnnnnnnnnnnnnnggggcggggccttccgggagtagaggctgccctctcaaccccgcgttccagggaagagacccacacccccgcgaggtgcgcggtccgccttccggtggggcagagtccgaggctaggtctttccgccgcagacgtgaacgagtgcgccgagggcagcccctgctcgcctggctggtgcgagaacctcccgggctccttccgctgcacctgtgcccagggctacgcgcccgcgcccgacggccgcagttgcttgggtgagcgccagcacccccgccccgggcctccgccgccccctacgcgctgaagccggggagcgggtcacgctgtctgtaaacagtgggtggaaggtggctcattcatccccaggtgactctgctcactcattttctcaacgaactttgccaaggaaggcaccactagaatttccacgtaggaagggtctcggggtagagctcgaagctgcgtttgcaaagcatgttacttaaatttgaaggaaaaaagatatcaaagaatgagggcagacgatagtactcccccctgcactcctgtttattatacgccaagaggcggggctgggggctgggactcattgaaaactggagaaggaaagacagactgtagcatgcagtgctgggcctggatggagctgggctgcttcctggagacacagcgggatgggaggaaggaggcctgggtcatcttaaagaatcactaggaattgggcaagaaaggaggagaggaacagcatggcaggcacaggggttggcactggcagatcagaggtgagacagagggtggggtgttggggaactgtaaggaatgatcaggctatgggggctgaggctggccggggagggacaggtccccatcccttggagggccccctaagtcctgcctgggaggttgtgcttcacccagaaggtgttagagggcacctgcagcattttaagtgtaagagtgacaagatttgccatttgttttagaacgttccctgctgctgattgtggagggaggtctgttgcagagacttagggcggagacagtggtggacaggatgagtggtgggctcaggatggccatgagacgatgatattggagaaatattagacctcctgggttttttaactggatgtcaagtgaaagcgagggtgataacgacccctccccgtttccagtttgggtgagtgagggggtagtgctgctcactgggaatgggtcctcatgcgtgggcatgtttgggagggaaaatgctgagctccacattggacaaattgaatggattgtgcctgtgagcctctcagcaggagatgccagcatacccacctggaatgatggaccatggaccgggggagctatggagtcttgggtgggcctgcttagccaacccaaggtgggttgggtaagcagagcatctagcagagccttgtggacactgacagttcaggggcaggctgcggaaggcgttggaggagatggtgggggagggatggcaggggcgcctgaggggcaccatctgggaagctggggaggacatatttccagggaaggaggaggatgagccaagtgcagtagagaggttcttgtaaaataataactggtgagacaataagtcttaggacaagacttaggggtctgccccctaatcctacatggaaatcctagtgatgccttccttggcaagaaggtccctggtagccttggcagggtagcttttgggatatgatagggacagaggccagagatatgtgggcagaaagtgaagaagaacaagacctggggactcttgctcttccaaagtggggctttggtataggctgaggaggtgatgccaggagagtggaccaggagacgagggcagcagggtcaggagaggagggaggagagccagcggaagggacatctcttgctgtaacaggagcaggaggggaatggatgtagataacgatgttcagtgggttaagggggattacctttaattctctcaatacacagtgaagggcctgggttgagtaggggactcaggagaacagtggcggtttggaagtatcccagggcatggggctgcctaggggctttatggaagtcaaagctttagaggagtcagagagggaggtgccagccacacgaggctctgttggactgaggctgaagcctgtgggtatgttccagcatgctcagcttggtggctgctccagtcccactccgcacccaggatccacaggccacagctctgaccagagactgggcattgccagacagtgaggaggaaggagaggtgtttatggatcagggacgggagtcctagggatgataagccctgggctccagctgggaactatcagagtctgggggtgtcaggcaagctcggaggactgagagggaggccaccaagccctgtgagagagaaggtggaggtgaggacttgagaacagtggaaagaaggcagcctctgagggccccagggtggagcagatctgagtgatgaaaatccccttgggaccctgagagtgaggggaaggtcacggaagccgagagatccaggaatgtgaggtcagaggctgacctggttgtccacgcggatgttcgaaactcccaggatggagagaaaaacagagcaggaggaatgaggaaggtgggtgctgacagccacaggaggactgaggctgcaggaggccggcggcacctcagaggccgagctcaggcttggaggggtctgggatgtgggcaacaactggctccatcagagaggcctcaggaaagtgtgtcccgggggagggtcaagttcctttactgcatgagcagaagaaagtgggaagaacaaggatagggagtttatccccagaggaaaaagggagccatggcaggtgagggaagggtgggagcagcagtgaaagcggctggggcagggagagagggcgggggaggctggggaggctctttagcatcagacctggcctagggaccctggcagcacctgacctggtcgtcagggcactgtgtgccacccagaagcagggtgaggcctgtgcttctgagtgctgctggcctcagctctggtgctccaggccatgcgcagaagtgagaaaacagtagtagaaacccaagaccacccagcctggtcctctgacaccccctatgccctgcagatgtggacgagtgtgaggctggggacgtgtgtgacaatggcatctgcagcaacacgccaggatctttccagtgtcagtgcctctctggctaccatctgtccagggaccggagccactgcgagggtgagggatcttagagctggggtgctgacctgtccctccctaccccaggacccccaccccccagggtccagtcctaatccagatctcagttggggcataggggcgtgggactgacccagggctctgggagaaagctttggctgcctcaggctggggttggtgatcagcccctgagattctccaccccttccatcccctacagacattgatgagtgtgacttccctgcagcctgcattgggggtgactgcatcaataccaatggctcctacagatgtctttgcccccaggggcatcggctggtgggtggcaggaaatgccaaggtatgggggactggctgagggttcctgagggatgtggcagggagcagtaattccctagacacactgtggcctttctccatccatccatccacccatccaaccatccttcatccatccatccatccatctatccatccatccatccatccatccatccatccatccatccatccttctatccatccatccttccattcatccttccactcacccacccatccatctgctcagccttccagtctttcacctagaataacaatgatcacagtaaacatgacagttagtgctatcgtggtgcttactatgtgccaggcactctgttaagctctttacagatattaatgtattggtcttccccatcaactcacccatacacatgcattcatccaacaaaagtttaggctgagtgcagtggctcaggctgggggcggtggctcatgcctgtaatcccagcactttgggaggctgaggcgggcggatcatgaggttaggagttcaagaccagcctggccaatatggtgaaaccccatctctactaaaaatacaaaaattagccgggcgtgatggcgcacgcctgtagtcccagctactcgggaggctgaggcagaagaatcgtttgaagatgggaagcggaggttgcagtgagccgagatcacgcccctgtactccagacctgggcagagagtgagattccatctccaaaaaaaaaaaaaaaaagtttattgagcacctactattttccaggttctgtgctttgtactaggtaatcaacaatcacccagggctcccagctaggggaggccaacatgtaaactgattctgacagttcagggtcctgggtgccaagaaaggtatagactaatgattaattgcaatggggaggtgaatgttgaactggactgaaacgtaagtaggagttccctaggcatgggaaaggcaaggcacgagaagtcattccaggaccaaagagcagtaattgcaaagcatagagatctggaaggagctagttgtgtttacagaggaggggagggtgccctgagcacagagttggggagtggagggtggtctagagtaaggcgtgatgagacctaaaggtatcggaagctcaattgcatttgaggcctttccatttgggcttctgatacttttaggttttgtaaggttagtgggagccactgaaggtgttatgaaggacagcagctaatgtccacatgcacattcagacacatgcacagacacagcagacttcctgctgtacatactttgaaaccaaagtggaaattcaggttctgaacttgtgtgaggcccttgaggtgcagccccagggaaagaggggctgggtttccagctgcgctactcttgccccgcagacatagatgagtgcagccaggacccgagcctgtgccttccccatggggcctgcaagaaccttcagggctcctatgtgtgtgtctgcgatgagggcttcactcccacccaggaccagcacggttgtgagggtgagtgtcctcccagctcctccctcggactggacaactcccctgagctgcagctgggattcagagatgtgtcctggccccaccctcctaaatttggggaaccggaagaaatctcttttggctgggggagtctggtggggccagacgatgaagggtccagaacaccacgttgagaacagagccaactctcaggaggaggctaaggggagccagggaatgtggggggaaagacctgtggtgggtgggcagggtggacagggccaaggggggtctgtgcacaaccctgagctgccgtctgcccctcagaggtggagcagccccaccacaagaaggagtgctacctgaacttcgatgacacagtgttctgcgacagcgtattggccaccaacgtgacccagcaggagtgctgctgctctctgggggccggctggggcgaccactgcgaaatctacccctgcccagtctacagctcaggtcaggagccgggcaggccccttcccagatcttcagtttcttcatctggaagccaaatgtgggaaatggcgccccctggcagttgggaaataggcggcgggctgcagccctaagcccacgcgcgcgctcagtcctgcctcttccctccccacggccgccctgcccctgcagccgagttccacagcctctgcccagacggaaagnnnnnnnnnnnnnnnnnnnnnnnnnnnnnnnnnnnnnnnnnnnnnnnnnnnnnnnnnnnnnnnnnnnnnnnnnnnnnnnnnnnnnnnnnnnnnnnnnnnnctaacgctgaggaagccgacggctgagctgcgcagggaccccgaccggaggtccgcgacccgaggcccagagggaaaccagggagccaaggccctgcagcccaggctgcgcctccctcctcttggctttctcggtcccgcgacctcccgtgacccacgaagacctctcctggttcttctctcattcgtgaatgaccccatcatgctcatggctcagcagctccaagtcctcgtatccaacccagatctctctcccctgcgcaccagcccctggacatctccactctgacgtcctcgggcctctcaaactcatcctgttccaaatgacctcagccatccccagcctgcctctccttttccctgtcagccctggccctgccaccttccaagggctccagccggaaacctggccactaccgtagatgccgcctcttcccttagtaacttgcgtccagtccttccacgaggtcctggaaaatctgcccactt

SEQ ID NO: 1658 - protein, 1498 aa, Homo sapiens
  MOD_RES (1029)..(1062): Variable amino acid
  MOD_RES (1370)..(1403): Variable amino acid
MTLIGENGHSTDTLTGSGFRVGEGRGHGWGQGKDRHQARMYLKTWLPKRTEPVGGKEVGRRGKRQDVGEGLTPLFSPVVCPLPCMNGGQCSSRNQCLCPPDFTGRFCQVPAGGAGGGTGGSGPGLSRTGALSTGALPPLAPEGDSVASKHAIYAVQVIADPPGPGEGPPAQHAAFLVPLGPGQISAEGSALEELSAVTRGAVRAALRPPRPPPVQAPPPVVNGKARPGLLLRRGRVVELRAGFLTAKGAFRWWLSQKHVKMSYPPQSRCGCGGMGAAGPPSLTVHQELCGAYSPDGTTEALPLASWPRARPSPAKAPAYDTAKLPALIGCGSRRPPGVNPGASSLKPGACVSEGAGPTGTLESAGSRPPTPLPPPVFALDLQLGLTTNSVIGPSPGTVWAGRGFLRAGRGGEACVERDTEAEGERWPCRVTLTMEAGAGTAATTSGWAPNTRARQCGPAPGESGPQSMPMWAGGVGSPRRGMAPASTDDLFARKLRQPARPPLTPHTFEPRPVRGPLLRSGSDAGEARPPTPASPRARAHSHEEASRPAATSTRLFTDPLALLGLPAEEPEPAFPPVLEPRWFAHYDVQSLLFDWAPRSQGMGSHSEASSGTLASAEDQAASSDLLHGAPGFVCELGGEGELGLGGPASPPVPPALPNAAVSILEEPQNRTSAYSLEHADLGAGYYRKYFYGKEHQNFFGMDESLGPVAVSLRREEKEGSGGGTLHSYRVIVRTTQLRTLRGTISEDALPPGPPRGLSPRKLLEHVAPQLSPSCLRLGSASPKVPRTLLTLDEQVVSGGPRSPQPYSWPQSEPSLPSSQTPSLDPDPGLGGDPRRAGFSETGHQSSSGALRLKLSFQRKVGILYCRAGQGSEEEMYNNQEAGPAFMQFLTLLGDVVRLKGFESYRAQLDTKTDSTGTHSLYTTYQDHEIMFHVSTMLPYTPNNQQQLLRKRHIGNDIVTIVFQEPGSKPFCPTTIRSHFQHVFLVGGREPHPGHPCLRASFCLLAEAPSQPTPTSWAFLLAKALNGEQXXXXXXXXXXXXXXXXXXXXXXXXXXXXXXXXXXGRGLPGVEAALSTPRSREETHTPARCAVRLPVGQSPRLGLSAADVNECAEGSPCSPGWCENLPGSFRCTCAQGYAPAPDGRSCLDVDECEAGDVCDNGICSNTPGSFQCQCLSGYHLSRDRSHCEDIDECDFPAACIGGDCINTNGSYRCLCPQGHRLVGGRKCQDIDECSQDPSLCLPHGACKNLQGSYVCVCDEGFTPTQDQHGCEEVEQPHHKKECYLNFDDTVFCDSVLATNVTQQECCCSLGAGWGDHCEIYPCPVYSSGQEPGRPLPRSSVSSSGSQIPASSLPTAALPLQPSSTASAQTEXXXXXXXXXXXXXXXXXXXXXXXXXXXXXXXXXXLTLRKPTAELRRDPDRRSATRGPEGNQGAKALQPRLRLPPLGFLGPATSRDPRRPLLVLLSFVNDPIMLMAQQLQVLVSNPDLSPLRTSPWTSPL

SEQ ID NO: 1659 - DNA, 58448 bp, Homo sapiens
  source (1)..(58448)
  CDS (201)..(225)
  CDS (9878)..(9957)
  CDS (11015)..(11151)
  CDS (11245)..(11963)
  CDS (12136)..(12283)
  CDS (16345)..(16400)
  CDS (16922)..(17048)
  CDS (17172)..(17277)
  CDS (17532)..(17609)
  CDS (17717)..(17816)
  CDS (17906)..(18030)
  CDS (18180)..(18386)
  CDS (19089)..(19652)
  CDS (25860)..(26184)
  CDS (26683)..(26805)
  CDS (27104)..(27220)
  CDS (27365)..(27652)
  CDS (28712)..(28831)
  CDS (28920)..(29046)
  CDS (29222)..(29480)
  CDS (30262)..(30402)
  CDS (32047)..(32232)
  CDS (38643)..(38797)
  CDS (50745)..(51037)
  CDS (57674)..(58248)
  modified_base (14021)..(14120): a, t, c, g, unknown or other
  modified_base (25450)..(25549): a, t, c, g, unknown or other
  modified_base (32482)..(32581): a, t, c, g, unknown or other
  modified_base (41206)..(41305): a, t, c, g, unknown or other
  modified_base (50772)..(50871): a, t, c, g, unknown or other
cgtgatcctccctcttcggcctcccaaagtgctgggattacaggcgtgagccaccgcgcccagcctaattccagctttttatttatttatttatttatttctgagatggagtcttgttctgtcacccaggctggagtgcagtagtgtgatctcagctagctgcaacctctgcctgggttcaagtgattctcctgcttcagcctcctgagttagctgggactacaggtgtgtgccaccatgcccgactaatttttgtatttttagtagagacgggatttcacagtgatggccaggcttgtcttgaactcctgacctcaagtaatccacctgcctcggcctcccaaagtgctgggattacatgcataagccaccttgcccagcctgattctagcattttgagtaggcttaagcgggaggagtccttgaggccaggagttcaagattagcctaggcagcatagtgagacctctgtctctccaaaactaatttttttttaaagtagccaggcatggtggcacatgcctgtagtccaagctactcaggacgttgtggttgtggtagaggatcacctgagcccaggagttcgaggctgcagtgagctataatcacaccactgcactccagcctgggtgacagagtgaggccttatctctagaaaataaaataaattttaaaaaccctaaagcacagttttgaaggaaacgagtaaggaacaaaagtgagatcaatactgcttatgcaaattaaatacatacaataccatttatttatttttatacttagttttattttttatgtttttcttgagacagggtttcactctgtcacccagactggagtgcagtggtgtgatcatagctcattgcagcctcaacctcctgggcgcaggtgatcctcccgcctcagcctcccgagtagctggaactacagggacacgccaccatgcccagctaatttctttgtatatttttgtggagctggggtttcaccatgtttctcaggctggtctccaactcctgaactccagcaatccacctaccttgacctcccaaagtgctgggattacaggcgtgagccactgcacccggaccacaataccacttacataaacaaaaaatacatacacacaaaaatgataaaagcttcacaatgatccgttaacatctttctttctttctttttctttctttctttctttctctctctctttctttctttctctctttatttatttatttttttcagagtcttgctctgttgcccaggctacaatgcagtggcatgttctcagctcactgcaacatctgcctcccatgttcaagcaattctcctgcctcaacctcctgagtagctgggattacaggcacgtgccaccacgcctggctaatttttgtatttttagtagagatggggtttcaccatgttggccaggctggtttcgaacacctgacctcaagtgatccacctgcctcggccacccaaagtgctgggattacaggcatgagtcaccacgcccagcctattcacatttaaataggatggagcggggatcaaagatgaagaagaaaatacaaaggcaaaacaagagtcgcattgcatccattgatgctttttgtatgctgtgaaataaggaatacaataaactcagctatctgctccccaggactaatgcagaagagaaatgtgcaaaggacatggacaggaattcacagaggtagcacaaatggtccatggagataggaaaatacttgaacctcacaaataatgaaggtgtggagacaaaaatgaccccatcttagacgtgaatccgccatgctgacttctgaatagctgcagtcccgtgaatacctcctgattcctactctatttactgcccttagcataagactatgtccaccttgatgttatcacaccaattataggctataacgtatgcagattcttgcctgttctggagggctgcctttaattgtcttgcacagaacactcataccctttccctatggtacataagccttggctctaggatgacaggcacggagatctgtttgtctcgtggctgcccaagaccaagcttgtctgtaaggtcacccaaataaatcaccctgtaccagcaaactggatttgtctgccttgttctttggtttctctgctccttcagcattcgggagctgccttgcatatctggccctttcatgaaagagaagagaatacaagttattgcaacaatgcaataatagcttttcatctatcagattagcaaagtgaaaattataattgctggtgagggtataaatactgttgatggaaatctataatgattgagcctttagggggaataattaggcaccatcaagatctaaatggcttagagctagctagtttgcttatagaacattaccttgcagaaatctcaagacacatttccagggatgtccgcagctgcagtgtctggagtgaggacgcaagcggaagcagtcccggtgtttgacaaaaggacacaggtgatgtacattaggtgggtcagacagccaaacagtgatgatggtaaagactgggtggctctgtatgtcctgacatggaaagaatataacattctagtaggcaaaaccaggatgatctcatttttgttgaaaaatatgtatatgtaggtttgtatacacacacacacacacacacacacacacacacacacacacacacacgtctatctctaaaatcacaagatattcaaatggtacactggctcaggtcttggttttgcatcggaggccaaggacaaagcaatagccccagggccctgcattgctaatcaggtgccaggcccccttgcagtgaggacaggacactcctgacctcaagtgatccacccacctcagcctcccaaagtgctgggattacaggcgtgagccaccgcgcccggcccagactagacatttcaatttcaatttctgaggctgttcttagtgatcagaggacttttcactacctgaggtgacttgagaagtcatagtgcctgctcacgtcttatccaggcctgggaacggcttggcccaagggggagtgggtgggtggaaaaggatgcagctgtctctgtccgaatgctgcaccccgccttgctcagggtgtcagttccacatttgtttgtgctcacaggggaaaaacacgggccaaatacacacccaaaagttaacagcagttctactgcacagatttaatttttttttagacagagttttactcttgttgcccaggctggagtgcagtggtacgatctcggctcactgcaacctctgcctccctgattcaagcgattctcctgcctgagcctcccaaagtagctgggattacaggcgcctgccaccacaccctggtaatttttttgtatttttagctgagacggggtttcatcatgttgaccaggctggtctcgaactcctgacctcaggtgatccacctgcctcagcctcccaaagtgctgggattacagctgtgagccactgcacctggtcatatttaaatttttgacagtgtgcatatattacttctattatctgaagaaccaataaagatgttttctatctgtacatgtatttattattttattgtattgtatttcattttattttattttattttattttattttttgagacagtctcattctgttgcccaggctggagtgcagtggtgtgatcttggctcactgcagcctccaccccctgggttcaagcaattctcccatctcagcctcccgagtagctgggactacaggcatgcacctccatgcccggctaatttttttgtattttaagtagagacagggtttatccatgttgcttgggctggtctcaaactccggtgctcaagccatcctcctgcctcagactctcaaagtgctgggattacaggcgtgagccactactccaggctcccattgcaggttttaagcagaagtctttaaaaaatggcccaagctggccgggctcggtggcttacgcctgtaatcccagcactttgggaggcagaggcgggtggatcatgaggtcaggagatcgagaccatcctggctaacacagtgaaaccccgcctctactaaaaatacaaaaaattagccgggcatggtggcgggcgcctgtagtcccagctactcgggaggctgaggcaggagaatggcgtcaacccaggaggcggagcttgcagtgagccgagattgcgccactgcactccagcctggacgacagaacaagagactccatctcaaaaaaaaaaaaatggcccaggctgctgggttgggaattgaccatgaagaagcagaaagtctatgtagaagacaacggatgttgagaatgctccaaatggctggtggtaagcgttcagattctgaatgcactttgaaatcaggaacaactgttggataggacatagcatttcagagagagaaaagcctaggcttttggttcgagaaactagaaggatagcatagtcactaggccaagatggagagggctgtggggagggtcagggagtcagtttcagagttgttgaatgtgagatgcctgttagacacctagatggagcagtggactgggtcattcgagtttgggaggcaggactcaccttctgagcttgagggagatgtctggactacagataaaagtggggttcattgtctgatagattttatttaaaatgagcctgtcatgcctgtaatcccagcactttgggagtctgaagcaggaagatctcttgagcccaggggttcaagaccagcctgtgcaacatggctagacgttgtctctacaaaaaatttccgaaatattatgctggggacaggtggtgccacaccccttatgttgccaaactcggctcaagagggttttagagcggggaatttttaattgagcccacgggagggttgaaggccgcacgtgagcccaagagtgtacggcaaatgcaaattccaatcattttttggggtacagaagttagacccttgttttcctaaaaaaatgattagtacaacccttaaacccaaaaacacaaaaccatggtcctggtgagtccagtaaaagaggagctgtggccgggcgtggtggctcatgcctgtaatctcagcactttggaggccgaggcgggcggatcacgaggttaggagttcgagaccagcctggccaacatagcgaaaccccgtctctactaaaaatacaaaaattagccaggcatggtggtttgcgcctgtagtcccagctacttcggaggttgaggcaggagaatcacttgaacctgggaggcggaagttgtggtgagtcaagatctcaccactgcactccagcctgggcaacagagtagctgtggacaaagaagacagacggggcagctgtccctctcctgcaagaggaggaggaactggcagaggagctggggaagagctggccactgacctcatgttagtgggagggaaggcatcggtgattttggcaggtgcaggctcacagggtggtgggggtgacagcctgcctggagtgggttcaagaaagaaaggcaagggggaaattgaccttgcccagtgaaaactctttcagaaggctttgctgcaaagggaacacagaaatggggcagtgttgaagaaggggaagtgagtcaagaaagaaggaacagtagtgctgatggaaatgatgccagagagatgagacattgctgatgcaggagagagtgggaggacggccggagccacatcgctgagcaggcaatcagcaaatgaatgaatgtgtgtgaagcggtgataagagaagcagagcaaatggtggtgcctattagggacttaggggatctgggcagggagggcttctttggcaggtgtcattttagcagaaacctagaggtcctgaaggagtaagccatgtggattctggggagagagcatttcaggaagaagaaacagtcggtgcaaagggccttagggcagactggctggcgtaccgaagggagagtgtggttggatcggagtgagaagggatcatggtggcacttgtgagcaaacacctgtgaaacatgcaggacctagtgggccagtaaggactttgccttttactcagcgagacccaggacccatcacaggcgtgatggactctgttttttttttttgttttttttttttagttaaaggtcttgctctgttgcccaggctggagtgcagtggtgcaatcagggctcattctgcctcctgggctcaagtggtcctcctaccttaacttctctagtagctgagatcacaggcatactccaccacacctggctaattttagtattattttttgtagagaaggggtttgccatgttgctcaggctggcctcgaactcctggcctcaagccatccgcctgcctcagcctcctaaagtgctgggattacaggtgtgagccactgcgtccagctgggctctattcttcacagaatcacactggttgctgagtagagaatggtatcaggacaaaagcaaaaaccgggaggttgggtgtggtggctcacgcccataatcccagcactttgggaggctgaggcaggtggatggcttgaggccaggagttcgaggccagcctgggaaatatagtgagctcccatgtcaataaaaaataaataaataagcaaaagccggagattaagcgttactgaaatgatccagaagagagagggtgttggtttggagaagtgctggattctgcatgtatttcaaaggtggagctggtagggtttgctaaggcattaggggcagaatgtgagtcaaacgaaagagtcaaggatcatgccagggcattgacctgagcaacaggaatctcagacgtgcccctgactgggatgaggcaggccagtagtctgaccttcagcatgtcaagttgaaatgcttatttatccaagtggggatgtcagatgggccactggatatttaagtatgggagaggtcaggctgagatacgtaaacctggggacgggtggaaaacagcaggtgctggcctggcgcagtggctcatgcctgtaatcccaatgctttgggaggccgaggcaggccaggagttcaagaccagcctggacaacatggcaaaaccccatctctaccaaaaaatataaaaattagccgggcatagtggcgcgtacctgtagtcccagctactcgggtggctgaggtgggaggatcacttgagcctgggaggttgaggctgcagtgagctgtaatggcactactgcactccagccggggtgacagagtgagactctgtctcagaaagcaagcagcaggtggcttttaaggccatcagactggatgagctcacttagggagggagtgtggtaaaggaaagaggtctgtatgcacctcatgagaatatcaacctgagaaacccagacctgccctctgccaaggaagaaagtggcccagagttctggactgtccaggaaatcacctggggttgaggtctggaaggggctccgtttctgaaagtgaagctgcctacatgtgccttccactgggccccaggtgtgggagaaggatggcagccccctagaaagaaaagagtttgcatattttgggtggcaaaagagcttcacccggagcagcactatttaggatatttacattggatgtgctcattgtgaggtgccactgggatggagtctgagagcagaagaggagccacagggccacagtctgagaaaaatcctgcctctatggcatcttccaggatagtctgcttccctggggccacatcattgattaattaataacagcaacacggcccggtgcagtggctcacacctgtaatcccagcactttgggaggccaaggtgggtggatcacttgaggtcaggagttcaagaccagcctggccaacatggtgaaaccctctctctactaaaaatacaaaaaattagccgggcatggtggcacatgcctgtaatcctagttacccgggaggctgaggtgggagaatcgcttgaacccaggaggcagaggttgcagtgagccgagatcacatcactgcactccagcctgggcaacagagcaagactccatcacaaaaagaaaaaaaaaagataataagaataacagcaatgctaacatagcagttcccatgagccatgaggatgttctgtttgtatctgcatagtgatttaatccttaccactaccctgggagtagatccgattataaccatcccctccccatggcctatgagaaaacaggcaccgagagggtacgggacaagtggaggagctgggatttgcacccaagcgcttcctctatgctcttagccatgatgctctgctgcctcaaaagaacggccagctagtgttagtaataataacatttaccgatttcatcgtttggggtttcatgtagtccttgcaacaaacctatgagctgggcccgtgattccagttttgcagagtggggagttggtcacagagctagtgagaccaggcctccagcccagttggtccgtctccagggcctcagctcagcaccacatccctgtactgcaagcctcagtggtcagcaccaggcgtcccatggggacttaagattccaaggcttttgagcactgctagaagtttggggtaagatcttttactttttttatattaaaaaaatatatttttttgagatggagtctcactctttcgcccaggctggagtacactggtgtggcctcggctcactgcaacctccacctcccgggttcaagagaacccggagagggagagcctcagcctcccgagtagctgggattacaggtgcccaccaccatgcccggctaatttttgtatttttagtagagatagagtttcaatccaggtgggagatggggtttcaccatgttggccaggctggtctccaactcctgacctcaggcaatccgcccacctcggcctcccaaagtgctggaattacagccactgcccggcctggggtaagctttcaatgttgtaactccctccagaacctcatggcctatgaagatggccaggtgggcctgggcccaggctctgaatggcctgctgcctctctcctggacacagcattcaacttcctggctggggctgggagtgcaaagatttgtttatttgtttcttttttattgagacagagtctcactctgtcgccctggctggagtgcagtggtgcaatctggggtcgatgcagcctctgcctcccgggttcaagtgattctcgtgcctcagcctgagtagctgggattacaggcatgcgccaccaggcctggctaatcttttttgcatttttggtagagatggggttttgccattttggccaggctggtcttgaactcttgacctccagtgatccacctgcctcagccccccaaagtgctgggattacaggtgtgagccaccactcccagcctgggagtgcaaggatttaaataaaatcttgtgaaagttcagtttggctccttcagggactcggccaggccggggggcagcacaggagacaggctgactcccctgtacagatggatggggaaacacaggcagagtagggacaggggacttacaccaggtcacacggggagcctgtggatgaggcagaggcaggacttgggcctgggtctctgcgctaaatgactcctgggcatcctgctgaactctctcccagaaggagattggcctcacataccccactgaccccttcctagcatgctttttgccagacccattgagactggctgaggactggttgccatagagatggcctgttaggcagttctacggtgcggatgggggatggggcaggatggggcaggacaccgatatgctaaatacctaccaacagttggttaggaccccgtcggtgcgaccagggcaggacgtgcggctccaggctccaggaaccagaacggggctgctcaagctgctgtcgaccgtctctcaggacaagcaggtgagggaggcccagtgaggacacttccagctgcctagagccaggtgggtcagggaggcctgggctggggaggcccttgagaagccacaagacctgagctgaggtccagatgaaactcagggaggcaggagtgggacagggaccacagggaggcctaagggccttgggagaagccgagggatgacgcccaggagtgactcccagggatgatggggccattcagggaacactgcggaaggagcaggtttcaggaaagatgaagaccaccttgatgaagaccaccttggtttctgccttggctgtagcaggtccagggcccagtgggacatttgggagtgcagtccagggcccagaggtggcctagcgcaatggtgacaaatctgggctccaccacttcccagctgtgtgacctcagttactcagcctctctgagcctcagctttctcctccacatgatggaggtgatagtgagtaccggcctcctagggtccttgggaaggttacgtgtgtttatgcatgaaagtcctgagcacacaataggtgctcagcaggtggcagctgttgctattttaatatgcagaacggaggtggtgctcggtcgggtttttttgtttgtttgtttttttgagatggagtttcactcttgttgcccaggctggagtgcaatgacacaatctcggctcactgcagcctccaactcctaggttcaagcgattgtcctgcctcagcctcccaagtagctaggattacaggcgcaggccaccacactcggctaattttttttgtatttttagtacagatggggtttcgccatgttggccaggctggtctcgaactcctggcctcaggtgatccgccccccttggcctcccaaagtgctggggttacaggtgtgagcaccacatccagccctgtttggttggtttttatggtaacgagggcccagagggacccagccaggcccagccaggtgcacagagggagcacccgggtgaggtgcaacacagtccaggaggctgctcaagctggctgctcctcccctactgtctctgcccagggctgcctggggagtggtgatggtgtgccaaatcaagacctgcagcagaggtctcagagctcaaggcagacagcaaagaaggaccgcaagcccaggggccagagcaagaaaggacagggctctgaagagtctgaagagtaagcagcagtgggatgggtcaggaggctgttgggggtcagggccctctgggggctggcgccgaccctgacccccaccctttccttcttcagtcacttcccgcttcttcctcggaaaccctccttccccttccagtgggcctgggagagcatcgccacagatgtccgggctgtgcttcagccaagctccccaacccctggccaccaagccctgcccatgccctcctcgttctcccagcgtcagtccaggcgcaagtccacggccaacctcccagaggcccatggctgctgctggaagacagaggcgcaaaacctgaaggcgagacagcagctgggagcctggggcggtgtctccatccctactggcaaaggggagctaggatcagagccccccagtggtctccagctgcctgggaggaggccaggatcaggatcggtgtccgacaagcaggtccagctgcaaagcctgggtgctgaggaggccgagaggggtctgagttctggggtgctgccccagcgccccaggagggggtcgatctcagaggaggagcaattttcagaggccacagaggaggctgaggagggagagcacaggactccctgcagaaggagggctggttgtcagagaaaggggcagatttctggagaggaagcctccgatgagggagaagtgcagggccagagccaggggagcagccccagcttcaacaacctccgaaggcgacaatggaggaagacaagggccaaggagctgcaggggccatgggacctggagaagctgcacaggcagctacagagagacctggactgtggtgagcgtggggctcagagcctggattcccccgaagctacaccgcagggaacagggagcagtcagggaggcaggggctcaggcaggctgggctgtgctctgggtgctggggggcgttgcctggtgggctgagagggagagggcagcccctgacttggtcccactgtgggcaggcccccaaaagctgccctggaagactttgagggctgccttccaggcctccaagcggaatggaaaggcctatgcctcgggatacgatgaaactttcgtgtctgccaacctccctaatcgcaccttccacaaacgacaggaagccaccaggtaagagggaagagaagggagtgggagcccagaatgagaagtagagatggagccacttctccaagagatgcttaggcatttgaactctcattcatttctttatttatccattcaccaaacttttggatcatccatccgtccatccatccatccatccatccatccatccacccacccatccatccatctatccaactactgataacatccactcaaccattcatccatctctctcaatacctggccaattatctattgatacaaccacttttatttcccatcttttgttccatccatccattaaattattaactaagtgattaatgcaacgtttattatctactcatgggcccttaggatataactattaaaagacttggaattagctgggcatggtgacacgtgcttgtagtcccagctactcaggaggctgaggtaggaggatctcttgagttcaggagatcaagactgcagtgagctatgatcccaccattgcattcagcatgggcaacagagtgagacactgtctctaaaaaagaagttaaggggccgggcgtggtggctcacgcctataatcctagcactttgggaggccaaggcgtgtggattgtctgagctcaagagttcgagaccagcctgggcaacatggcgaaaccctgtctctactgaaaatataaaaaattatccaagtatggtggtgtgtgcctggagtcccagctactcaggaggctgagacatgagaatcacttgaacctgggaggcggaggttgcagtgagctgagattgcagcactgcactccagcctgggtgacagagtgagactctgtctcaaacgaacaaacaaacgaacaaaaacccagcctggtcaacatagctagacccctgtctctacaaaggaaaaaaaaaagattagcctggcttggtggaaagtgtctgtagccccagctactccagaggctgagtcaggaggatctcttgagcccaggagatcaaggctgcagtgagccatgatgacatcactgaattttagtctggacaacagagcgagcctctgtttctaaagcaaaggagacagtgggagctgaaggggagactggaggctgtgaggagactgttggcaacactgaggtgaggaaccaagaggccctgtggatggagggaggggatccatttaagagacacttagaggctggttcaataggccatggtgactggtgacaggaggcatgtgagggcaggggagagttcattcagcattcttatagcaccccacaatttttttttttttttgagatggagtctcactctgttgcccaggctggagtgcagtggcacagtcttggctcactgcaacctccgactcccaggttcaagtgattctcctgcctcagcctcccaagtagctgggactacaggagcccaccaccacgcatggctaatttttgtatttttagtacagacggggttttactatgttggccaggctggtcttgaactcctgacctcgtgatctgcccgcctcggcctcccaaagtgctgggattataggcatgagccactgcgcccagccacaattctttttttaaaatttattttatgtaattgataaataaaaattgtatttatggtgtacacatgaggttttgaaatatgtttatattgttgaaggtctaaatcaaactaagtaacatatgcattacctcggttttttttttttttttttttggaaaaaaatttnnnnnnnnnnnnnnnnnnnnnnnnnnnnnnnnnnnnnnnnnnnnnnnnnnnnnnnnnnnnnnnnnnnnnnnnnnnnnnnnnnnnnnnnnnnnnnnnnnnnactccagcctgtgtaagaatgcgagactctgtctcaaaaagaaaacaagtctttctacgggtgtataggattagaggttgactttctccactcagctgcttgagtgacagagggcttctgttcgcctcagttgtctggtacaatcagattctcaataaatatgttgaatgagtgaatgaagtagtgtcagcatatacagaggcaagaaaaacctggtattggacgaatcgtgtagggcgcatggtagagaaatgagggagtaagatagacagggatgtgaacacaaaggaccctgtactgtagtctctgttaagaactgtagattgtcttgaggatagtagggagccatggatgtgagttgaggagtgagttgctcagatccgtattttgtaaacatcactggattgagaatttagtcaaaggtagtcaggactggagaccaggaaaccaggagggctataggccaggggagggctgatggtggcctgcaccaaggcagcagcagtgggattgagagaagtggacaggttggagaggtgttttggaggaggaatgaacagaactcagcacttgtatgagggtgggaagaaggaatggaggatgactccttgaattttggcttgagcagccagataggtagtgggtgtcatttctactgaaattgaggagtagggaagagaagcagatttggagcgggggtggggggagatagttcacttttggggttgtcaaggttgatggtaatggggaaatccagagtttggactggataaagccattgggagtcagtatctgggtggccagtgaagcccctgaaagactgtgacatgagaagagggggtcaggactagaacctgagaaatgcccttatgttagtagtaggcagagaaagatgttaccaaaaaaaggagacagagtaaccaaaaaggcaggaaaacctttgtgtcatgggaactttgggaagagagtattgttagaaggagggagcgatcagcagtcccacataccacaggagatcaagcaaaaccagaaccgaaaagaacccactagatttagaaacgaggaggctggtgaccttggggagcctggagaggttgggatccatggcccaggtggagagagaagcctttaagataaaggagaaggtaggatgcaggatgggaatgcaggaaaggaagagtttttttttggttttggtttggtttttttgagacaaagtcttgctccattgcccaggctggagtgcagtggcgcagtctcagctcactgcaagctctgcctcctgggttcaagcaattctcctacctcagcctcccgagtatctgggattacaggtgcgcaccaccgtgcctggctaatttttgtatttttagtagagacggggtttcaccatcttggccaggctggtcttgaacttctgacctcgtgatccatctgcctcggcctcccaaagtgctgggattacaggcatgacccaccatacccggcccagaccttgtctgttaaaaatgaaagaaaaaagtagagggcagagtggtgactacagcagtttggatgtcttgggtcaggaaaggaaggtgcacagaagaggcagggctctgagactggactcgggcagaggagctgctggggagcttgggtggaagaagctgctgttttctggtgtttcagcaggcccaggtgctggtgaggggccctcatttttgttcctgcagctggagccaacgatgctggcttcttggccctgtgttcagctcctgagccatgcttcttcttgttccagctgccagctccaaaactagctcaggcgatgcctcctcactcagcatcgaggagactaagtgagtactgtctcccttgtttctactttgtttttctaagagaggtggctctggggccagcacgggggaggctttctcacatgaaagtgtgctaatcagagttggaaagattgtttaaatcatcttagccaacagttgacttatagaagagaaaactaaaacctaagagtaaagtggcattcactggttagacgcagaccaggctggtgcccatgtttcctgctttggaggccagggcccttcccagtgtcctaggctgcctggggcagactttgtgtttgggaccactcactcccaccctgtttctcctcttgtctgtctggaaatgcacatggcaccctgtgtctttaatagcccctaacacttgtatctcttgttgtcagcaaactccgggcaaagttggggctgaaacccttggaggttaatgccatcaagaagggtgagtatggggctgaggatagggtttgggggaaagaggccatctgaaggggtctttgaagaaggtggggttagagggcaggttcagcactgtttagtggtcttacacatgcatatttgccggaaggcatgaggtccctccttgctggtataatggggatctggggctccgcctgctctctgagttggagctgtggccgtcgcatactcactctggctgtgagttgttagatggactggaagatgtgcacacttgctgcagactgcgctgtgcgggggtgggtttcttgtttttctttaaagcacgatttgaggggctttggaagccacagagggtcctgttgtgctgcatgggttggccaggagtgtggggacgaagtgggagcagggaggtgaaggattgttccttcctgtcctgaccccttctggccccctgagctggaagggggcagggtgagtggctccctcctctccccaccagccatgggcgggcatagcctcacgtctgggccccccttccagaggcgggcaccaaggaggagcccgtgacagctgatgtcatcaaccctatggccttgcgacagcgagaggagctgcgggagaagctggcggctgccaaggagaagcgcctgctgaaccaaaagctggggtgaggggtcctggccagggcaggcaagggaagggctggggaggccaccatccttggctgcctcttgagtggggtggggagcaggagctgggctccttgagcatcactttctcccctcttcaggaagataaagaccctaggagaggatgacccctggctggacgacactgcagcctggatcgagaggagccggcagctgcagaaggagaaggacctggcagagaagagggtgagcacctgggcagcatggggtggtcgcctagtgcttctggtggcctgacggcactgaggcgggggccaaccccagagaggtgagacggggcttggagaagggaagggccgtggtcggtagcatctactttggattctcagcagctttcctgcaaggcctgccctttttgcactccgcttggtagagccctgagtgttttctggtgatgctgagtggcctgaagtcctaggtcacccctccctgtcccgtaggccaagttactggaggagatggaccaagagtttggtgtcagcactctggtggaggaggagttcgggcagaggcggcaggtgaggctgcagcaggggtggtacaggggacactggtggccttgctaccggaatcccgaggttgggtgcgtggagggaggttcctgactcgccgattcttcccttaggacctgtacagtgcccgggacctgcagggcctcaccgtggagcatgccattgattccttccgagaaggggagacaatgattcttaccctcaaggacaaaggtaatgcgagctgggtgccctgggtgggggcacagcctctgctgagttgcggacaagtgtgaatggccactgctctgtgctgccctcaggcgtgctgcaggaggaggaggacgtgctggtgaacgtgaacctggtggataaggagcgggcagagaaaaatgtggagctgcggaagaagaagcctgactacctgccctatgccgaggacgagagcgtggacgacctggcgcaggcacggcctgggcaggctgggtggcgggggctgaggtggagaatgtcgggaatgggggctctgaggaggtggtggctcagtggcttttcaggagccagcctgggtcccaacctgtacctcttgccttgcagcaaaaacctcgctctatcctgtccaagtatgacgaagagcttgaaggggagcggccacattccttccgcttggagcagggcggcacggctgatggcctgcgggagcgggagctggaggagatccgggccaagctgcggctgcaggctcagtccctgagcacagtggggccccggctggcctccgaatacctcacgcctgaggagatggtgagccctcccgtgccttatactcggggtcaagattctccctccctctggggctcctgccctgcccgcaggcactgagaagacagggcgagtatttgtgttcacaaagcgcttggcctcgcgggtgagcactaaatggcaaccgggggaggcaccaggtgtggatgggtcagggctgctgagccagatgggccccagtctgtttcggctctgccatgctgccagctcgtgccttggataaaccatttaactgtgagcctggggcaccccatctggaatggcagtgacaggagccgcctcctgaggttgctgtgaggatgagtgacagcgtgggtgaggggtgactggagaggtgtgcgtggattctgtccacagggtgactgtgtgaacgtgaggtagacagctggcgcggtaggcgtcttcctcagtgggtaagagcaggactctggagccagactgcccagctctcccacctaggagctgggcaaccttggggaaggtacttaacctccctgtgccccagtttccctagctcaccagtggaattgagatagtaaccaccccacatgttgctcatgtgtgggaagcgctcaggacgctggctagcacagaggaacaccaaagaagtgttcaccctcgagggcttgtggcgacctgcctttctgtggcccccgctccatgtctcgcccctcttcccttaaggtgacctttaaaaagaccaagcggagggtgaagaaaatccgcaagaaggagaaggaggtagtagtgcgggcagatgacttgctgcctctcggggaccagactcaggatggggactttggttccaggtgggcttggacacggtggtggggcgagatggctgggctggggtggcctggggaccggtgctcaccagagaggcctccttccctcagactgcggggacggggtcgccgccgagtgtccgaagtggaggaggagaaggagcctgtgcctcagcccctgccgtcggacgacacccgagtggagaacatggacatcagtgatgagggtgagggcccggccagggggtgggaggggcagggacaggagccgcgggttggaggagatggtctgagcaggcatcccctgtgtttcccccagaggaaggtggagctccaccgcccggggtccccgcaggtgctggaggaggacgaggcggagctggagctgcagaagcagctggagaagggacgccggctgcgacagttacagcagctacagcagctgcgagacagtggcgagaaggtgaggctgggcatgggcagggtgactgcgtcagcagtcacctgtcctcacgagcacctgtgtcataggcgacagccacattcctgtctgaagcctcttttccatttgttttttgttttctgggtttgtttttttttttttttttgagacagagtttcgctctttcgcccaggctggaatgcagtggcgcagcctcagctcactgcaacctccgcctcccaggctcaagtgattcttattcctcagcctcctgagtagctgggattacaggcgcacgccaccagacccggctaatttttatatttttagtagagacggggtttcactatgttggccaggctggtctccaactcctgacctcatgatctgcctgcctctgcctccgaaaatgctaaaattacaggtgtgtgccaccgtgcccagccctctattctgtttaaagtcatgttttgcaaaaatttttagatgcctgctttagtaggggatcctttccttgcctctctcttctgtgcatgtttgttgaatgcctgctgtgagtagtgcattgttcttgggctgagaaggtcattggtgaacaggacagccatggggccctgggctcatggagctggctttctagagtgtgtgggggagagcgtggggagcagcagtgactgttaatgcaggaacggtaatttctgatggtggtgggagctgggcactcagtaaaccaagataacgtgccgggggttgggatcttagatgggagagtgcagggaagacctttccaaggtactagttcatctgagacttgagtcacacagaggagccagccttgcggggggttaggggtggcagcaggtggacaggctggcatttaggcagtagaccaaccagcaggtgtctcaggagaagtgaccttagagtgcctgagggccagggaggctggagcagagcagagagtgaggggtggcgtgagctgagatggagaggtagggggccaacgcagggggagccttgaccccatggtcgtcgctgccccagaggcacagtgggccgggcactgctcacatgttctgtgtttgttgattcattccatcctcccagcaacaccctatgaggaaggttctgtcatctccatcattccagaggccacacttttagccctaccccacacttctcacctaggaagaagccaagaaagcgtgtccaggagagggagcaagggagggaagcttctgatactactgggaggcaaagtggggacagttgcagtggattcaggacccggaggacaggggagttgaaaaagtgagggctgaacccgggacggaggccaggcttactgttgaagggctggagaggacgtatttgaggtttaagggcatatggtctctgttaggcaccttgaatgctgtgctgttatagggaaaacagccaagacagtctgtaagtgagtgggcgtggctgggttccagtaatactttatttctaagaacaggtgttgggacatagtttgcccggctaaaaaggaacagagaaatggagcaataggctgacagggctgttttatgactgaaatgaacataagggtttctagccccgtggatctcagcctgcctgcacattagactcacctaggaggttgtttttgttgttgttttaagaaacaaggtctcgctcggttgcccaggctggagtgcagtagtgcaatcatagttcactgcagccttgaactcctgggctcaagggatcctcctgcctcaggctctcaagtagctgagactacaggcgtgcgcctgtgggtctcagtgtgttgcccgggctggtctcaaattcctgagctcaaacgatcctctcgcctccacctcccaaagtgctggggttacaggcatgagccaccaggcctggtgtagcctagaaagtttttgttgttgtttgagacggagtctcgctctgtcaccaggctggagtgcagtggcgcgatctcggctcactgcaacctccatgtcccgggctcaagcaattctcctgcctcagcctcctgagtagctggaactacaggtgcatgccaccacgcccagctgatttttgtattttttagaagaaacagggtttcaccgtgttggtcaggctggtctcaaactcctcaccttgtgatccaccctcctcagcctcccaaagtgctggaattagaggcatgaaccaccacacccggccacctagaaggttttttaaacatatgagccacaccccacacactgtgcaggcaaaaaagtggaaagcctatcacagtgaacacctttgtcctctagagtcagtaattataaacattgttacagttcttttctttctcttctttttttcctgaccactgggagttgcagatatcatgacactgcatccttaacgacttcagtaggcatctggcgaaatcagggccttctcccgcatagccacactgccctaacaagcccataaatgctgtaaaacagcagctcgcatgccaacattttccagttatcccccaaaatgtctttttagttttttgttgtaagcagcatccaatcaagtttcccacccgcaaaggagccttttctgactaccggagattctagagtatgtgggagacacatttatgacggaagaagaaaaagatctcggcaggcggtgctggggcctagagtgcaagtggagggtgggcttgagtgaagccagctcgtgtcatcatttatttcaggagggaaggtggggagggcacagcagctgtgggtgaccttgtttaggggaagtcaaggcagcccatggccgattgttctggtgtttttccagtgaagaggtggcagaggtggtggtgcaaagagacgggagatgctgttctggagagtggagagcagatacacctgggagaagagcaggcctgccagtggcagtgtggatggtgggattcatgagctgaggagggggatggtgggattcatgagctgctgagggagggggatgtggattcatgagctgctgaggagggggatggtgggattcatgagctgaggagggggatggtgggattcatgagctgaggagggggatggtgggattcatgagctgaggagggggatggtgggattcatgagctgctgaggaggtggatggtgggattcaggagctgctgaggagggggatggtgggattcaggagctgaggagggggatggtgggattaatgccctgaagcagtggatggtgggattgaggattgggttttctagggaggagggacaaggcagttaagggtttcacaaaggagaggttctgttgatttccccctgagtctaaactgggtaatgagggacataacagagaatgatgggtgtgaggacagggcctggagtcgtgatgtggttgaagaattactggattgaagttaatacagtcaatgagctagaaagaaaggctggagagaacagaaaggatccttggaattgaggggttgttttgttttgtgatagtgtctcactttgtcacccaggctggggtgcagtgactctatctcagctcactgcaatttccacctcctaaaggtgctctgtccacatacagtcattgggggttagggcttcccgatatgaatttaggggttacacaattcctagataggacaatatattgtcaagatgtccatctcatgtagttcatttctaggttaaatgcaactccagtaaaaatcccaatagggattattttggaagctggaaaatgattctgaaattggataaagtaggggcattgtggcagtgtgggattgcataaggatagactaacagaacagagagaccagacagcggggccccgagacagaatcgtgtcccagtgggaagagtcgctcgtcagtgcagcgagtgggcgtgggacagtcagttatctatttggggaaaaaatgaaattgggtttatacctcacaccttgcagatagattaagaacttcaaagtaaaaacttcacatttcggaatcaaattaaggaaattacatttataactttttggtagaaaagattttttaagttgtcagcatagccaaggcaggagaattgcttgaggccaggaatttgagaccagcctggggcaacacagcaagaccaccccccctaccaaccccatctctaaaaatgtttttttaattagctgggcatggtagcatgtgtctgaagcctcagctacgccggaggctaaggcaggaggattgcttgaatctaggagttcgaggttatagtcagctatgatagactatagctgactatatcacagatagctatgatagcctgggtgatagaacaagatcctgtctcaaaaaaaaaaaaaaaccaagaaacccacaggttccatgggtgagtttcttcaagaaaccatgaagaaaaaagtgaacgtgtaactacatagaaattgagaacgtggccgggcgcgatggctcacgcctgtaatcccagcactttgggaggccaaggcgggcggatcacgaggtcaggagatgagaccatcctggtcaacacagtgaaaccctgtctctactaaaaaaaatacaaaaaaattaaccagacgtggtggcgggcacctgtagtcccagctactagggaggctgaggcaggagaatggtgtgaacccaggaggcggagcttgcagtgagccgagatcgcgccactgcactccagcctgggtgacagagcaagactccgtctcaaaaaaaaagaaattgagaacgtaagttttttgttttttgtttttttacaaaacataccatgaagaatataaaaaggcagaccaaaaagagaagatatttgcccatatataccaccaagaatgggttggtgtcaagagtatacaaacagacaaaacaaatcaacacaacaggaaaataggcgaaagatgtagataagacaggcagttcacagaagagaaagcctaactcaccaggaaaatacccggtgaatccagtttcaggagggatcacagaaaggtgaaccaaaacagtgaggcacctgccacctgccaacaattccgcagaaaggtccaagcctgacagtagcgagtaggagtaaaggacatggagcggccagagtcctcagccacgctactcacagccatgggcaggagtctaatcagatgagagggaatgtgtgcgtgcccggggcccaccccacacctctcccgagtgtgcccatgtgcaccaggagacattgtcagtgggcctgcagccgcagtacttgggacaaaaaaagtccatcctcagtgggctagagagccagatcaaggagcatccagctcacgggctgtgattccatagtggaaactgatgagctacagccgtgtgcatcagggttactctcaggggcacagatttttttacaaaacaaatcacagaagagtcatacagtgtgactcaggttatagaataattaatacacaacaaaataactgttcaggggcaggtccttatgtgctaaagccatgaagacaagccggtgagtcatgaccatggatggggaggggacactcaagtctgggcagggcattagtgatgctgccccagccccagggagagggacatgggtgtgtgtttagttaatgttttaaaaactatatcagccgctgggtgcggtggctcacacctgtaatatcagcactttgggaggcctaggcaggtggatcacaagatcaggagattgagaccatcctggctaacatggtgaaaccccctctctactaaaaaaaaaaaaaaaaaaaaaaaaaatttacccgaaattgggggggattgcctgtaacccnnnnnnnnnnnnnnnnnnnnnnnnnnnnnnnnnnnnnnnnnnnnnnnnnnnnnnnnnnnnnnnnnnnnnnnnnnnnnnnnnnnnnnnnnnnnnnnnnnnngcctcatcctctcccagaaacccaggaaaccttgtccctacccctcagaggagctggatcctgtacgccttctctgaaccactctcctgtcccagctctttgtctcatcacaacctgggagggtagcgtccccaggggtgggtaaggaggccccccatcttgggctgagctagggctagggccgtggggagggatagagacccacttgcaggccgagaatgagggcaacagtgggaacagctgccccatctccagccttggccaaccctggggaggggtcctgagcaggcagacttagcttgttgagcagagtgggaaggctttgctggggccacacatctcagagaaggccgagctgggttcctgcctccgctccctccagggccagcccaggagactggctgtgcccagcaggcccctctctgcagatgtcaacgagtgtctgaccatccctgaggcctgcaagggggaaatgaagtgcatcaaccactacgggggctacttgtgcctgccccgctccgctgccgtcatcaacgacctacacggcgagggacccccgccaccagtgcctcccgctcaacaccccaacccctgcccaccaggctatgagcccgacgatcaggacagctgtgtgggtgagtggggactgctctggtgcctggcttccagtcctctcaccaggcgtcttaaactcagacctcatgttcctccccagctcaaaagggccactggtgatgtccacaccctcatccagacactcatgttgtttaggacctgccgcaggtggccccagcttgtgtgccactgctccagccagctccgggcccctcccctcggttgctgcagagacactgcaggaagtctgccttccagtgtctgtcccctgggagccacaggccttggaggaaggacagtccaggaatcagtgttgctggggatgtttggacaggaccttatttcctgtgcaacccccaacatgtggttttagaggttaggggtgcctttcctgatggctccaggctggtgaactcttacgcgtgctgttgagagaaccgaatacaagtgttggaactatctgtcatgttgggtggtgtgcgggatcccaggcaggggctgagtggtgtctctcgcagatgtggacgagtgtgcccaggccctgcacgactgtcgccccagccaggactgccataacttgcctggctcctatcagtgcacctgccctgatggttaccgcaagatcgggcccgagtgtgtgggtgagtccaggaagcagcttctgtagtcccggctttgtgtccctggtctggcccttgccctagcacctgacccccattcaagccaggcttcacccccggcccctgccacctcaccctccgtcatcagacacagaggactgtagcggggagtgtttgggaggtgtcctggctgaccctgcctaattcagctcctcggacacaggattatgggtggtgaagccttgagtcccagccggctcgagcccacctgccctctgccctctgccctccgccctccttctcctgcctctatccctagacatagacgagtgccgctaccgctactgccagcaccgctgcgtgaacctgcctggctccttccgctgccagtgcgagccgggcttccagctggggcctaacaaccgctcctgtgttggtgaggctgggctgggccaggctcctgggtcctgggcagggaggtgtgaggtgggggcgctcccttcttgaccagcccaggtagagtggaggctctgggctcctcctccgctttcatccctcctgtttttcctggcacccccagatgtgaacgagtgtgacatgggggccccatgcgagcagcgctgcttcaactcctatgggaccttcctgtgtcgctgccaccagggctatgagctgcatcgggatggcttctcctgcagtggtgagagctccatccctgctgtgtactcctctgtggacccccaggccctagctatgccgtgcctcctgccacacagttctccatttgaggcctccgcctcctgtcactgtgcacccagctgcctcctgggtactcgaccccggctggctgtggagcactcccaggctagtgggggaggcacaaggagaggcagctacgtccttactgaagcctactggtgagactgaggatgtgggtgccacctgtcccacatatcaggctcacctgcatttacctgcatttgaattttgcactaggacaagtcactcctctctgagcctgtttcttcttctataaaatgggttgtcttgaggattaggtgagagtgtgatagatgggctccagcaagtctcaagctgcagtgctttaaagtgaatgaactgccacttaatgagaacctgccctcgtagtgtattccctgacacacttggcctccttcctctcaagaatcctaggaggtatgattttctccttcctctacaaaatgaggacattcatatctccctccacgtttgttgggaggattacataaaaataatcacaaagtcctgggtaaatggtgactttcatgattcagctaagagaggttaagtgacccgcccaagctcatacagccaggatgagatggggccagggctggatcccagacttcttacaccctgtaaactggcatgtaccccctatgttatgctttgctgcgggatgaggcctcactgctacctggcagcatgaggggaacaagagaaaggaaatgttctgcctgtgaagctcacagttagttggaggtgaccactgggtgctcaggttgactgtgggttgcaggaattgggcgttacagcacaagccagacccataagactcatctagtctaacacactcattttactgattgggaaaatgagattcccctagatcagctggtgggattcacacccaagcctctagattcccagtaacttatttagtgtttcttccagttctgggcagagagaagtctgtgagctgcggcagcctgggcaaactttctttgaaccctccatctcccggctgaacttgtggcttgtctcatccccctctgtcttcctacattcagtctaacatggggctgggccttcttgggaaatgtttgtgggactgaatggtgaggaatgcccttgacccggggtccccatccccatgcttcctcagatattgatgagtgtagctactccagctacctctgtcagtaccgctgcatcaacgagccaggccgtttctcctgccactgcccacagggttaccagctgctggccacacgcctctgccaaggtacaggttgcccgggtgggatgggcaggacggtgtcaggagctggcagcctgacgcccccgattccagcccctctcccctggcacagacattgatgagtgtgagtctggtgcgcaccagtgctccgaggcccaaacctgtgtcaacttccatgggggctaccgctgcgtggacaccaaccgctgcgtggagccctacatccaggtctctgagaagtgagtcaattcgatgccaggcccccacagaaactacgtctcccagggggctttggggctgactggcatctattcagaccagcgagtgcccctgagggatgatgggaatcatagtccttcatgaaaaccagtcacaggggtagaagggtccttttgggattccctccctttgtagggtaggagaaattggggggacgggcaaggagctcatttgtgtcccccacctcggggtctctagccgctgtctctgcccggcctccaaccctctatgtcgagagcagccttcatccattgtgcaccgctacatgaccatcacctcggagcggagcgtgcccgctgacgtgttccagatccaggcgacctccgtctaccccggtgcctacaatgcctttcagatccgtgctggaaactcgcagggggacttttacattagggtaaggtttctgcaaccctcaactgacatgcacaatctaaaactgaactccaggacgccttaagggggaactcggccaggctgctatgccccacccctcccccaaagccccgcccccggaggcggggtttctgcaggaagacgggggtactctaaatgcaattctaacggttaaatgcaattctaacgaagcactcggacacgggagtttgagtcctggtactggttttccatattgatctcagtttcttcacccacaaaccaagggaatggcgtgtgcagggccctggggtcagaaagtccactccttgctagtggatctgttaggtgggagggggccaggggcggctcacagtgagctgctcacagtgactggcagccgcatgcatgggtctcagcaggagaaggggtttgtctagtaccagcccttctctttctttttgaaattgaatgctctgaagggagtctgctcactttgggtcaccaaaggtcccaccagtcccaagagccacatgtggccttgaatcgtcagttagcctgggtcagacagagcaggctggagagggtgagaagagccccagcaggagatttctgagggcaggagcctgggtggggaggagagacatcgagggtgtcaaagagctgcatgagaggctggggtggcagcctggccagggctgttcctctgcctcacggccacggggcagggaggtgacgctggggcaggggcctagcacacaggctgacacaatatatatgtccccccacccactgccctgcagcaaatcaacaacgtcagcgccatgctggtcctcgcccggccggtgacgggcccccgggagtacgtgctggacctggagatggtcaccatgaattccctcatgagctaccgggccagctctgtactgaggctcaccgtctttgtaggggcctacaccttctgaggagcaggagggagccaccctccctgcagctaccctagctgaggagcctgttgtgaggggcagaatgagaaaggcaataaagggagaaagaaagtcctggtggctgaggtgggcgggtcacactgcaggaagcctcaggctggggcagggtggcacttgggggggcaggccaagttcacctaaatgggggtctctatatgttcaggcccaggggcccccattgacaggagctgggagctctgcaccacgagcttcagtcaccccgagaggagaggaggtaacgaggagggcggactccaggccccggcccagagatttggacttggctggcttgcaggggtcctaagaaactccactctggacagcgccaggaggccctgggttccattcctaactctgcctcaaactgtacatttggataagccctagtagttccctgggcctgtttttctataaaacgaggcaactggactgttagtggttttcaatcttttcttttaggaagttttatttatttttattatttttattttcccaatgagccctctgcactcctaaggaaattttatttgatgaggaccaactggtgacataaaatagattccaagctgcaatgccccactgactccatctccctgaccagggaattccaggtgctaagcagctttgtttaaaaaccactggaccagatggtatccctggttcctgcgtatttcacaaggtccccagggctaggcatcttctacatgacacatatggctgcaaacacttagattctaattgtaccccaaaagatgttgttaaaaggctggctagcctgggttgggggacagacgggggctgggggctgtttcacggcataagctcaggtcaaggggccgtagctgcagtagagctgggataaggtcctgctcagagcaggccccagattcctgcaggaagagaggcagcgagggtcacgccctgggcctagggcagccccagtccctgccactccctccaggttccgtctcttgccctcacctctgtagacgcccacacttaatggtgctcagcagtgtctcttgttccttgggggtggcacaggcatcataggcggccaggaggctggggggcaggggtttgagtttctgaggctgacagtggcccactctgggccagcaccatgaggggccaggcagaggggtcagcatgggatggaagagttgggacactgccccacttcctgagcttggcactcaaggccccatgccagccgggctgtcctccctccctgtgggaactctggggcaaaaccagcaaaggctccaaaccttcaccctcactccccttaatggcccaaccccttctccaggaagcctcttctccaccaggtgggacgtctccctccctcctgtggcctccactacctgggacactatgtgggcctgctggcttcctccccacttgacctccacgagcaccctgggatctgtctatctctggtctgcagagcccacacaaggccaggccccctccacgaagcatggattaaggtgaattccatgcatggagggcaggggctgaggacacctaagggccctttagggcctacctggcaggggtgctgtatcgatccaccagggctgctgccttctccccactcactccgcgcacctgcatcagctgccgggcaaacacttctcgcaccgactgggcctgggttcgggaaagggctggatcagtgggggtctgggccaggccatgtctgagaagctaggcagagacagtaccttattcttgatggctcctgcgttgaagtcactgaaggtgaggagtgagcagagagggtttggagaggtcatggcccctgattcagggttcccaggggttccccaggggcggctgcgtagggtgtggccctgagggaagaagggactgaggccaggctggagctcgaaggaacaactccagccagcccctgcccagtcctcagccttggggggccagcctgagaaatggggatctcacccaccttgcttcttttggggatgcacagggcccaggcaaggtgaattcnnnnnnnnnnnnnnnnnnnnnnnnnnnnnnnnnnnnnnnnnnnnnnnnnnnnnnnnnnnnnnnnnnnnnnnnnnnnnnnnnnnnnnnnnnnnnnnnnnnnttttttttttttttttttttttgagacagagtctccctctgtcgcccaggctggagtgcagtggcgcgatcttggctcactgcaatgccgcctcctgggttcacgccattctcctgcctcagcctcccgagtagctgggactacagaagcccgccaccacgcccggctaattttttgtatatttagtagagatggggtttcaccatgttagccaggatggtcttgatctcctgacctcgtgatccgcccgcctcagcctcccaaagtgctgggattacaggcgtgagccaccacacccggccacaacataatctttatcctggctgatgagtcaacttatttcaccaataaaatggtgaatgcttaccacgccatagcactagtaagatctgtaaatggtcagcatgatcatcgagaaaatgtttcagcttttccaaacaaacaaaaagccaagatagatttaatgtcatttcatatcaggaatcatcaaaaagtctgtcttggaagaactaccttggcatttatactgatggttcaaatcagtggttagctccataagaatttttactgttcttggaaagaaacaaaaccacaaacaaaaacttgatgttgtcacaacacactgctttcttcacagagaggcactggtgtcagaaactcttggagatgaaaagtaatgatggagcaaaacgtttgcctttattcaacaaagactcactcacttgaaaatgttttaaaaactggccaggcaggctgggcgcagtggctcatgcctgtaatcctagcactttgggaggccgaggtgggtggatcaggaggtcaggagatcaagaccatcctggctaacacggtgaaaccccatctctactaaaaatgcaaaaaattagccgggcgtggtggcgggcgcctgtagtcccagttacttgggaggctgaggcaggagaatggcgtgaacccgggaggcggagcttgcagtgagccgagatggcgccactgcactccagcctgggtaacagagcgagactccgtctcaaaaaaatatataaaataaaatttaaaaaatgtggccaggcaggctgggcgtggtggctcacgactgtaatcccagaactttgggaggctgaggcaggaggatcacctgaggtcaggagttcgagaccagtctggccaacatggtgaaaccctgtctctactaaaaatacaaaaattagctgggtgtggtggcgggtgcctctaatcccagctacttgggaggccaaggtgggagaatcgcttgatcctgggaggcggaggttgcagtgagccgacatggtgccactgcactccagcctgggcaacagtgctgggattacaggcgtgagccaccaagactggcaatatatttatttttaattttaaaaactaaaagaaaagccggcatggtggctcatgcctataatcctagaactttgggaggccgaggcaggtgaatcacttgaggctagtaatccgagaccagcccggccaatatagcaaaaccctagctctactaaaaatacaaaaacaaaaacaaaatgcagctgggcatggtggtgggagcctgtagtcccagctattcaggaggctgagacctgagaactgcttgatcccagaaggtggaggttatagtaagccaagatcgtgccactgcactccagcctgggtgacagagcaagactctgtctcgggaaaaaaaaaaaaaaaacttagaaaaactgaaatgaattaaaagcactgtataaaaacatagacaaggcattcttttttttttcctttttgagatagagtttcacttttgttgcccaggctggaatgcaatgatgcgatcttggctcactgcaacctctgcctcccaggttcaagttctcctgcctcagcctcccgagtagctgggattataggcatgagctactgtgcctggcctgagcacagccattttcttttcttttctttctttttttttttttttttttgagacggagtttcgttctgtcgcccaggctagagtgcagtgacacgatctcggctcacctcaacctccacctcccaggttcaagggattctcctgcctcagcctcccgagtagctgggactacaggcgcccgccactaggcctagctaatttttttgtatttttttggtagagacaggatttcaccgtgttagccaagatggtctccatctcctgacctcaagtgatccgtctgcctcggcctcccaaagtgctgggattacaggtgtgagccaccgcgcccggccaattgagcacagccattttctagcacacgcagacatctggtggtggagcactctgtatgggaccattgagaaagcatgggtctggccaggtaaagaggctgacacaatctacagcatgagtcatcccatctcatcaccgagggctgctgcaccgatggctctctgatgggcacttcatatggaaatcttcccaccctgtgactattttgagaagctggccacagtcctgtctcctaggccatcagattgccagttgtgctctttcaaagtctctgcagctggccagcctatcagatgctgctcaccagtccatgtaaatctgtaccttaggccacctttcctccacagaaagcatccacagatgtattgctccaaagttccacccactgggagaattttccttcaccactgtctgtaacctcaaactcctgagctcaagcaattctccctccccctttagcctcccaagtagctggtactacaggtatgcaccatcacacctggctaatttttaaaccttgtttttgtaaagactgggtctcactatgttgaccaggctggtgtgaaactcctgggctcaagtgatcctctcatctcagcctcctagaatgctgggattacaggcataaatcaccatgcttggcgctcttgtcttgtctgtctgtccctcccttccttccttccttccttccctccttttctttttgctttttttttttttttttttgacggagttttgctcttgttacccaggctggagtacaatgatgcagtctcggcttgctgcaacctccacctcccgggttcaagcaattctcctgcctcagcctcccaagtagctgggattacaggtgcccaccaccacgacccgctaattcttgtatttgtagtagagtcgaggtttcgccatgttggctgggctggtcttgaactcctgacctcaggtgatccacctgccttgtgctcccaaagtgctgagattacaggcgtgaaccaccaagcccagcctcttttctttttttaaaaaactgagtttcggccgggcacggtggctcacgcctgtaatcccagcactttgggaggccaaggtgggtggatcacgaggtcaggagatcgagaccatcctggctaacacggtgaaaccccgtctctactaaaaatacaaaaaaaaatagctgggcgtgatggcaggcgcctgtagtcccagctacgcgggaggctgaggcaggagaatggcgtgaacccgggaggcggagcttgcagtgagccaagattgcgccactgcactcccacctgggcgacagagcgagactccgtctcaaaaaaaaaacaaaaacaaaaactgagtttcactgtgttgcccaggctagagtgcagtggcgcaatcttggctcgctgcaacctctgcctcccaggttcaagcaattctcctgcctcagcctcccaagtagctgggattacaggcacctgccctgacgcccagcaaatctgacgcccagcaaatctttgtatttttagtagagacaggatttcaccatgttggccaggctggtctcgaactcctgacctcaagtaatctgcctgccttggcctcccaaagtgctgggattacaggcatgagccaccgtgcctggcccctccagtgttttcttaaatccaggctagaggtcagcaaactccttccacgaagtggtaaatgtcttaggctttggatgccatatgatcttattgcagttacccaactctgccagtgtagagcataaacagcattagacaagaagtaaatgcatgaatgtggctgtgttccaataaaactttatttacaaaaacaggtggtaagccagatttgcttgtagtttgctcatccctggtctagacagtcaacaaatcaataaaacctctgatgtataatgtttgttgatttgtagtgtaaatactctcacgatggctgatttcaggctatcaatgtaacaccaccaagtgctgtcctggaagagataggcagtaaataacacactactggctgggcacagtggctcacacctgtaatccagcattttgggaggccaacgcctgcagatcgcttgagctcaggagtttgagactagcctgggtaacatagtaagaccctgtctactaaaaaaaaagatttagcctgacagagtggcaccagggatgccaggctgaggtgggaggatcacctgagcccagggaggtcaagcctgcagtaagccaagatctcaccactgtactcatctgggcaacggaagtgaaaccctgtctcaaaaaaaaaaaaaaaaaaaagtaaattgtagtaaactaattagtaagtgatgagttttgagtatttatcatctttattacttatttattatttttttgagacgcagtctcactctgtcgcccaggctgtagtgcagtggtgcaatcttggctcactgcaacctccacctcccgggttcaagtgattctcctgcctcagcctcctgagtagctggtattataggcgcacgccaccatgcctggctaatttttgtatttttagtagagatggggcttcatcatgttggtcaggctggtctggaactcctgacctcgtgatccgctcgcctcggcctctcaaagtgctgggattacaggtgcgagccactgagcccggcctattgtctttattatttatacaatttatttaattgtaattttatacaatttaatttttttttctttttgcaccagagtcttgctctgtcgcccagcctggcgtgcagtggtatgatcttggctcactgtaacctccacctcccgggttcaagcaattctcctgcctcagcctcctgagtagctgggattacaggcacgtgccaccacgcccaactaagttttctatttttagtagagatgggatttcaccatgttggccaggctagtctcaaactcctgacctcaaatgatccacctgccttgacctcccaaagtgttgggattacaggcatgagccaccgcgcctgggctctcacttatctttcaaactcagctcattgacgctgcctccagaagtctttccaggtcgccagcatcaggcgaggtttccctcctctgggcccctcagaacccaatttcatgcctcaaagtgtcagcagctgtctggctctgagggcaagctgtctctcattcatctccatctcctcggagtaccttgctgtgttcattgtttccagtgttctttgatgaatgggttgacaagatggcggggagggtgtgaatgggacaatgggtaatgtggtgggcagatgagtgggtggagggacaggtgggtgactgactacacagcatgatgaaggtgtcaatgggtgggtggggggtggctacggggaagagcaggtgggtggagggggaggtgagttgtgagtggctggagggccagatgggtgagtgactggataaggaggtgggtggatggatgggtggatggtcgagtgggcgtatggggaggaatggggctgacaaatgggtgggtggagggatgggtggttaggaagataaacaaagccagaagcctctgcgctacaggcagacttgggctctttctcatatctggaaaaggagacctcctggaaatgcaggtctgcagtcatataaattttgtggggaggaggcaggcaagaagagcctctgggtggttctggggtgcagtaggcccagccagcaggtcaggcccagcccctgtctctgcgacccccctgaccagccggaagagagaagaagctcctgttccattacgcagctggtggcaagcgtggagcaggagcagcagaagttccgctcccaggcagccgtcatcgatgagattgtggacaccacatttgaggtgaaccaggcaggagcgggaaggggccggcgaggggaaccccaggggcttgtagccagaaatggctccaagtaactcccatggggatcggggaaggcaaagtctggctcattcacccaccagtgccccactcacccctgcaggctggagaagaggacttcaggaattgaccccaggaggacaccagatacagacttcagcccctggcagtctgcccacctgggtgcactgggacgggtccccagatctgctggaatgattgtccgggccctgcagagcaggggccccaacagagtttttaaaccccaggaggctccatgtcctcactgactaggccaaggcgcagggaagggaattggtgcacacacacgaacgagtgtgtgcccgtgttgcatgtgaaaggagctgctcttggatcccctccagccctaccagcgcccgcatgctagctcagcccagcagggcattagcagcagctggagggatgaagcagaacgtgggctgagctcaggtgccgggagggccgaggaggcagtaaccctgctttggggaggaaggcccatctggcccaagagtcaggagaaaaagaataggcctgaacaccccagggttaccagggcctgggggcccaataggctctaggaatggggactcagagcccaggaactcaatcctaccaggaccctcagctccagtagaagagcaccaaccggatggggatatcatgaacccagaggtcggaggtcattgccatatcctgccctttctggggtcagactctagaaccccactgaggggaggtggagttggggctgctcaagtccttctggcctcagggcaaggggcgggcagggatgtgtggaggaccctgctgctgggagagggaagcagggaatgaggctgaaggctgcgccccattgcctgctctaggacttagatgacctccccgactgatagcctgagcctaggctggatgtccagagcccctgtccccatggctgggggtgacagtgggacactggcctatgctgggtgctggagacctagcactgagtcaagttcaagcctcgccctggccccaggggtctctccttaagtggagggttttccattatctacaacagccatctcacctctagtagaggcgaatccagggtgcagttcaggccggagggagtcaggagcgggagctgaagggcaatagttttttgccaaccctcccatctctggaccagaccagtcagtgctggagcttccagggtcccaggacagaagaagcacctcccctccctggtctggcggaaggcactggctggcccagggcccagggcccaggaatagactatgcggaggaaatgccatctgggatttgggcacagattccaggggcggagaggtcaccgggcaggcgtctctgggccttgcttctctccaccacctcacacattcattcaacaggcatttcctgccacccaccctgtgcctgccccatgctgggagtccctgcttggtggcacatgggagcccttccaagcagcaggccccgcacacaccctgggctgtctgagctgccacatctgacaagcttgagcagaagcagggctggatgttgtctcctgggtccccagctcctgtcaaatgccacccctcagcttctcactcccaggtgggacccagggtctacttcccgtttccccgtctctaccccaatctggcctccaaaggccgacagcagggcctgggagctggggctgctgcttattaggccccagccttgggcaggggaccaggcaggcacaagcagggtgtgaggccttgtcagaaaggaaggaccgtgggatgctctccgcagccactgcagtgctgcctgcctgggcctgatggtgcctatacctagcacccccaaggcccatatcccaagtgtgggtgtgtgcttgtgcatctgaggaacctctgggtgtggcatgtgggtccttgggttgtgtttgagttttgtgtgtacatctccaggttgtttctctaggatgtgttgcttctgtgctcatgagttgctaggctgtgtttctctgggtatgcatgtgatatctgccagcatctgagtgtgtgctctgggtgtctgtgtgtgtatgtctggtgtgttgtgctttgggtgtgtgcgtgtgtatatgtatgggggggtatgaattgcagccacaaattcagatgtgcaaatgttgcaatgctgttttcttcttctttttttatttttaatttttttgagatggagtctcgctctgtctcccagactggagtgcagtggcgcaatctcggctcactgcaacctctgcctcctggattcaagcgattctcctacctcagcttcctgagtagctgagattacaggcacctgccaccacacccagataatttttgtattcttggttgagatggggtttcaccatgttggccaggctggttttttttttttggttttttttttnnnnnnnnnnnnnnnnnnnnnnnnnnnnnnnnnnnnnnnnnnnnnnnnnnnnnnnnnnnnnnnnnnnnnnnnnnnnnnnnnnnnnnnnnnnnnnnnnnnnactgggcacttaatagagatttgtttagtaactttatgtgatcacaggacgatgaggaaatggcagcataagatgtaatggctgcactccctctggctgtgagtagaaattagactggagggcctggggtggaaacagtggcctgtcatccaggaagtgggaggggaggggaagggaggggaagggagggcaggggagaggtctgagcctgggcccaccaccattcagaggtcaagagaggtcagggagatgtggccatggagacaagaccacagcccacggtggggaagaagattgccaagagaggccgggcgcggtggctcacgcctgtaatcccagcactttaggaggatgaggcggcggatcacaaggtcagaagatcgagaccatcctggctcatacggtgaaaccccgtctctagtaaaaataaaaaaaattagccatgcgtggtggcgggcgcctgtagtcccagctactcgggaggctgaggcaggagaatggtgtggacccgggaggcggagcttgtagtgagccgagatggcgccactgcactccagcctgggtgagagtgcgagactccgtctcaaaaaaaaaaaaagattgccaagagagtgagggcccccatccaagtgaagaaagtgtttcaaagaggaggcaagcgaccaactatgacaagagccactgagaggtcaaggcgagcccaaatgagaacaactgaatcgcctggacccattctccaaggactcattgtgggaggcttattacaggctttggctgtgcgaatgcggctgagattggccttcaccacatcacaccgcaggccccatctgaaactgttcttttgcagctaaagtctaggaaaaaatttctttccactgaagaagttttctccgggaaaaaaaaaaaaagttttttgctttggctgccagaaagctcagaactaaatttgatattgaattaataaagcacttttacaggcctttatgggttgcatatttatatatgtatgctattgtttctgatctttattttctcttttaattatattttattattttatttaaaaaattttttaataatttttttagagacagggtctcactatgttgcctaggctggtatcaaactcctggcctcaagtgatcctcctgccttggcctcccaaagtgctgggattatggtgtgagccatcccatgtggcctaaattttttttttttttttttttttcagatagagtttcgctttgtcaccaggctggagtgcagtggcacgatcttggctcactacaacctccatctcccgagttcaagagattctgctgcctcagcctcccgagtacctggggctgcaggcgtgcaccaccacacccagctaatttttgtatttttagtagagacagggtttcaccatgttggtcaggatggtctcgatctcttgacctcgtgatccgccctcctcagcctcccaaagtgctgggattacaggcatgagccaccacacccggcctaaaattttttgtttttagagataagatcttgctatgttgcccagtctggactcacattcctggtctcaagtgatcctccctcctcgggcctccagagtagctgggagtgcaccactggtagcacgggtgtataccactgcacccatccacattcttgaatctccatttctgttttttaaattttaccttccttgttcttgttggaagccacctcaggtgcactgggaatgtggtttgcaaattaatcaatggtatttcatttattcggcaagcatacaatgatgtcttgtagtagtcaggtctctctagcatacaattggcctaaatacattattaaagataaaaataaatgtcttcacccattctctgttgcttataacagaaaacctggaactgggtaatttatttaaaaaacggagtcttgctctatcgcccaggctggagtgcagtggtgcgatctcggctcactacaacctccactgcccaggttctcgcaattctgcagcctcagcctcctgagtagctgggattacaggcacccaccaccacatccagctaatttttgtatttttagtagagatggggttttgccatgttggccaggcttgtcttgaactcctgatcccaggtgatctgcctgcctcagcgttccaaagtcctgggattacaggcgtgagcgattgcacccggccacatgtgctgtcttgagtctcacggccacccctgaccaatggccgtggggagggtatcttgaccagcggtcctggaggtgccacctggttggagtggggtgggcgtcagttctctagggatacggatatgatttggggtggcctgaaggaagaagggcagggcagacccatgcacaaaaacatgcccaccacgtacctaccacgtgccaggccctgtgagacatcctggagacacagacgtgaatccgacaggccctgtgtccccaagaggggcgctttccagaagtggaggtgaaacctgcaagcacagttatcccagccagagcatgggaagaaacttggagaggggacaggtgaaggacttggggagttcaaaggatgaggagggactctaggttctggccttgaggaagtaaggtgaactgaaattgccctttttctacaaacagctaagaaactggacaaagcacaggaaacaagtgttttcagatattagacaaagggcagctcagggctgtgatccctgaaaaacggaagataaaggggaggagccctgacattgcataggtgattttcctaccactgcactgggagggcaaccgttgttctcaccgagttaagaagacgagaccagagtttgggaaggctcatcttcagggcttctgatctaactgaagacaggcccagatatgggtattttaaagttccccagggtcggccgggcacagtggctcaggcctgtaatcccagcactttgggaggccgaggcgggtggatcacttaaggtcaggagtttgagaccagcctggtcaacatggtgagaacttgtctctactaaaaatacaaaaaattgccaggcgtggtggcgagtagcctccccagctactggggagactgaggcagaaaggagaatcacttgaacctgggaggcagaggttgcagtgagccaagatcgcgccacttcactccagtctgggagacagaatgagaccctgtctcaaaaaaaaaaaaaagaaaaaaagaaaaaaaagctccccagggttctaagatgtagccagggttgagaaccactaggctaatctgcaactccagacaaaggcggaaggggggcagggaacccacaaaacagaaaccaaactctaagaaaacgggtaagaggaaagtgaaaccgactctgggcaccaggctggaatggaagagcatctgtggcaaaaaacagggcagccgcacccccctggaggaaccagggccctgcccacccacttgcttgctgcggcttcaacacgctggcctcctcggggtcccctctccccactacccctggagaggcgtgaatgtacctatttgtttaccatcagtctgctgccccttcccccaactggactgagctagggagcagaggctctgtgtgttttctctgagttcaccttccccaagcccagagcagggcccggcacagagtaggtactcagcaaatatttcttgagtgactgaatgaagacaatgtatgatcccatgaatcctgcagggccatgctttaccctgccctatgtgatgctgtcccctgaggttgggcccattctgacaatgtcttttctgttttttcaacacagggtgcatagaatcaagcagacatgcgccttagtttggggcactccatgcagccatagggccctgaaaagcttcccttttcttttcttttttgtttgtttgtttgtttgtttgagatggagtttcgttcctgttgcccaggttggagtcccatggcacgatcttggctcaccgcaacctccgcctcccgggttcaagcaattctcctgcctcagcctcccgagtagctgggattacaggcatgcgccaccatgtccggctaattttgtatttttagtagagatggggtgtctccatgatggtcaggctggtctggaactcccaacctcaggtgatccgcccaccttggctgcccaaagtgctgggattacaggcttgagccaccacacccagcctaaagcttcccctttcaatggactctccccttccctgcatcccagtcctactcctgctgctttgagccacgacatccccttgtctgtttagtacatgcccttccaatctgctttccaggatcttatttccataaatgtccataacagcaggcaccatttattgggtgcttactgtatgccaggcactgtgctgagcgacttacatatcatatctcatgaaaccatcacatgtccctgaaggaggtgctattatgatccccgttttacagattagaaaatagagataggctgggcaaggtggctcacgcctgtaatcccagcactttggggggccgaggcgggcggatcacctgaagtcaggagtttgaaaccagcctgaccaacatgaagaaaccctgtctctactaaaaacaatacaaaattagccgggtgtggtggcgtatgcctgtaatcccagctactcgggaggctgaagcaggagaatcgcttgaacctgagaggcggaggttgtggtgagccgagatagcaccactgctctccagcctgggtgacaagagagaaactccgcctcaaaaaaagaaaagaaaacagaggtagaggccaggtggggtggctcatgcctgttatcccagcactttgggaagctgaggagggtggatcacttgaggtcaggagtttgagaccagcctgggcaacaaagtgagatcccatgtctcaaaaaatatatatatacatatatatatgtgtgtacatatatatacacacacatacacacacacacatatatatacacacatatataggcacacacatatacatataaaaatacatatatttgtgtatatagagacatatacatatatatttgtatctatacggtctcgtccatgttctggagccgagcatccctgcaacttggaaggaatggcctcaggtgtggcgggataggttgttaacttcacctctccatgccctgttccacacacacacctgtgtttaagtccagacccaccctaatcaaaggccctgtaccaaaaaggggagggaccagacccgtggtggagggtctggatcacaagtaccattcccttgcctttcttttatttatttataaaagaaaacaggccaggcacggtggctcatgcctgtaatcccagcactttgggaggccgaggctgacggatcacttgagatcaggaatttgagaccagcctggccaacatggctaaaccctgtctctactaaaaacacaaaaattagccgggcatggcggcacgcacctgtagtcccagctactcaggaggttgaggcaggagaatcgcttgaacctgggaggtggaggttgcagtgagccaagactgctccactgcactccagcctgggcgacagagagagagattgtctcaaaaaaatgaaaagaaaaagaaaaaagaaaacagaggtagagacagcttaaagtcacttgtccaaggtaacagagtaagtggcagaaatgccgtataaaggattctcatgtatgtctgcgttttttgtttcttgttctctatttgactatttgtcactcagcactctgcatttaagctctatccctgttgccttctgcccaggcagttctccattgatggacactgatttttctgccacctcaaaccatgcctaggacacatctctctgcttgtgagaggtttaacccaggagtggacctgccaggggacacacaactgccaaaatgccctttcaaacatccccactaacttacatgcctaccaaatgccagaattccattcactggcatcctcactagcaacaggttttatccggttttcagttttatctgatgggcattgtgtgggatcctgtttttctttgcagctctctgattactggcaaaaatcttagtccttattccattttttaaaacgacatttgaacacacaataggaaaaatgggatttcagaatagaaatagttcactctgatgatgggaggtggcagtcacatagccctgtcactctccggatacaaggagccccccgagaaagtccagacccactctcatcaaaggccctgcaccaaagaggggagggaccaggcccctggtagattgtccagagcacgggtgccagtcccctgcctcagggcccatagcctaattgagtgggaatttggtcgtgtctatgtcctggagccaagtgtccctgctccagagaaagggatggccctcgggtgtgtattgggggttaagctgttaactccacctctccaagtcctggacgacatacatgcctagaccaaacccctgcctacctctgggccactatgtcacttctagagcctcagtctcctcatccataaggtgggggtatgaggacatctctcctagaggagggctcgggggtgcagggaaactgatggtggcctcacacctgacaagcacagagcaacgtgctgctgcaacgcctcctgcctcccatcaaccacgggggaggcatccgcagacctatttcatggctgtggagggcaaagcccagagagggaaaggggaaatcaagagatcccatagcacgtcagctccctgaccaggccagggatgaggctgggagaggacgagcaggttcactcagtcattcaactctccttccccttctgcctccttccccagcctctggggccccaggtccagcagcacccagggcaggggtgtggtaggtgccccatgcttcttccttctccctttgcaccaagcttctcaggcccaaggggctgtcagtgccacaaggacacctcccagctaaggtgggctgagtccagagctggtggcccctgagtcaggccctgggtggtggctgacgcagtgggagcagaggagaccacagggaaactgacagattaaatccaattctcccagactttgcccttgctgttccctctccctggagccctctccccacggaaggctgtgagcccgcccactccatgctcactgtcaccagagtcttgcctgaactcagttaagaatgctggccccccaaagctgggtgttgtggctcatgcctgtaatcccagcactttgggaggccgaggcaggtggatcacaaagtcaggagttcgagaccagcctggccaatatggtgaaactctgtctctactaaaaatacaaaaaaattagctgggcgtggtggctggcgcctttaatcccagctactcggaaggctgaggcaggagaatcgcttgaaaatgggaggcaggggttgcagtgagccgagattgcgccaccacactccagcctgggcaataagagtgagactccatctcaaaaacaaaataaaacaaagtgctgaggtcacaggcatgagctactcaattttctttcctggttatgggtctactgaagttttgatatttttgtgccaattttgacatttcacattcttccagaaaggtatttactttgcttaagtttctatatttaccaacatacaattatttgtaatgttttttggtattttgatattttatgttatttggaaatggggttttgctatgttgctcagactggactcaaattcctgggctagaacgatcctattgagtagctgggactacaggtgtgtgccactgtgcccaggttggtattttgatattttaaacctccatggggggctgggcacggtggctcacacctgtaatcctagcactttaggatgccgagttgggcagatcgcttgaggtcagaggtttgagatcagcctggccaacatggtgaaaccccgtctctactaaaaaaatacaaaacaattagccaagtatggtggcacacacctgtagtcccagctactcggaaggctgaggctcaagaatcacttgaacccgggaggcagaggttgcagcaagctgagatcgcgtcattgtattccagcctgggcgacagagtgagactccgcctcaaaaaaataaataaataaacctccatgggggggtgctcaagagtcagatcacgtggggcctgggagccagggaaaggattctgggtttgtcctaaggatgaacagcgtgcaagaatatttgactgaggctctagaatggaatggatatgaaatgccaaagtgaagtgcttgctcctggccaaattgcaaaattttaaagaaagcagaaacccatgttgccactgtcgaagcccctcatccaccgcaagagtataaagggatcgagggtggatttgaaaggggcagtttgcggtgatttgatttggaaagagctgctatggcagtgagtctgcagggggtggagctggggagctgccttctaacctcaaatctggtgagaagtgcttcaaggaagccccccagagcgcttgaggtgggcttcctgcagtcatggcacccccgtgggtcattggtaggaaaggcctccagaaaggaggtgacctgcagtgggcactggaccgcaggaatggaaaaaggggtctggccccacgggcttgttttctctggcacagggtatgcaacagagtggggtagtgcatgccacttgaaagaaaaccagagccagtcaacagagaggggctgcccctttgccaggagtttcagtcaagggggtagtacataagggagcccataaaacccctgagggcaggagccagctttagacagctgccacccaaggagtgagatgccatcttacaccagtgtcaatccaggatgcactctctgcacccactgccctccctccctgttctccaaaggcagcgtcttctcaagcctgggaatggggccagggagaggcgcagacccgacttccctgactccttatcagtgggggcctgcaatggccagaagtggaaaaagctgtgttcgttttttttgtttgtttgtttgtttgtttgttttgagacaagctctcgctctgttgcccaggcttgagtgcagtggtgctatcttgggtccctgcagcctcaaactcaagcgatccctgcagcctcagcctcacgaccagctgggactacaggtgcgtactaccacgcccagcccaagaatacttcattctaaatcaagttctgggatttggccactacacaaaactgggcactttaatagagatttgtttagtaactttaggtgatcacaggacgatgaggaaatggcagcataagatgtaatggctgcactccctctggctgtgagtagaaattagactggagggcctggggtggaaacagtggcctgtcatccaggaagtgggaggcgaggggaagggagggnnnnnnnnnnnnnnnnnnnnnnnnnnnnnnnnnnnnnnnnnnnnnnnnnnnnnnnnnnnnnnnnnnnnnnnnnnnnnnnnnnnnnnnnnnnnnnnnnnnnggcccggccaccgaggcctgcctcaagctggccatgcccgaggtccagtactcgaactacctgttgcgcaagcagaagcgccggggcggtgcgcgggctcggcccgagcccgtcctggacaatcccccgcctcggcccatccgagtgctgcctcgcggccctcaaggtccctgagctccgcaggcctccaggagtatgggtcctgccctgccctcccaggagtccagccaggggctgcctccatgtcctgcccccatgagagccctttcttttcaaggggcttgagtccctcgctgaactttggggtacgcctccctatctgagcccccgctcccgatcgtgggctgaaccttgccttcgggcacggcgctgataggctggatccagcgctgggccaccctctccttcccagctggttggtgattttgacaagaggcctgagggctgtccagaactgctcaccctgcctttttctgggggctgagcccccacaacctgtcttttccaagtggataagcccaggccccatggagagaggctcagccctagggaaaggctgctcttgctctccctcccagggcttgaggctccctatacttttctgtcttccaggttctaccctccccacagacctaagctgctcccagtctcccagaaccaagagttcttgggttgggatttttgtttggttggtttttcttttttttaataaaacatctttaaaatgtgcgagttgtatgtcagtcatagaagccggattccccacatttgaggatgaaacggatgcccaggaggagctgtggctggacccatgaggatgggggcctggactcaaggtcccccgccacctggcataggcctacaaccctcctcaaccgcttgaccgactgggcccccaacacagactggccaccttagccccactcactttccacatcgttctttttcacaaaattctgcgacatttactgagcatcatctctgtaacttggggatacaggtgaaccagatagatagggccttattttcatggagcttatggggaaacattggaacaggagcaagacaggtaagcaaagaggaaggactggaggggttagagcacaacacctctttgggtggaaggaggatcattttcagataaggagctgcctaactcagaatttgacctcctcctgtgaatcactgacttcactaatggcctgctttcctcacaagaagacaacttggactcagatgaagaccagtccctttctgcagtttcctttaacacagcaagatagccagcacttccaggtgaaatctcccttaagactagcagagaattggaactttttctgttactttcttcagagctatatcgacgtatctggacaagtgataaaaaacaatagctattatggtctacggtgtgccagccactgtttaagggctttatgtatgttaactttggagatgggtgccgttttccaggtgagggaactgaaacttgggggaaattaagtcagggtcacacagccagaaagtggccactaggatctcaaccaaggcagtgtggcttcagagtttgtgctcacaagtgctgtctgtagtgccattcaaataaaaaaggtcacatgccacaagctaggctgattcccagcaccttcccccaaaagaatgtaaagggaagaaccaggacactgctatcagcaactctttatccagtttttcatggagacaacggttgacctgtttggacaatggacattacagtgattgattggcaggatgcatgacacgctgggcttgaaaagggactgtttgtatggcaccccactttttaccagcagagctctgaaaaaggcaataattagaatcatgcaaaagcataattaagtttctgacattaagcagcagtaaagaattgtaccagactcaaagtgatctatccaaaaacaggtgtcctctggcccccagccaataaggtgcttgccattgtctccatctgcacccccagccctagcctctggtcatacctctgccaggaaaatccttcaccttgccctcagttggcctggaaaattcagacgtgcctttaagtctactttttttttttctagacagtctcactctgtcacccagtctggagtgcagtggtgcaatctcggctcactgcaacctccacctcctgggttcaagtgattctcctgcctcagcctcctaagtagctgggattacaggtgtctaccaccacgcctggctaatttttgtatttttagtagagccggggattggccatgttggacaggctggtctcaaactcctgacctcaggtgatctgcccaccttggcctcctaaagtgctgggattacaggcgtgagccaccatgcccggccaagtctactttgataagtgtcctagttcattatgtgttgccataaaggagtgactgaggctgggtaaagaaaaaggtttatttgactcaatcctgatgactagaaagttcaggattggtatctgtatctggcgagggtctcaggctgcttccgctcgggagcccaagtatgcagagaccacagggtgagagaggaagcaagggggtcagaggaggtgccaggtctttttaacaaccagctcttggaactaagagtgaaaaaactcacttatcccccaggaagggcattaatcttttcatgaggaatccatacccatgagccaaacacctcccccaattaggcccacctccaacattggggatcaaatgtcaacatgaggtttaagggacaaacagccaaaccactgcaataggcctcccctggcctccctggccctcaggcaggcgggccctcctttaaaaaccttgccctgcttcagcagagagcacaactctggcctcagaaaaatctggaatcaggggcaaatggaatcatcaggcactaggagagggtgctctgtttgactcaggggcaagggcaaatcctaaagctgagcaggggctctggaactctttggtgggaacatctccagcttcagccacaagccaggggaacaggcctcagcccctaggactcctgcaaagaggctccttccaccaacaaacacttggtgctgcctacctctgtgcctactccgaacagtgccagagctttggcagtgagtgaaaagtggtccctgccttgaggagcttaccctaaggtctagagacgatgtggaggcagtaaacctggccaacggtgactcgatggggatgatcttgcctaatgattaaacactggggctctggagttcaaaccctggctctgccatctaccagttacatactttgaacttagcctttgagcctcactttcctcacctgtgaaataagcaggcccctagtacagggcctggcacacagaggctctcccaagatggcatctctggtttcatcaggactcctccagggtcaacacctttcatgttacagatgctatagtttgacacatctattacaagagtttatcagcagatggaagaaagcattttgaggaaggggtgatttcttctactttccccacagccatggtatgggctatgagcagccttgatttttttttttttttttgagacagggtctcactgtgttgcccaggctggagtgcagtggcatgatcatagctcacggcagcctcgaactcaagtgatcctcccatctcagcctcccaagtagctgggactataggctcatgccaccatacccagctaattatttactcttttttgtagagacagggttctcagtatgttgctcaggctggtctcaaactcctggactcaagtgatcctcccgcctcagcctcccaaattgctaggattacaggtgtgagccgctgcactcagccttgtcattcttttctttgaataaatgtgacttttgaggcaaaaaaaaaaaaaaggaacaatgaacatttaagacactttttttctttgggtgggggtgcgctcttgccccagatgccatctgttctctcaaaaaacatttatccatttctcctgatcccagctgaattcctctgagaatgattcaaaaggccatactgtgtcagtcagtctcatttgctgggccaaatcaggaggagattttaaaataatttttctaaaacttgggattgttttgcctgggatgctggcataagtggaatgtccagagatgaccagcagcggaggccaggctgtccccagagctgaggaagtcactgtctctgtccatctgcagccgtggcatgtaaggacagctctcttgttggtgatggggagccactgaggtaagcaggagaaaggcctttagtaacaagctgcatggccaggtgcagtagctcatgcctgtaatcccagcactttgggaggccaagtgggggtggatcacttgaaatcaggaatttgagaccagcctggccaacatggtgaaaccccatctctactaaaatacaaaattagctgggtgtggttgtgcatgcctgtaatcccagctactcaggaggctaaggcaggagaatgccttgaacccaggaagcagaggttgcagacagccgagattgtgccactgcactccagcctgggtgacagagagagactccatccaaaaataaaagctgcaaatgccactgagagaaggcacgttaataagaacaatgctactaacttttactgagcacttactctattaggctgtttttgcattgctatgaagaaatacgtgagtctgggtaattaaagaaaacaggtttgattggggctgggcacggtggctcacgcctgtaatcccagcactttgggaggccgaggcgggtggatcacgaggtcaggagatcaagaccatcctggctaacacagtgaaaccccgtctctattaaaaatacaaaaaaattagccaggcatggtggcaggcacctgtagtcccagctactcgggaggctgaggcaggagaatgccgtgaacccaggaggtggagcttgcagtgagctgagatcagccactgcactccagcctgggctacgaagtggaaaagaaaaagaaaagaaaagaaaatagttttgattggctcccagttctgcaggctgtacaggcatggtgctgacatctgctcggcttctgaggaggcctcagtaagcttacaattgtgtgaaaggtgaagtggaagcaagcatatcacatgccagaagcaggaacaaggtcaatgccctctgaggggaggtgccacacactttcaaacaaccagatcactgtgaactcagagcaagaactcgccgatcaccaaggggatggcaccaagccattaatgagggatctacccccatgatccaaacatctcccaccaggccccacctccagcactggagatcacatttcaacatgagatctgggcgggtggggggacacacagccaaaccatatcacttactatatgctaggtcagtggtccccaatgtttttggcaccaggactggctttgtggaagagaatttgtccgtggtgtgaggggttaagggggatggttttgggatgaaactgttccacctcagatcatcaggcattagattttcataaggagtgcacaacctaaatcccccgcacatgcagttcacaatagggggttcacactcctaagagaatctaatggtgatctgacaggaggcagagctcaggtggtaacgtccatggcctgggggttggggacccctgtgctaggtgctcttctctacactttatgtattttaacttattcgatttttttttttttttttggaaatggatttgcgctctgtcacccaggtgggagtgcagtggcacgatctcggctcactgcaacctctgcctcctgggttcaagcgattctcctgcctcagcctcccaagtagctgggattacaggggtgcaccaccacgcccagctaatttttgtatttttttggtaaagacgggatctcgccatgttggccaggctggtcttgaactcctgacctcaagcgatccacccacctcggcctcccaaagtgctgagattacaggcgtgagtcaccgcgcctggcctgttgtcatgtttattgaactactaggaagaaagtttggtggcgtatgagctaaaggccatggtccctccttgccctccaataaggccctcattcaggcattagttcctaatctctgttctcaagcagctcacaggtgagtgggagaaatctggacagataggatccaccatggtaaatgttctgagggcaggccccgagcacaggatgatctgtggtcagctaagtgaccacccctagttttgggcccctcgagggcagcgactgtgttgaatttttccccatgctgccatggcccaggcaggccacacacccacattggatgagtatcaatgtttgactggtagacatatgaataaataaggcagtgactgaatgaacaaacacctcatggcctaaagaggtacataattcaaggaataaaagatgggaccatgaacagtcaggagagtgaatagccagtgggggacctgtgcaggagggtcgggccttacgatctgcggaaggacagtgcggggccgagatcaggtctggatcctgcgccaggcagcaggagttggcatggggggcccagcaaagactcacttttgcgtttctgaaattgcccttcttctttgccccagtcttctgaatgtttggtggagatatcctgggtatggacttttttggacatctgggtgacacgtgagcggattgtgctggaggaccgagtcatgctgtgagccgagccccgtgggtgtgctatgtgataggggaagactcctgtacgagaagcagcagggccgggggcatcgtgaatcaggctccgggatgtgtgtgggatagagagttgggaagtgctctggacgtagtcgccatggaggtaactggaatgatacgcgccgtggtggtcttggtgctgatggtagtctcggtgccggtgggtctggtggtagtggtgctgtgtgtggtggggatggtcgccatggtggtactcactggggtggtgatcaccttggtggtactcgctgtgatagtcagatatcccacgctggtaggaccccacagaggaatgaggggaaatggtctctccgtgatgaggagactttccatgctggtgggcttcatgatgacgggacctgccatggtggtggacttggtgatggtggggccagccacggtgggggacttggtgatgctgggactcatcgtgttggagcccgctaaggtgggaagcctcgctgtggtggaaggactcactgtagggattgggtccatgggggaggtaggacccaccatggtgggaagcctcaccgtggtggggcacgccagaggaatagtgggataaattctcaccgagatattggggtctgccatggtgagaccccctatggtaatgggagtcactctgctgatggaacccactgtattgggacccatcatgatgcctcctgccatcacgttggagctcatcatggtagtcctcaccgtaggaacggtgggaggggacggcgccttgagagggagccagaccaaagcctgtggggc

SEQ ID NO: 1660 - protein, 1726 aa, Homo sapiens
  MOD_RES (1447)..(1480): Variable amino acid
PPELAGTTGQDVRLQAPGTRTGLLKLLSTVSQDKQGCLGSGDGVPNQDLQQRSQSSRQTAKKDRKPRGQSKKGQGSEESEDHFPLLPRKPSFPFQWAWESIATDVRAVLQPSSPTPGHQALPMPSSFSQRQSRRKSTANLPEAHGCCWKTEAQNLKARQQLGAWGGVSIPTGKGELGSEPPSGLQLPGRRPGSGSVSDKQVQLQSLGAEEAERGLSSGVLPQRPRRGSISEEEQFSEATEEAEEGEHRTPCRRRAGCQRKGQISGEEASDEGEVQGQSQGSSPSFNNLRRRQWRKTRAKELQGPWDLEKLHRQLQRDLDCGPQKLPWKTLRAAFQASKRNGKAYASGYDETFVSANLPNRTFHKRQEATSKLRAKLGLKPLEVNAIKKEAGTKEEPVTADVINPMALRQREELREKLAAAKEKRLLNQKLGKIKTLGEDDPWLDDTAAWIERSRQLQKEKDLAEKRAKLLEEMDQEFGVSTLVEEEFGQRRQDLYSARDLQGLTVEHAIDSFREGETMILTLKDKGVLQEEEDVLVNVNLVDKERAEKNVELRKKKPDYLPYAEDESQKPRSILSKYDEELEGERPHSFRLEQGGTADGLRERELEEIRAKLRLQAQSLSTVGPRLASEYLTPEEMVTFKKTKRRVKKIRKKEKEVVVRADDLLPLGDQTQDGDFGSRWAWTRWWGEMAGLGWPGDRCSPERPPSLRLRGRGRRRVSEVEEEKEPVPQPLPSDDTRVENMDISDEGEGPARGWEGQGQEPRVGGDGLSRHPLCFPQRKVELHRPGSPQVLEEDEAELELQKQLEKGRRLRQLQQLQQLRDSGEKSGKALLGPHISEKAELGSCLRSLQGQPRRLAVPSRPLSADVNECLTIPEACKGEMKCINHYGGYLCLPRSAAVINDLHGEGPPPPVPPAQHPNPCPPGYEPDDQDSCVDVDECAQALHDCRPSQDCHNLPGSYQCTCPDGYRKIGPECVDIDECRYRYCQHRCVNLPGSFRCQCEPGFQLGPNNRSCVDVNECDMGAPCEQRCFNSYGTFLCRCHQGYELHRDGFSCSGESSIPAVYSSVDPQALAMPCLLPHSSPFEASASCHCAPSCLLGTRPRLAVEHSQANIDECSYSSYLCQYRCINEPGRFSCHCPQGYQLLATRLCQDIDECESGAHQCSEAQTCVNFHGGYRCVDTNRCVEPYIQVSEKVGEIGGTGKELICVPHLGVSSRCLCPASNPLCREQPSSIVHRYMTITSERSVPADVFQIQATSVYPGAYNAFQIRAGNSQGDFYIRQINNVSAMLVLARPVTGPREYVLDLEMVTMNSLMSYRASSVLRLTVFGCCLLPTHSAHLHQLPGKHFSHRLGLGSGKGWISGGLGQAMSEKLGRDSTLFLMAPALKSLKLVASVEQEQQKFRSQAAVIDEIVDTTFEVNQAGAGRGRRGEPQGLVARNGSKKWEARGREXXXXXXXXXXXXXXXXXXXXXXXXXXXXXXXXXXGPATEACLKLAMPEVQYSNYLLRKQKRRGGARARPEPVLDNPPPRPIRVLPRGPQGEDSCTRSSRAGGIVNQAPGCVWDRELGSALDVVAMEVTGMIRAVVVLVLMVVSVPVGLVVVVLCVVGMVAMVVLTGVVITLVVLAVIVRYPTLVGPHRGMRGNGLSVMRRLSMLVGFMMTGPAMVVDLVMVGPATVGDLVMLGLIVLEPAKVGSLAVVEGLTVGIGSMGEVGPTMVGSLTVVGHARGIVG

SEQ ID NO: 1661 - DNA, 3876 bp, Homo sapiens
  source (1)..(3876)
  CDS (201)..(232)
  CDS (692)..(833)
  CDS (2431)..(2594)
  CDS (3262)..(3676)
ccctgccaagtgtctcctgaggtggcgggagcttattcattcagcttccagcatgtctgcaaaaccacttctcagcccgcggaatcttagtcttttgcccagaacccacagaaaggtcaaaacaaacacaactccttgggtttatgaaatttctccaggaccaagtacccacaataggaacatgagcttctgtcttcaaaatgaccaccatgttggggtggggtggaaaagggtgagctaaagacagcatgccctctgcctattcagggcctttccccggctaagcgttcacttggttggcataagcctttcagtatctttgttgttgttgttgttgtttcttgaatggtccctacaccaccattttcactgacctcctttgttgggattttaacagttttttaattgttgataggaaacttcttatcaaattcagtatgtatttgctaaaaacgtttcttcatctcatctactttattatctcaaaaaaattcttaacagagctttttcatttttctctgccacagcaaattgcagttgccattcatggtgaaatctgcttcatgccctcaactcttttatttttctgtgcttctctgatcatagtatgagtttctcatctctgtctggttctctctccctccctccccttccccctccaattcctctctctcccactcccccacctcaggaagctgcactgcaccaggaattacatccacctgaacctgttcctgtccttcatcctgagagccatctcagtgctggtcaaggacgacgttctctactccagctctggcacgttgcactgccctgaccagccatcctcctgggtaaggctgtccccaccacagggtcccactgtcttgtccctttatctctgttccctcttctcacgatgaggacgtctctgtgctggtgcagggtccctgtcagggcacagggtcatggctgagaaacagagagcctggcagagaggctggggccagaacaggcccagttggcagctgagacatgggggtggcactgaggcagggagggtgggggtcccaggcatcatcagggctgggaagtgaaagggccctgagccctgacccccatggagctagactgaggaaaggcacacccttcctcacacacatctgggttgagaaatcttggcacagatgaacacacacaactctgttgctttctgtctgaatctcctagattctgagcagtaaaggcttccttccagattgctggaagaacttgatcttgtgccatgggtaaattccttgtaaagcctgattgtgaactcagttgcatatctatgaatatctgcgtccaactctttgatttcaggataatcttaattattagttcctacaaatgcagtacagggtgtttgactccacccacgcccttctccctcagctgtatttgtagtagttattggtggttatatagtacctaatcaagtcagtttaacatagcaggtgctgttgagcacctcctacatgcaggccgttctaccaagcacatccctgctggcccagagcactccacatgctcggcatctttgtgaaggattcgtgcccctggtacctcactctcaaccagagacccttgctaccaaggttcttcttaaggagccaggagctccagactctcctcccgcattccacgcagataggtccctctgctggcacagttgctcagtctaaacagatttgaattaacttagttttaagatagtaaagccgtttataaccacacagacgtcagctttttcatagcccatcatcgtcttcatgcaggaaatgtgcctctggggataagctggcgcgtgatgcctgtgaatcagatttgctgtgataacaaaattaaaaacaagatttttcacctggcaagccccgttccccaggtggagttgggcccctggagttcctgtcctagtaatagggtctcccacatgtgtaacagtggtcaacgcccataagaagtgtgaggatggtgtcggattctctctcaccgagatggtttcaggcttcactctgcagatcccctgcccttagctcttcatgaagaaagcagtcaccctcgacagacacttgacagaccctcagaggaccactcggacccatggcagaccctcaaacggaccatgacgtcaaagcagtgaccatgaaagacctcaggacccgttacagaccctcaggcccatgacggaccctcaggaccctgacggaccctcaacggacctgtgatgtagaaagcagtgacccatgacagaccctcaggacccatgacagaccctcaggaccctgacggaccctcaatggacctgtgatgtagaaagcagtggcccatgacagacccttgggacccgcgacatggaaagcagtgacccgcaacagacccttgacagaccgttaggaccctcgacagaccctcaggaccctcgacagaccctcagtggaccccagcgacctggaggacctgcaacatggaaagtggtggccctcgggactgggtgctggcctggagcagcagctctctactctcccctattgcttcaacctgaaaggagtgcccagaacctccgaggcagagtggatctgagccagcgtggctgccccaccgggaggcctggcctcccacacactgcacagagcatcctgtaaatgccgggctgtttctgtggacactgggtgaacactcattcgccttcagaagagcagttgccccatttcacagacgaggaaactgggcagaggggaacccagcaactggcccggagtctcgggatccaaagcccaggtgcatgtgggccccacgatgcccagcagcacagagccagtgccccaagtcaagctctgtgaggacagagggagtcggctttgccccttgtgccagatgccctgtgactctagtaccagcaaggggaaagcagaggcaaagggaaaagcatgtgacagacagaggagggaagggacagaggacaggagggaggggagatgcctgaggccagagaggagccaagctgggtcttccctctcgctgtcctctaaagaacgctcaggctttgaataaacaagtcagccagaaatagtcagacctcagtataagaaacaggaaaaatagctttccttccagttgaatttttttgtatattttttgttcccagctgacttcaccaaaccaaggttattctcccaggcagaacacctggggcagcacccccaaaataggtgcagggtctttttctcatgatattaggatcagccaagaagatgaacagttctcttcttggccccttccatgcggcctagacagagacacagtttcctctggggccctgggctgtcccgggacacggagcaaacctgccctttattctcaccatcagccacagcaggttcccctgcggggtctgtgggactcccagaagcacacccccaagcttactaagctgagtcctgcctgcctcacgtgcacatgtgtgcgtactcacgtgctcacacagaggctccccgacaaggccacggggctgaggagggaccagctgttgactgggcaccgggccttggtgggtctcctggccggggttcctcacatcaaccctgtgggtggcaactggccctggagttgggcccctcctgtggtgctctggagcctgtgtaatgaggtttgaaggtcacactgtagaaaatgaagtcagtagaggccttgtcattccccagacctcccttcctcagtgtgcttgtttggtgaatgggcacatgggaaaaaatgcagagatgtttttgttcccatttaagaagaaaatggaatcgtcttcagcacactcttcctgcgtcctctttgctccttcagcagaatgtgccagggccc

SEQ ID NO: 1662 - protein, 250 aa, Homo sapiens
MTTMLGWGGKGKLHCTRNYIHLNLFLSFILRAISVLVKDDVLYSSSGTLHCPDQPSSWTLRTLDRPSVDPSDLEDLQHGKWWPSGLGAGLEQQLSTLPYCFNLKGVPRTSEAEISQEDEQFSSWPLPCGLDRDTVSSGALGCPGTRSKPALYSHHQPQQVPLRGLWDSQKHTPKLTKLSPACLTCTCVRTHVLTQRLPDKATGLRRDQLLTGHRALVGLLAGVPHINPVGGNWPWSWAPPVVLWSLCNEV

SEQ ID NO: 1663 - DNA, 922 bp, Homo sapiens
  source (1)..(922)
  CDS (201)..(722)
  modified_base (605)..(704): a, t, c, g, unknown or other
aatattatcatatagaataccagttactagaaaataaagattactacatgctaaattgggataaattatgattcagttaattgaaccggagttaaatgatcatatataaacaaggaatcactttcctacaaaaggagaataacaatacaattcacctaaataccatgttttttctctcccctgcagaaactcatcaaagaatggcagcagaaaaccattcttttgtgactaagtttattctggttgggctaacagagaagtcagagctacagctgcccctcttcctcgtcttcctgggaatctatgtagtcacagtgctggggaacctgggcatgatcacactgattgggctcagttctcacctgcacacacctatgtactatttcctcagcagtctgtccttcattgacttctgccattccactgtcattacccctaagatgctggtgaactttgtgacagagaagaacatcatctcctaccctgaatgcatgactcagctctacttcttcctcgtttttgctattgcagagtgtcacatgttggctgcaatggcatatgacggctacgtggccatctgtagccccttactgtacagcatcatnnnnnnnnnnnnnnnnnnnnnnnnnnnnnnnnnnnnnnnnnnnnnnnnnnnnnnnnnnnnnnnnnnnnnnnnnnnnnnnnnnnnnnnnnnnnnnnnnnnnaatacattttttaactaagaaataattttatcagaagggacagcaaataaaagaaatggtaaaaataaacctccaaccaacttcagctattttgtaagaatagaatttgttaagggttaaatcaggcatgttgataccaggatcagcaatcaggaatgagcagccatttcaaaccataagtcaaaaatttagtaatgctgaacatcaaaaacaataag

SEQ ID NO: 1664 - protein, 173 aa, Homo sapiens
  MOD_RES (135)..(168): Variable amino acid
MAAENHSFVTKFILVGLTEKSELQLPLFLVFLGIYVVTVLGNLGMITLIGLSSHLHTPMYYFLSSLSFIDFCHSTVITPKMLVNFVTEKNIISYPECMTQLYFFLVFAIAECHMLAAMAYDGYVAICSPLLYSIXXXXXXXXXXXXXXXXXXXXXXXXXXXXXXXXXXNTFFN

SEQ ID NO: 1665 - DNA, 13582 bp, Homo sapiens
  source (1)..(13582)
  CDS (201)..(311)
  CDS (1074)..(1398)
  CDS (1897)..(2019)
  CDS (2318)..(2434)
  CDS (2579)..(2866)
  CDS (3926)..(4045)
  CDS (4134)..(4260)
  CDS (4436)..(4694)
  CDS (5476)..(5616)
  CDS (7261)..(7446)
  CDS (8463)..(8722)
  CDS (8796)..(9162)
  CDS (11182)..(11604)
  CDS (11686)..(11929)
  CDS (13228)..(13382)
  modified_base (56)..(155): a, t, c, g, unknown or other
aggccagccccaacccgggactggagcaccaaggtgttgccgcaaagcgagggccnnnnnnnnnnnnnnnnnnnnnnnnnnnnnnnnnnnnnnnnnnnnnnnnnnnnnnnnnnnnnnnnnnnnnnnnnnnnnnnnnnnnnnnnnnnnnnnnnnnncgggcagaggcccctgacccgtgtccaccatctcgcagccccaggatgctcccctgcgcctcctgcctacccgggtctctactgctctgggcgctgctactgttgctcttgggatcagcttctcctcaggattctgaagagcccgacagctacacggtggggacagtgagggccgctggcctgggacaggaagggtagggaggaagagaccgggacccagggtgactgctgccggggaagtcttcctcccctggctggtggagagctgggggccattgtttggagcaggccggagggtggccaggctcaggccctagtcttggcctggccagttggaggagatcttagggtgaccactggccacttctggttcccttccaggaatgcacagatggctatgagtgggacccagacagccagcactgccggggtgtgtgtgcctgggggaccaaacacccccaggaacccggaaagggattgatagctgctttccaagggacagccccacctccaagaactgccgtgggagcccagcagcccgttctatgcccagctctgctacacagaggccagctctggctctctggaggccagttgagctaggggtggcctcatcctctcccagaaacccaggaaaccttgtccctacccctcagaggagctggatcctgtacgccttctctgaaccactctcctgtcccagctctttgtctcatcacaacctgggagggtagcgtccccaggggtgggtaaggaggccccccatcttgggctgagctagggctagggccgtggggagggatagagacccacttgcaggccgagaatgagggcaacagtgggaacagctgccccatctccagccttggccaaccctggggaggggtcctgagcaggcagacttagcttgttgagcagagtgggaaggctttgctggggccacacatctcagagaaggccgagctgggttcctgcctccgctccctccagggccagcccaggagactggctgtgcccagcaggcccctctctgcagatgtcaacgagtgtctgaccatccctgaggcctgcaagggggaaatgaagtgcatcaaccactacgggggctacttgtgcctgccccgctccgctgccgtcatcaacgacctacacggcgagggacccccgccaccagtgcctcccgctcaacaccccaacccctgcccaccaggctatgagcccgacgatcaggacagctgtgtgggtgagtggggactgctctggtgcctggcttccagtcctctcaccaggcgtcttaaactcagacctcatgttcctccccagctcaaaagggccactggtgatgtccacaccctcatccagacactcatgttgtttaggacctgccgcaggtggccccagcttgtgtgccactgctccagccagctccgggcccctcccctcggttgctgcagagacactgcaggaagtctgccttccagtgtctgtcccctgggagccacaggccttggaggaaggacagtccaggaatcagtgttgctggggatgtttggacaggaccttatttcctgtgcaacccccaacatgtggttttagaggttaggggtgcctttcctgatggctccaggctggtgaactcttacgcgtgctgttgagagaaccgaatacaagtgttggaactatctgtcatgttgggtggtgtgcgggatcccaggcaggggctgagtggtgtctctcgcagatgtggacgagtgtgcccaggccctgcacgactgtcgccccagccaggactgccataacttgcctggctcctatcagtgcacctgccctgatggttaccgcaagatcgggcccgagtgtgtgggtgagtccaggaagcagcttctgtagtcccggctttgtgtccctggtctggcccttgccctagcacctgacccccattcaagccaggcttcacccccggcccctgccacctcaccctccgtcatcagacacagaggactgtagcggggagtgtttgggaggtgtcctggctgaccctgcctaattcagctcctcggacacaggattatgggtggtgaagccttgagtcccagccggctcgagcccacctgccctctgccctctgccctccgccctccttctcctgcctctatccctagacatagacgagtgccgctaccgctactgccagcaccgctgcgtgaacctgcctggctccttccgctgccagtgcgagccgggcttccagctggggcctaacaaccgctcctgtgttggtgaggctgggctgggccaggctcctgggtcctgggcagggaggtgtgaggtgggggcgctcccttcttgaccagcccaggtagagtggaggctctgggctcctcctccgctttcatccctcctgtttttcctggcacccccagatgtgaacgagtgtgacatgggggccccatgcgagcagcgctgcttcaactcctatgggaccttcctgtgtcgctgccaccagggctatgagctgcatcgggatggcttctcctgcagtggtgagagctccatccctgctgtgtactcctctgtggacccccaggccctagctatgccgtgcctcctgccacacagttctccatttgaggcctccgcctcctgtcactgtgcacccagctgcctcctgggtactcgaccccggctggctgtggagcactcccaggctagtgggggaggcacaaggagaggcagctacgtccttactgaagcctactggtgagactgaggatgtgggtgccacctgtcccacatatcaggctcacctgcatttacctgcatttgaattttgcactaggacaagtcactcctctctgagcctgtttcttcttctataaaatgggttgtcttgaggattaggtgagagtgtgatagatgggctccagcaagtctcaagctgcagtgctttaaagtgaatgaactgccacttaatgagaacctgccctcgtagtgtattccctgacacacttggcctccttcctctcaagaatcctaggaggtatgattttctccttcctctacaaaatgaggacattcatatctccctccacgtttgttgggaggattacataaaaataatcacaaagtcctgggtaaatggtgactttcatgattcagctaagagaggttaagtgacccgcccaagctcatacagccaggatgagatggggccagggctggatcccagacttcttacaccctgtaaactggcatgtaccccctatgttatgctttgctgcgggatgaggcctcactgctacctggcagcatgaggggaacaagagaaaggaaatgttctgcctgtgaagctcacagttagttggaggtgaccactgggtgctcaggttgactgtgggttgcaggaattgggcgttacagcacaagccagacccataagactcatctagtctaacacactcattttactgattgggaaaatgagattcccctagatcagctggtgggattcacacccaagcctctagattcccagtaacttatttagtgtttcttccagttctgggcagagagaagtctgtgagctgcggcagcctgggcaaactttctttgaaccctccatctcccggctgaacttgtggcttgtctcatccccctctgtcttcctacattcagtctaacatggggctgggccttcttgggaaatgtttgtgggactgaatggtgaggaatgcccttgacccggggtccccatccccatgcttcctcagatattgatgagtgtagctactccagctacctctgtcagtaccgctgcatcaacgagccaggccgtttctcctgccactgcccacagggttaccagctgctggccacacgcctctgccaaggtacaggttgcccgggtgggatgggcaggacggtgtcaggagctggcagcctgacgcccccgattccagcccctctcccctggcacagacattgatgagtgtgagtctggtgcgcaccagtgctccgaggcccaaacctgtgtcaacttccatgggggctaccgctgcgtggacaccaaccgctgcgtggagccctacatccaggtctctgagaagtgagtcaattcgatgccaggcccccacagaaactacgtctcccagggggctttggggctgactggcatctattcagaccagcgagtgcccctgagggatgatgggaatcatagtccttcatgaaaaccagtcacaggggtagaagggtccttttgggattccctccctttgtagggtaggagaaattggggggacgggcaaggagctcatttgtgtcccccacctcggggtctctagccgctgtctctgcccggcctccaaccctctatgtcgagagcagccttcatccattgtgcaccgctacatgaccatcacctcggagcggagcgtgcccgctgacgtgttccagatccaggcgacctccgtctaccccggtgcctacaatgcctttcagatccgtgctggaaactcgcagggggacttttacattagggtaaggtttctgcaaccctcaactgacatgcacaatctaaaactgaactccaggacgccttaagggggaactcggccaggctgctatgccccacccctcccccaaagccccgcccccggaggcggggtttctgcaggaagacgggggtactctaaatgcaattctaacggttaaatgcaattctaacgaagcactcggacacgggagtttgagtcctggtactggttttccatattgatctcagtttcttcacccacaaaccaagggaatggcgtgtgcagggccctggggtcagaaagtccactccttgctagtggatctgttaggtgggagggggccaggggcggctcacagtgagctgctcacagtgactggcagccgcatgcatgggtctcagcaggagaaggggtttgtctagtaccagcccttctctttctttttgaaattgaatgctctgaagggagtctgctcactttgggtcaccaaaggtcccaccagtcccaagagccacatgtggccttgaatcgtcagttagcctgggtcagacagagcaggctggagagggtgagaagagccccagcaggagatttctgagggcaggagcctgggtggggaggagagacatcgagggtgtcaaagagctgcatgagaggctggggtggcagcctggccagggctgttcctctgcctcacggccacggggcagggaggtgacgctggggcaggggcctagcacacaggctgacacaatatatatgtccccccacccactgccctgcagcaaatcaacaacgtcagcgccatgctggtcctcgcccggccggtgacgggcccccgggagtactgtgctggacctggagatggtcacatgaattccctcatgagctaccgggccagctctgtactgaggctcaccgtctttgtaggggcctacaccttctgaggagcaggagggagccaccctccctgcagctaccctagctgaggagcctgttgtgaggggcagaatgagaaaggcaataaagggagaaagaaagtcctggtggctgaggtgggcgggtcacactgcaggaagcctcaggctggggcagggtggcacttgggggggcaggccaagttcacctaaatgggggtctctatatgttcaggcccaggggcccccattgacaggagctgggagctctgcaccacgagcttcagtcaccccgagaggagaggaggtaacgaggagggcggactccaggccccggcccagagatttggacttggctggcttgcaggggtcctaagaaactccactctggacagcgccaggaggccctgggttccattcctaactctgcctcaaactgtacatttggataagccctagtagttccctgggcctgtttttctataaaacgaggcaactggactgttagtggttttcaatcttttcttttaggaagttttatttatttttattatttttattttcccaatgagccctctgcactcctaaggaaattttatttgatgaggaccaactggtgacataaaatagattccaagctgcaatgccccactgactccatctccctgaccagggaattccaggtgctaagcagctttgtttaaaaaccactggaccagatggtatccctggttcctgcgtatttcacaaggtccccagggctaggcatcttctacatgacacatatggctgcaaacacttagattctaattgtaccccaaaagatgttgttaaaaggctggctagcctgggttgggggacagacgggggctgggggctgtttcacggcataagctcaggtcaaggggccgtagctgcagtagagctgggataaggtcctgctcagagcaggccccagattcctgcaggaagagaggcagcgagggtcacgccctgggcctagggcagccccagtccctgccactccctccaggttccgtctcttgccctcacctctgtagacgcccacacttaatggtgctcagcagtgtctcttgttccttgggggtggcacaggcatcataggcggccaggaggctggggggcaggggtttgagtttctgaggctgacagtggcccactctgggccagcaccatgaggggccaggcagaggggtcagcatgggatggaagagttgggacactgccccacttcctgagcttggcactcaaggccccatgccagccgggctgtcctccctccctgtgggaactctggggcaaaaccagcaaaggctccaaaccttcaccctcactccccttaatggcccaaccccttctccaggaagcctcttctccaccaggtgggacgtctccctccctcctgtggcctccactacctgggacactatgtgggcctgctggcttcctccccacttgacctccacgagcaccctgggatctgtctatctctggtctgcagagcccacacaaggccaggccccctccacgaagcatggattaaggtgaattccatgcatggagggcaggggctgaggacacctaagggccctttagggcctacctggcaggggtgctgtatcgatccaccagggctgctgccttctccccactcactccgcgcacctgcatcagctgccgggcaaacacttctcgcaccgactgggcctgggttcgggaaagggctggatcagtgggggtctgggccaggccatgtctgagaagctaggcagagacagtaccttattcttgatggctcctgcgttgaagtcactgaaggtgaggagtgagcagagagggtttggagaggtcatggcccctgattcagggttcccaggggttccccaggggcggctgcgtagggtgtggccctgagggaagaagggactgaggccaggctggagctcgaaggaacaactccagccagcccctgcccagtcctcagccttggggggccagcctgagaaatggggatctcacccaccttgcttcttttggggatgcacagggcccaggcaaggtgaattccttgtgggctctgtcccgacactgggaaaggggcctctgctcacctggtagagtctctgcaggccccgcgtcaagagggccaggtaggcggctgactccttaatgtctgctgtgcgcttcacaaaaaagccatcaatgacctggggaagaggacccaagagagggaaggtggctcctggcctagaccatgaaccatggaccacaggggcccctgcctgcctgcctggccctgccctcccagctcacctgagtgttggtgacagcctgcagcagtgtgctctcaggaaggctgaggttgtggacggaaccatgctcttccaccaggtatacccggcgctccagaccacagcgcttcagccggaactagggaagtgtacagagtggacagggagggtcaggctggatgaccacatgcctgggcatccatgatgtcacactcaaaatggtgccgggaccctgttcccaccagttagcctctgcatcctccctagcctctccacctgcctcacaggggcctccgcagctttgctcatgctgacactcttgtctagaaagccttttctccatctctcaacactgcccatccttcaagcctcccctgggccggcacatggcctctgtgactaggggtccacccagcagcaagtaccaaggtacagcctctgtatttccactcctggaggtttatgccttgtttatccaagactgcaggggctgggtacccaagaggtctttaaaatgctcctgacctcagcccaagaatgcaggtacctggcttcctactgtgcgcctggatgggcctgtgggggtctgatcctggagcagccacagggtgggtgtggctggattccaaagggctctgcctcaaggaggctgccagaagtgcccctggattgctctgggctgaaaacggggcttcggagcaggcagggaagcctggcaaagccagcaaaattaccttctgctcccggaagcggccgtcgatgatgctgctgcaaaggtcatccagtcgcttgcgctccacaatgtgatccagtaccaactccccagggtttgctgctgacaagccagccgttagcttgcgatcccctacccaccaggccctgcccctggtgccagcctgtccacggcccttcacctgggtctctaggattggtctcctgggccacccacacaaaatctccaacgtgcagcttgcgcaccgtgtgggtcacgtgcagccgctgtagctctcggagcagctccggcctgtgcccgcccctggagtggcaaggagggaagcctagatcagagcagggcagtgcctaccccccagcctcctctgatcatctccctcgtttctccccacctcactcacccccgggtctcgccaatgtccacacacaacagcaccctgtactctccaggcctcagctccagtggctgctgctggacccctgcttcactggcactaagtggggggtgttggtatgtgaggccagaaccccttgtgccagggcagttgccccacacccatgccacccgacacccaccacccacccacagtagggaggcagccacagttcagctgcaggtgatgggttggggcggggctttggcctcatttcccatcccctcctccctgttttccccactcctctgccctcctcctcacagctctgctgaagctgctcctggcactgctgtctcctccccagggggctccttgggcccgatgcccacattcagcaagctcaggccttctgactcggccaacttctgggccagctccaggccctctggggtcaatgagtacctgggaggcagaggggacaacacagctctaccttcttcactcattcctggcaggctttcctgcctgcccccagctgggctggcctcaccacccccttggcgccctgcacaaatgaccccagtggctcctgctcctcctggtcttcttggctcttagagcagttccttgggcctgctcagcgccattctcaggtctgcaagaagtgtgtctcagacaatttccttcctcctgtcttcactaatgctgtttcctcctcctcggaatacttatcctgcatctctacccgccaaatcctaaaacgtgtcaaatgctatctcctctgaaaaggctttctcctcctccaataaccaccgcaccctcccacccccgctgctgcggtttcacaccctccaggtattccaacagtgggggctcctgaggaaaggcccaccccccccaatctcaacagcatcagctctgggagttgttgggtgactctaaggccctactaagaagttcactcatgctctcctgtatctcctgcagttggccccacctggctggctggtgtgtcctgaggaccaggttcctgtgaaggagggagcggagggctggccagggtcgagcactcccaggggctacctgtggatcagaaaagagaccctcagagagcacctggtaccaccacaagtccatgttccctgtgtccccagccatgggccacacatgggcccactgcaagaaaaggcagtctttggtgggccccagagccacttgggcctgtcctccctgatccctgtgctcaccctgggggacttctgagcacacctctgcagcagctcctccttggttaagaagtggtgaccattaggattctgaaaccaaggtagaaaagacagggtaggctcagtgccagggcccctcctcatcccgctcaggtggctgggataatctttgcctgccctgcctgggccaggcccctcggggaacctcccaccccactgccatggttccgcctcccggtgtagcccagtgctcaccaggtgctcccggtagagcaccagcagtatcactcgggctcctgagtgccgagctggccagtagctgccagagcctcccgctttgggctgggcaggaacctgaaaggtacagaggagttctgaacatgaaagccagccagtcatctttgaataagtccccagcaggctttgtggccctgggtaagtcactcagttgtctctcagtttccttctctgtaaaatgggccaggtgatgggatgatccgctgcaaatctgggataaaacagcaggcagtttcggggcagtgggtgggggtgtctgcccagcctggcctcacttctaccatgcgctgcaggacaggtgtaattagacaggaaaactcaataatggtgaccccgtaactaactgagctgggatccttaagtagcttgatcatggaattctctcattggctgttaccaatatttctattcacaggttaaaatactaagtcgaaaagaggataagtcatttgctcaaggccaggcatcactggtgagatttggactcaggcttgccaaatcccccaagccagaaaatcatactcccgcactcccactttgccttccactccccttgccccttcctcactggcatggaagagtcctggacttccgcaagtcgcccctgcggggctggactgttctctccagatggtgagtccggggcatggtcacctgcgggagagaaaagagttaactccacactccacgaatccggcagctgcgaggatctgggatgcaacctactcagatggttacgtgagaccggtgagggaggctcagggagcgccagccactagccctaggccgaacggcaactgggacaggagtggggagcttaaaagccaagggctcccaggagagtacggaggctccacctgggggaggtgggggatcaccgacccctttccgaggcgctcaccgcccgatgttcggtgccgctgcagccgctcgtccagcatccggcagagcccgtctccgaagtgctgtagggatcttagcttccttcccgctgcgcagcggcagtgggtaccgtcggagggaacgcagcgccctggcccgggcaggggtagggtacctggtcagggcaggcctgacctggccagcagcttttcccatcgggccacgccaggacccaccttctgaaatacgaagcgcgtgcggcgcctgctgcgggtcgcctcgtcccgccactcggtcagccagcgaacgaagagcgggttgggacaggcaggcagcgggcgcttccggcccaggcggaccggggccgccatgagcccgagggcgggtcctccggcgctccacgcccgcgggactgggacgccgccagttctggagtcgggattcgaacacctggcccagggcggggcgggggaagagggagaccgagggcaggaccgttgagatcacggggccccaaacacagggggcactaacgagaggagagcctgcggccgccctcccacccctgcgctgctctaagtggttggtcaggggcgctgtctctaacgatcttttcccttggctccactccagccagcctttgagacgcgccctttcccagcccccggagcctggaccggctccttcctgtcaccccagattcgagagcggggtctttgtgtaggcgagaggaaggcggacagcgccccctgtgacggggaggactggctgggcggcgcttaacggactaacctgagcttggcggctctaaggtctcttaagattgtcagcttcagcctcaagcttgaaggaggctggagatggagactggtcttgaaaagagtccaggagaggcgggggctaggagacaaacgggtgcaaacgtattggtgggagggacacccagaaatgggtgccggggatgaggacacaaaggtaaggcaggaggagctgcaggacccttggaggaaatggtgatcctcatccccgggatacagggcaaagagtgtgtggtggagaggaagtcggggacgtgccgagaaggcccaaaatagaactcggaatgtcgggggtcagaggcctagaggaaggaggactgtaagtaagaggtgcttgggcatcctggcagttggggaggcctgagatgggcacgcggttgggtttgggagcggaggagcaggctgcgggttaagaagcccagacacaggtagaggggagaacacttcgtcatttttgtggctaatcggaagtgggagaccctcagggaggttgaagatggaaaccctacaaagggcttcaacctgagaagcctgaaagacacgtatagctgagttggacacaggcgacccgccagggtttgaagcagcacccggcctctagctgctatgccggaagtcgcaacacgcaggtctccagcctgcgaggaagggagaggtgggcgccagagctccagtcccgcccctcaggactgtgcctagcccacggcgcagtagccccagccaagctaaattggaccaatgggctccggctcccgcctcccgcccgccgcggccttataaggagcctcaagccggctgtcgggctggccccgccccctcgagtctcttgtcctaataaggacatctagggcatcccgcggctgggggcgggcgagagcgcgtctccagggtaactgcgaagcccccctctctctccccgttgctcttggaaactctaaggctcagaaaagggggcgctagcctcatattcatgtagggtcgctcgcgggaggcggggtcaagctgctgtctccacctggagcgccgggagtccgggcgggggcggtgctgtggaatgtccccgactacaacccccggtatgctctgcaaggtaccccactcccaggcatcgctctccgtttacacccttaattccgtttataggattagggcccccagttccctttctgggtttgcctctgacttgtttgcgacccagtcttttcctgcagagtgtgaggctgtggtcactgttctagaacaacaaaatcatcccggagtcccccgctcgtttctttttttttttaaggcatatactaccacagaacttgtctcagttttgcggatgttag

SEQ ID NO: 1666 - protein, 1081 aa, Homo sapiens [sequence omitted]

SEQ ID NO: 1667 - DNA, 946 bp, Homo sapiens
  source (1)..(946)
  CDS (201)..(746)
agaactgctgcatggtgacagagttcatccttttgggaatcccacacacagaggggctggagatgacactttttgtcttattcttgcccttctatgcctgcactctactgggaaatgtgtctatccttgttgctgttatgtcttctgctcgccttcacacacctatgtatttcttcctgggaaacttgtctgtgtttgacatgggtttctcctcagtgacttgtcccaaaatgctgctctaccttatggggctgagccgactcatctcctacaaagactgtgtctgccagcttttcttcttccatttcctcgggagcattgagtgcttcttgtttacggtgatggcctatgaccgcttcactgccatctgttatcctctgcgatacacagccatcatgaacccaaggatctgtgtggccctggctgtgggcacatggctgttagggtgcattcattccagtatcttgacctccctcaccttcaccttgccatactgtggtcccaatgaagtggatcacttcttctgtgacattccagcactgttgcccttggcctgtgctgacacatccttagcccagagggtgagcttcaccagcgttggcctcatatctcttgtctgctttctgctaattcttttatcctacactagaatcacaatatctatcttaagcattcgtacaactgagggccgtcgccgtgccttctccacctgcagtgctcacctcattgccatcctctgtgcctaggggcccatcatcactgtctacctgcagcccacacccaaccccatgctgggaaccatggtacaaattctcatgaatctggtaggaccaatgctgaaccctttgatctataccttgaggaataaggaagtaaaaacagccctgaaaacaatattgcacaggacaggccatgttcctgagagttagtaagagcagataaatgg

SEQ ID NO: 1668 - protein, 181 aa, Homo sapiens
MGFSSVTCPKMLLYLMGLSRLISYKDCVCQLFFFHFLGSIECFLFTVMAYDRFTAICYPLRYTAIMNPRICVALAVGTWLLGCIHSSILTSLTFTLPYCGPNEVDHFFCDIPALLPLACADTSLAQRVSFTSVGLISLVCFLLILLSYTRITISILSIRTTEGRRRAFSTCSAHLIAILCA

SEQ ID NO: 1669 - DNA, 1843 bp, Homo sapiens
  source (1)..(1843)
  CDS (201)..(652)
  CDS (920)..(1393)
  CDS (1514)..(1643)
  modified_base (361)..(460): a, t, c, g, unknown or other
tttatgtgtcttttaagtcattattttatgaactggtcttattctaactggatcattttgttactttctttggatgggccattctaataagcgtagttcctgactgcgaactatgcagataagaagttctagacacaatatgaaaatccaggtgcatacttgcactaaataggcatgctcctcctttttactaaatctaaatggctcagtctcaggtcttggggaaggctgcatggccggggaccaggcggtgtgccgctcgggcagttagtgggccgggcgagcctgcggggctggaggggacgcggggctgggaggctggggagctgggggctgactccgggcgggcggggcggggcannnnnnnnnnnnnnnnnnnnnnnnnnnnnnnnnnnnnnnnnnnnnnnnnnnnnnnnnnnnnnnnnnnnnnnnnnnnnnnnnnnnnnnnnnnnnnnnnnnnaggcccccagcgcccagccgcgtcccggctgcgtcccgccgcgtcccgccccgccccgccccgcagagccgccgccagtagtgggagacgtgcgctgagaggcgggggctgcgctcggcggaacagcagccctcgggcggagagcggggccggggtccgagagcaggtgatgccaagagctgagcgggactcgtgagcgcgcggttcagcacctaccagggcgtcccgtaaaaaacctcgccttcgcctgtctctgggaaccataggtaagctttgggctttcgaggtgcagttctaggtagagctccgtgctgggaggtgggaagggggcttgaccctggggactcaggcagtctggggacagttccaccaggggccggtgcctagaattggtgagggaggcacctcaggggctgggggagaaggagcgagcgctcttcgcccctctctggcacccagcggcgcgcctgctggccggaaaggcagcgagaagtccgttctccctgtcctgcccccggcgacttgcggcccgggtgggagtccgcaggctccgggtccccagcgccgctggccagggcgcgggcaaagtttgcctctccgcgtccagccggttctttcgctcccgcagcgccgcaggtgccgcctgtcctcgccttcctgctgcaatcgccccaccatggactccccgatccagatcttccgcggggagccgggccctacctgcgccccgagcgcctgcctgccccccaacagcagcgcctggtttcccggctgggccgagcccgacagcaacggcagcgccggctcggaggacgcgcagctggagcccgcgcacatctccccggccatcccggtcatcatcacggcggtctactccgtagtgttcgtcgtgggcttggtgggcaactcgctggtcatgttcgtgatcatccggtgagcgcggggacagcgcagcgctgggggctgggcggggcagggagtgagggtcaggccccgccactggagcagcagtgggggcagccagccaggtggtggggactctgttccgtgaaggatcctggaaatgctacagggtggcttcctagaagaggtgaaggattttctgggagtttttggtggagtgctgagaggttcacacaggcgaatccgagcggccaggggcgtctggaagatttcagagtaaccccccgaccccaccctagggcccagtgtttctgctgaaaactctatgcgcagggcaaggtgccagggtgctgacaacagggtcaggggttcctggtaaaggaactaatccatttgcctgcgccagtttggagcactttgttatgccctttgcaaatatttcttaagataaatttcaagcccacccaatgcactgaagat

SEQ ID NO: 1670 - protein, 351 aa, Homo sapiens
  MOD_RES (54)..(87): Variable amino acid
MAQSQVLGKAAWPGTRRCAARAVSGPGEPAGLEGTRGWEAGELGADSGRAGRGXXXXXXXXXXXXXXXXXXXXXXXXXXXXXXXXXXGPQRPAASRLRPAASRPAPPRRAAASSGRRALRGGGCARRNSSPRAESGAGVREQVMPRAERDSGAPAGRKGSEKSVLPVLPPATCGPGGSPQAPGPQRRWPGRGQSLPLRVQPVLSLPQRRRCRLSSPSCCNRPTMDSPIQIFRGEPGPTCAPSACLPPNSSAWFPGWAEPDSNGSAGSEDAQLEPAHISPAIPVIITAVYSVVFVVGLVGNSLVMFVIIRILEMLQGGFLEEVKDFLGVFGGVLRGSHRRIRAARGVWKISE

SEQ ID NO: 1671 - DNA, 10024 bp, Homo sapiens
  source (1)..(10024)
  CDS (201)..(600)
  CDS (4983)..(5099)
  CDS (9499)..(9824)
  modified_base (3137)..(3236): a, t, c, g, unknown or other
tgcttacaggagacccttccccagcccagtcacaatttggtgccagcttttctccccagcagtggggtaaaggtggatgctcacttaccacctgtgggcttggggtcacgtttcccaccttcccacaggtaagcggtgaatgagcagtgcagcatggggaaaccgagacaacctttaatcaggaaacctcagagagacgcatgacacctggcggtacagtcccagtgagtggaatcccagccggacgcaactcttcctccaggagaacttggcagtcccaacccttctcaaaagatgagccagccacgcggtccagggaggatgctgacagtggaaacgacttcctccattcttacagcacattccaaacacttcttgggaacaaggttacatccagccttgggggtcttccatcctcaccagggcccctgcaggagggagcccaggcatccccaccaggttcatccttggagctgccctgcacacaccctgggccactggcagaggtcctctctccagagtctcccggacacagtgacctccttacatggtggactcttccccccgagaagcccccactgggggctgctgggggccagggtgggtggtggctgcaagggctgtggagagtctagaggtggtgggagaaagcacgcgaggcccgaggagggtgatgggggtcttcgaggggctggggtccatcatggaaagtgctgaagcttccgtcaggagggtgccaggcagaggaggccacctggacactatctgggccccagaggctgagaacgagcgctctggagtcacaggaggtggctgaggagcccctggggaagctagaggtagagtgggggctcctggaggggtcgaaggccctggtgagagtcgaggggaggccccaggctcccctgggaaagtggctgtcagccccaaagcgagtgagtgtggaccatgagctcctgccgggcttgtaggtaaagtctgtgttttcatcaagttcgttcttaaaaggagctggaggagatgaagcaccggcctcgagggtgatgctgtcgggggcccaggacaggagctacagttgacaggggcctcagtgtctccatgcaggctccgaccagctttgctgaatgccacatttccgtgaggggagagcccctgcttttcttccagaggagacagggaatctagagagacgagggtgaaacgagatgcacaatggctctctccagtggccaaggtggctctgggacaaggtataccagggacacccaagctctgtcctcagaggggcctcagcacacctggtgaggaccagccagctcctgcctccaggaagggaagactgaaggagccatgaacggagggaggcaggcagttagctgtgtgacctcacgcaaggcatgcaactctcctgggcctctgtttcctcatctgtaaaatgggcacagcagtaaggactgagtgtgaatgaaagggtgcacggagagtctcagcctaaacctcaatgtgaactatagacattggatgtcaatgacatgtcagtgtcagtgtaggatcaccgattataacaaacatgccacgctggtatggggtgctaatagggggcaacgctgtatcatgtggagtctgaggcatatgggaactctctgtactttccactcaattttgccatgatcatcaaactgctctaaaaaatagtttctttgaagaattttttaaaaagtctcagcctagggcctggcatatcataaaggctcagtacacaaggagaaaataaacacagatgctccttgacttacgatggggtcacgtcccaataaacctgtaaatcaaaaatgcatttctgaccaagcgcagtggctcacgcctgtaatcccaacactttgagaagccgaggcggcggatcacctgaggtcaggagttcaaaaccagcctggtcaacatggtgaaaccccatctctactaaaaatacaaaacttaaccggacgtggtggcgcgtgcctgtagtcccagctactcgggaggctgaggcgcgagaatcacttgaacccaggtggcagaggttgcagtgagctgagatcgtgccactgcactccagcctgggagacagagcaggactccgtttcaccaaaatttaaaaaaaggcttttttttggggtgggggggacaggttctcactcacttgtccaggctggagtgcagtggtgcaaacatggctcactgtaccctcaacctcctgggctcaagcgatcctcccatctcggctgtcctacttgctggggccacagtcacatgctaccacacctggcattctgttctgttctgttctgttctgttctattttatttttgtagagacaggatcctactttgttacccaggctggtctcaaactcctgagctcaagtgatcctcctgccttagcctcccaaagtgccggggttataagtgtgatccacggtgcccagcaaaaatgcatttaatacagctcacttcctgaacaccacagcttaccctggctgaccttacacgtgttcagaacccttatactggcccacagttgggcaaaatcatctaagtaaatccctattttttaataaagtgctgaatatccatgtgtcacatattgataacccaggaaaagatcaaaattcaaaatacaaaatacagcaaaattttgatggtttcacatcattgtaaagtcaaaaaatcattaagataaaccaccagaaagtcaggaatcatctgtgaaagaaggaagaagctcagcaaaaagaaaatgaagagtgaagaagcaaaaaaagaaaaagtatcggcccaggcgcagtggctcatgcccataatcccagcattttgggaggccatggtggacagatcacttgaggtcaggagcttgagaccatcctggccaacatggtgaaactccatctctactaaaaatacaaaaattagcaaggtatggtggtgcctgtagtccagccacttggtaggctgaggcaggagagttgctggaaaccgggaggtggaggttgcagtgagccaagatcatgccactgcactccagcctggacaacagagagagactccatctcaaaaaaaaaaaagaagaaagagtatcgaaggtatgatcagggaaaaatnnnnnnnnnnnnnnnnnnnnnnnnnnnnnnnnnnnnnnnnnnnnnnnnnnnnnnnnnnnnnnnnnnnnnnnnnnnnnnnnnnnnnnnnnnnnnnnnnnnntttttttttttttttttttttgagacagagtctcactctgttgctaggctggagtgcagtggtgcgatctcggctcactgcaacctctgacttcctggttcagcgattcttatgcctcagcctcccaagtagctgggattacaggcacgtgccagcatgcccagctaatttttgtatttttttttagtagagacggggtttcaccatgttggccaggataatctcaatctcctgacctcgtgatccacccacctcggcctcccagagtgctgggattacaggcgtgagccactgcgcctggccttagtctcctcttaatccatatcttcagtcctgtctcctgctgcctcaaaaggaacccaagcttcagctactctgggcctcagtacagtttgcaaggagcccagctgctgcctggaagcacctcagaccctttctccacctgggcagtccttctcccgatactcctggtcctctcagccagtcgctcttccagggcatgcctgcctgggccagtctgtcactggtggggcatatatcatcccagcaggcactgttctcccctgggtgtgtgtcttggctcctgtgttatcagaccgtgaacatctggagtcagcgctgtgtcttagttagtcacatttgcgtcctcaacagcacccctctgggtctgctgcacgcagttggtgctctatgaacctttaagagaatgactctgttgattatttaatcaacctccctgtccactgccctctgcccgtttgagggccctttggggttgccctgagggccagggccattggaaacgtttggtctcagccgtcttctctcgtcatctgatcttcatgggttaaagggggccccagtcccttggcctcttccttcctggggtttcctcatagccagtgaccttcctggtgtctgctcttttttcctggggtgcaggtggggattccatgctgctgagggcaggcttggtgtgggctcagggtccttgtggggttgatttgttcctgagtcacagtcatgtcagagagggccgtgcaagggagatttcttttcttttctttttttttctttcttgagatggagtctcgctctgtcgcccaggctggagtgcagtggtgcgatcttggctcactgcaagctccgcctcccaggtttacgccattctcctgcctcagcctcccaagtagctgggactacaggtgcccgccaccgcgcccagctaattttttgtatttttagtagagacggggtttcaccatgttagccaggatggtcttgatctcctgacctcgtgatctgcccgcctcagcctcccaatgagctgggattacaggcgtgagccaccgcgcccggccttcttttttttcctgagatggagttttgctcttgtcgcccaggctggagtgcaatggcgcaatctcggctcaccgcaacctccgcctcctgggttcaagcgattctcctgcctcagcctcccgagtagctgggattacaggcatgcaccaccatgcctggctaattttgtatttttagtagagacggggtttctccatgttggtcaggctggtcttgaactccgacctctggtgatccatgggcctcggcctcccaaagtgctgggattacaggcgtgagccaccatgcccggcctgcaagggtgctttcttcccagacactgacaaatgtgtaagttcctcttgcgaggaccactgtgtaaacacgtgctttctgtctttccagacattgacgaatgtgtaacctcctcctgcgagggccactgtgtgaacacagaaggtgggtttgtgtgcgagtgtgggccgggcatgcagctgtctgccgaccgccacagctgccaaggtgagctgcagagaaggaatggctgctctgggaggggtaatggggatgccacattgaacactcagccctgccatgcccagtgcagtgtgctctgtgtgccactgcattgaaccttcaccaccggcttcggagggagatgctattatggttcctgtctgactgatgtggagactgaggcttgcccaaggccaagtcgttagtaagaggtggagtcagagtttgaatcccagcacatctaacagttagaaccgactgctgctggcctggtgggttgactcacatctgtaatccttgcactttgggaggtcaaggcgggaggatcacctcaggtcaggagtttgagaccagcctggccaacatggtgaaacctcgtctctactaaaaatacaaaaattagccaggcgtggtggcgagcacctgtaatcccagctactcgggaggctgaggcaggaaaactgcttgaacccagcaggtggaggttgcagtgagccgaaattgcaccactgcactccagcctggacgacagagtgagacttcatctcagaaaacaaagtacctgctgctgctgttgcaggataaagggatggtgatggaggagaggccgtgaggagagccagggcagagtgggccgaccaacctggggaaggaggccactgagatgagggagggccgggagagactcaggccatgagtcccgaggagccatgggaggggcataccgggatggggtcattcactgactacattcatcagtttcacctgccccactgctggcccaggctctggagctaccctggggagtaggatcccccaagtctgatggggagcagaagaacaagcttaggatgagggataagtgttgggaaaacccagggaagagaaggaatcctacctcttcagtttgcaggatgagagatcttacaattattactcattcttttaaaatgccttttatttacacattatggaaagaatctcacaaggccgataattgtgacctccccctgaatcttacattattattttctttatgtttgacattttcataaattatgagaaaaaatttaaaagccatggtgctagcccaggccctctttcccactgctgccctctgctctccctggagaatagcctgcgcgtcttagtctgcttgggcggccatgataaaattccacaggctgggggcttctaccactgacattgattctcatagttctggaggctgcaaagtccaagattaaggcactggctaattcagtttctggtgagggctcttcctggctttcagaaagcagtcttcttgctgtgtcctcacttggagagagagctctctggtatctcttcttcttcttttttttttttgacatggaggaggacagaggacactccctctgttgcccaggagtgcattgttgcaatctcagttcactgcaacctccgcctcctgggttcaagcgatcctccaaccctcccaagtagctagggttacaggtgtgcgccaccacgactggctaatttttgtatttttagtagagatgaggtttcaccatgttggccaggctggtcttgaactcctgacctcaaatgatctgcccgccttggcctcctgaagtgctgggattacaggcgtgagccacccagctaggcctctcatgtctcttcttaaaaggacactaatcccatcaagagggcacaccctcatgacctcatgtaaccctaattatcttcttatctacttatcttacctgcatatcttccaaatgccattacattggcggttagggcttcaacacgatttttgaggggacagagtttagtccatagcactcaggcattggtctgctgtgtgccctccttgcccctccccatgatgtgtacgtacgtacatgggcacttacagagataggatagttgctgaactctcaggtcctgggtcctgggctaagcactttacacgcattttctcctttcgccctcacaattacccagtgaagttggtattatctatctccattttattgaaaggaacactgaggcttaaggaaattgttacttgcttaagatcccattagagctaaggtttttttcttctttctttctttgttttttttttgtagagatgaggtcttgctgtgttgcccaggctggtctcaaattcctggccttaagctatccttcccgctttggcccccaaagggctgggattccaggcatgagccactgcacccagccagagttgggatttgaacctagtcattcctttgcttgttccccttacccctgcccaacgttggtcttgaagatgtttccacatcagggtaaatagacttgccttgttccttttaactgctgactctgcagtgcaaatatttcatagtttactaactcttctcttattgatgaacatggagattatttccagtttttcacaatttcaaacagcactagggaacttttacagaggaggttccactgaagctgagttttgaagtatgagtaggagttttccagccagacaagagggaaaggcattcgaggcagacagagaacatgggcaaaagtggagcaccaaaagagcgtggtgcatttggaagatggcaagaatttaagccagtggccaggtgcagtggctcacgcctgtaatggaggccaaggcaggtggatcgcctgaggtcaggagtttgagaccagcctgaccaacatggtgaaaccccatctctactaaaaatacagaattacccaggcatggtggtgcatgcctgtaatcccaactacttgggaggctgaggcaggagaactgcttgaacccaggagatggagaccgcagtgagctgagatcgcgccattgtactccagcctgggcaaaaagagcaaaactctgtctcaaaaaacaacaacaacaacaaaaaagaatttaagccagagtgaaggtcaggggcaaggaaggaggtgggcaaggcaaccaggactgtgttcaaaggcatcgtgagctatggggcggcattgctgtcttaccctaagatgaggtctgtggcctgtgggagcagcggagaggttttgagcagaagggccctgattagaaatgccctttggtcagaacatcctggaggctgtgcagaggatggcttgaaggaacctaggtagagatagacacactggaggctctggctattctccagactagagatgaatgtggccgggctaaggggtagcagtgaggatgagagacgtgggctggtccagagagtatttaggactggatgtgggcagtgcagaagaggggcagctaaggtggttccccacagccctgtgtgtataggagatggagatgagggaggaagaggggaccatatatttccaaggttctgttggggaaatgaaccccagtcttgtcccttttcctgccagacactgacgaatgcctagggactccctgtcagcagagatgtaaaaacagcattggcagctacaagtgttcctgtcgaactggcttccaccttcatggcaaccggcactcctgtgtaggtaaggcggggaggaccctgtggtctgcacacttaggctgccaatcaggaggatggacagggagcccagggacccgggaaggttaacaattagactttctggtcctctggagcttgaaggggcttgagcctttggctcagagcctgcctgtccctggggttggtgtggctctgcatgaagaccctgtcttggacttttcctggccatttgccactttcatcctgttatgtttctcttccgctcctctcccagatacaccccaaggattcctctctgctcacccattttcttggctgcctttgctccccttggtaaataaagcacgttatgtcttggttcctctggtttagaaggagaccctgttttctcagcccattagcagaaatttccagaaagggattggcatgtttggtttgagcttggctcatgggtttaaggtggggtcccatgggcctgaaaaaagaccttgttctagcggagttaggtatttgtcccgaagccttccttcagcagcccagtgagttttgagacttttttcggaaagaaaaacgggagggtggaaggtttggagatgagcttctcattggggcttacccctaccacgcagcaattaattaccgctgcatagtgctggggctgagtctctgatactcgcattaaatacctgctcgatgtgtgaacctattaacaagacaagcactagatttcagccccgctcccagctgtctgagtcacatcccgcacctcggggcaggcatggaccctgtaagaacatggcagagaaactccccaagtgttttgagctaagggatgggcggaagaagggctccgtagcccaaacaaagcagctgtccgcagcgaggctctcccgcagatgtaaacgagtgtcggaggccattggagaggcgagtctgtcaccattcctgccacaacaccgtgggcagcttcctatgcacatgccgacctggcttcaggctccgagctgaccgcgtgtcctgtgaaggtgagcgccaggcccctccatcccggcggctggccacgccccctcagtgcctgccccagctacgcccccccatagcctggcccctccccgtcacgccctcccggcgcccagccacgccctctcagctcctggccccgccctaccccggccccgcccacctggcgctaggctccctttctgctctgcccttgttttgagttcatcttgtttgttactttcaacactccactttcttcctcgctttctttttccacttctttatccattcttccttcttcttttcactgtttccccagcccttctgtttttttcccaaatgataaaaggataaaacccaacaggagtccgagtatcctgggctacagggacagccatttccgtggttcgccctgccaaa

SEQ ID NO: 1672 - protein, 280 aa, Homo sapiens
MTPGGTVPVSGIPAGRNSSSRRTWQSQPFSKDEPATRSREDADSGNDFLHSYSTFQTLLGNKVTSSLGGLPSSPGPLQEGAQASPPGSSLELPCTHPGPLAEVLSPESPGHSDLLTWWTLPPEKPPLGAAGGQDIDECVTSSCEGHCVNTEGGFVCECGPGMQLSADRHSCQDVNECRRPLERRVCHHSCHNTVGSFLCTCRPGFRLRADRVSCEGERQAPPSRRLATPPQCLPQLRPPIAWPLPVTPSRRPATPSQLLAPPYPGPAHLALGSLSALPLF

SEQ ID NO: 1673 - DNA, 13240 bp, Homo sapiens
  source (1)..(13240)
  CDS (201)..(261)
  CDS (1594)..(2145)
  CDS (2900)..(3044)
  CDS (3937)..(4080)
  CDS (7221)..(7364)
  CDS (7667)..(7833)
  CDS (10614)..(10746)
  CDS (12968)..(13040)
aagggaagcaattggttcaggcaggggctgaggcactgaggcacagccagatgtggatgggcagctggggaggagtcataagcagtccttaaatcctggtatgttttaaattagctacaaactctgcccccaggatatcagcaaacacatcctctctgtgcaaactgaaagtttaaaaggggaaatgaatgttgagcttgatgcagaagaggtgggagggacctggtccacctggtggagctgagaggagcaagaactcaggtgggaaatagggaaagacactgcaaaggagaggtggcagggacccagctcccaaccggggggccagagggcagagcccaggaggtgatggacggcagagagcaccgccaaggtctgaggtgagctgggcacagaccctgggcaagggtttactcatctgcttggagagtcctgcagccccttgcaggggcctgggctgagaccagtaagtcagatggcctgaactgatggcacttagatggaggaaaagtggccatggcagggcaagtctctttgagttggcctgttgctctgtctccccgtacttctttttttttccttttcgagacagagtttcgctcttgttgaccaggctggagtgcagtggcacaatctcagctcaccgcaacctctgctccctgggttcaagcgattctccagagccaggacaggtgtaggaatgctcttcccaggctgcctcggtttgtacagccatgagcagggcatgcccagtgctgtggtggctcagaggtagctggtctgaacctgctgtttgtcagagcccacccgtgggcatgccagcatggggtcgcacacagcaacccatcacggccatctgctccccgccaccatccccgtatttatcctgctgacaacacaggcagcctgggagagaatctgagtgaatccccagcaaggggctgctcagtcatgatttctgagttttctttgtgttgacagacagctgtaaaatggtcaaggagaggtcactcctgtggcctggggtggggatggtgactccctgtgaagcccagggactccagcaggcctggccaccctggcctcatccctctctataggagacaggctgctacctgagtctgaaggaaagggcacaaaccagggcccatggccactggggagggtcagaggctgtggcctgggcgcctgcagtcctgggttttgttaccctctctgggctttggcttccttgcctgtgaaaggccaggggtgctctggccagcctctgggtccttcctgtctccgctcgtgctcgtgaaatgtcccagggcagagagagggaaaggtgagtggaaagagagggggcagaatgaggcttgatggggagtaggacagcaggaagctctgggtggcagagacccttcacctgtagtgcgctggcaggacctctccagaggtggtgggctgcaccctgggggttcaccccactctctctttccccccgtggctgaccctaggctccaggccacaggcagcctccttggccccagccacaacgaggccctgtcccggtggaggtcagcgcgggtttgcagcccttgtttctcatagctgatctgcctgctttggacaggcacctggcgcagaaccctttcatttgcgactgtaacctcaagtggctggcagacttcctgcgcaccaatcccatcgagacgagtggtgcccgctgtgccagtccccggcgcctcgccaacaagcgcatcgggcagatcaagagcaagaagttccggtgctcaggtacctgcccgcctgcccacctgcccacctgtccacctacctgcctgcccacctgcccaccggcctacttgtccacctgcatacctgcccacctgcccacctacccgcctgctcacttgcctgcctgcctacctgtccacctgcatacctgcccgcctacccacctgttcacctacctgcctgcccacctgttcacctacctgcctccctgccggcctgcctgcctacctgtctgcttgtctgtctgtattcagcctgctcagggaccccctgatgtttcctggatggctcccacaaaggtgtctttcattactgtgaacccagactggagggtgtgggcccaaaattctagacttgatctgaatggtagttcagtcccacctcattttattgaggcctagggaagaagcaaggcttgctgaaggtcccagagggaggactcaggtccctccacttttagccagttctcttttatgcctttgttgtcaagccttttaagacactcaggaggcctgggaaccctccttagtgagataggagcctcctccaggctttgggatgcagaaacagccttagcaattgtagtccacgtggcatctggctggggacagtgtggggcagcttctgagcctacatcctggtcaaggtcctgacgccacctgtaccccgtccccacctgtaaaattagcacagtccccacctcgtgccattgcgagtgagagctcgatggttttggcactccttgcgagaggtttaactggatgcgacacccccagtgtcagcctgggcaaggaacatgcgtgctctgtagctcgcccttctgcacacagggactgggcagatgggctcctcagccctgtctggggtgccttcagctgagcagtggggctggggcctgggctgttactgcaggtcctggctgattcctgcattatggtatttctgcttctcttcccagccaaagagcagtacttcattccaggtaggagagtggggggatccaaggccagcctggcgggaatggtggtagtgggtgggcaggctgggggccttggttgacccaaactgctgggagccggccccgggctcctcagcctctgcccccaccctctcatggcaggcacggaggattaccagctgaacagcgagtgcaacagcgacgtggtctgtccccacaagtgccgctgtgaggccaacgtggtggagtgctccagcctgaagctcaccaagatccctgagcgcatcccccagtccacggcagaactgtgagggtccctggcccccccagccctcccctgtccctaactgccactaaccctccttggcctactccaggattttcttggtccagccctgtctggggctgaaccactggagcctctggctcaggacataccaactgctggcttgggcaggaagaaaccccacccctgctgccctctgcttcattcacagcccccctcacccatcaaaagcagatgccagtctctggcactcagggcaggtcaccagcctgaatcagggatggcttttctcaacgatgcgtttgtcttattctgtgggacatgattccaaaactctttgttatttttattcctctatctaaaaatatgaatttgtgtacacatatgtctatgtgcatagatgcctgcaagcatctgtcatttacgtctgtaaatttttcatggcatttttaatgttaaaaatatccccattcatatcctctcccagtactaggcccagccttcctttgaaataggatcaatttgctttgccagataaattcttctgggagtcttctctgtttgagtcccaaatattctcagtttggaagggatttgaaatgtccatcatttgtgaatgtgcaagttcattcttgtctcttacaggcgattgaataacaatgagatttccatcctggaggccactgggatgtttaaaaaacttacacatctgaagaaaatgtgagttacccattggcgagaaggtgtctgttgggatgctggccagggatggacaagggaaatgccagggtgggggcagctcccacggcggggggccaggactctgtgtgtgggggtgttgcctgcaggaagggaggggcctgagctcctggctgctggccatatgtaatcctccccccgcctcttctcccagcaatctgagcaacaacaaggtgtcagaaattgaagatggggccttcgagggcgcagcctctgtgagcgagctgcacctaactgccaaccagctggagtccatccggagcggcatgttccggggtctggatggcttgaggaccctgtgagtgtgcagggctggggagcagggtgggccagctgcaggaggcaggcaaagccaagggaaaggaagagagaggctggaggagcccctcccctgggcccagcttgcaggagggtggggagaactgaggatcctgactgtgttgggacaggtaatcaagttggcaactctatggtgagacctgttctcttgtaccctggggcatggggccaatgcccagttggcctcaagggatggagacatgtggacccttctaggggtcccttcccattgccctctggtcaggctgcaagagcacagcatgagttcaggagtggctggcactgctgcaggcaggaggggctggatgaccttgccaaggtgattcagtgggtgtagataggggagcagggatgctgcactgtccctgagatgctaggatcccataacccacagcccagcctgagctgaccagaatctggagctcagtgggatcctggggtcatctgctcctccatgatgcaggacaccccctccatctgccccaggagggctggctcttcagatgatcctgagggtgtgtatcgtgtcccatagacagggcagtctgtcggatctcccacagagatggaaatgtttcaagtctacgctgtccagaccagtcacttcatgtggctgtggagcagttgaaatgtggctagtgctactcagtgactgaattttgaatttcattttattttaatgcatttaaatctaaatagctacatgtggctagtggctactatattggacaccacagctctaggaagccacttgcccaggtataagtcccaaatctgcagcaggatgtagagttgtctctgagcaagtaaatgaatgtgtgacaggactccctgtggatttttgttcctttattttacaaaaagcaaattttattatgcactatgttttgcagcttgctgttttcacctgtgaatacagcattgccttctttccaggctgttcctataggctgcctcatttttctttatgcttacctagtattccttaaatgtgggtgtgggggctgtccagtcagctgcattctttccaaggaagacttagataaggacagaggaaaagagaagggcccataccccatcactatccagaaatgaccactgttaattgttggtataaacaactgtctttccagtcttttacatatctctaaacctgcatacacatacatatacacacatacatacatacaagcatgcacgcatacagaaatattctaatggactcgtacattttatttagtaacctgctttttccttaaacttaatatgagcaccattacatattaaaatttttttccattccacatttaattcctaatacaaaaaaagtgctctgcatcagtttgaatgactaggtattatataattattggcaatgtaggctgtttctatttttttttttttataagcaatgttgtattgatacctgccttagtgggttcaggctgctataacaaagagccacagactggaggtttatagacaacagaagttctggaggctggaagtctgagaccagggtgccagcatggatgggttctggcgagggccctcttctgggttgcagacttctgacttctcattgtgtcctcacatggtagaaagagggcaagagagctctctgggatctccttgataagggcactaactccattcatgagggctccacccttatgacctcattacctcccaaagaacccccatcctgatcccatcacactggggattaggacttcaacatagggattggaggggatcacattcattctgtgacaatatctttattgtgaagttcacgtataatgcatgataatactcttgttaggaattcctaaagatggagtagtcgggtgaaaacacaaagtgtcattttggggattttgctacatctcaccaaatgcacttccagggaggtataaaggcatctcctgccagtgtgtggaagtgcccagtcactcacactctcagagatcctggatgtcattattattattattatatttttcattcttttttaatttggcaggcaaaaaatcaatattgcataagtgtctttgattagtagtaacattgaacatttttgtgaatgttgataaaccattttaatttcttttgtgagttggctaccctgtgttgacttggtttttgtttttacttttggttggcaagtgaaattgagctgggtttttgttgttattgttgttgttgtttagggagacagggtctcactctgtctcccaggcagctggggtgcagtagtgccatcatagcttactgtaaccttgaactcctgggctcaagagatcctcccacctcagcctcccaagcagctgggactacaagtgcacaccaccatgcctggctaagttttaaatttttttgtagagacaaggtctcgctatgttgcccaggctggtctcaaacccctggtttcaaataatccttggcctcccaaagtgctgtttttacaggcatgagccactgcatcaggcttgggctgggtttttgaagatgaacagcagcttttccagatgtagatgaggcaaaagagtattctagaaaactgtcacagcggtgtagcaggctgagggctggtccatctctagggaggcaggcaggtgccagggctgagatggtccgggtctgggtagacatggtctcaggtcacagtaaggagttcgagcatgactcggtgggcagtttggaggctgttagtggactttaagctggagagtgacatgatggattaggtttcaggaagtctcctgggcactgatgtggagcatggcctaaagacgggcaggaactctgggcacccagggcacggaggcaaggccagcatgggggacagggcagtggcagggagagagagacagagcctcgaggcttctcagaggcgggggcgggtctggagtgggcacaggtgtgtaaaactcgcctcacctggccggggcctggctggtgcgtgttcctggctctgcggctcgcagcctatggaggagaactgtgaacgagccacgatggcggaagctgcgtggcccaggtggatggctggcagggcagcaagggtcccctcctccctcccccgttcctccccagaatgctgcggaacaaccgcatcagctgcatccacaacgacagcttcacgggcctgcgcaacgtccggctcctctcgctctacgacaaccagatcaccaccgtatccccaggagccttcgacaccctccagtccctctccacactgtgagtccggcctccaggacaggcgggcgggggctctggagcaaccgtcccaaccgtctcggccagccactttgaaagagctcaccctgggggtgctgggtcttcgtggtttgctgaaacgtgggttccacatttcgaagtctccctccggtcctcagagccggtcctcttggtgatgggtggtggtctgggagacagtgccatgtggccatgtggccctgtgtccgtggtacaggaggggtttgctgggacctctgagaggggcagagtgtctccatggccgcctggcctgcctcttccaggaatctcctggccaaccctttcaactgcaactgccagctggcctggctaggaggctggctacggaagcgcaagatcgtgacggggaacccgcgatgccagaaccctgactttttgcggcagattcccctgcaggacgtggccttccctgacttcaggtgtgaggaaggtaactcgtggccccccggtggcaagggagagggcgccctgggtccaaccagtggggtggggcaggtgaggaagatgggagtggacaggcagcaccccctggcatgcccctgagaggagaggttaggtggggaggggaggccctgttttcaggaggagacgcgcctgcctggtggtgtctttgtgtggttataagagcaataaagttcctatccttaaaaaatgggaaagtatggataaaagaaggaaataaactttacctattattccatcgctcagagaaaacagttcccattttagtgtagtttctttctgtaagtttggtgaactcagacctgccttttggctgtccctaagcactctagactcatggggtcaccttatcttaatatgcaatggaacccttttgagtcccctcccccatatgtaggaaaccctggtcactctttgctccaatgccttgtttcctgggacttctcagggtagccccatccctcattttttcgccacagcaccaagcacggaaggtcactgtaggaagcagatttttctctgtgcagccatcccatccttagtgtctctcagcaccctgccgcagggaatttctccctggctgacctcagcttccagcccccttctccgcttctgggtgctaaggtgcctcccttctccctggtctctccctttcttgccttctaccccctgcagcctactcccagtggcagctccaccctcagctggcctggccaggccacgtggcagtggagagctttgactttcaccccaagaaacaccatcagggtattttctaaacaaaattaatgaattctctaagaatacttttgcttctgacttctaaaatttaaaaaagagtctatactatttacatatatattttattaatttatataataatagcttgcaagtctttttaaaaatgtctgatttgtttaaaacctaactatatattttgggcattttctcatgccattaactatcctttggaaacattattttttccaagatacggtttccttttatccttctttttacaaaagaaatgcatcctcattccttaaaacaacaacaaccaaggacaaccagaaggaggatttaaaaaagttactgacaggccaggcgcggaggctcatgcctgtaatcccagcactttgggaggccgaggcgggcagatccctgaggtcaggagttcaagaccagcctggccaacatgctgaaaccctctctttactaaaaatacaaaaattagccaggcatggtggcgcatgcctgtagtcccagctacttgggaggctgaggcagaagaatctttagaatttgggaggtggaggttgcagtgagccgagatcacaccgttgcactccagcctgggcaacagaatgagaatctgtctcaaaaaaaaaaaaaaaattaacgatttgcccactaccccccggcccccatgccccaactctggataactcctgtcgacatttgctatgtggctttccagatctttgctgtgtgctcatgtgcacaagtgtggcacacagaggatcttgcagggccacctgtgaaaacctttcaacaggatggaccgctatctggaaggctccacaattgatgtaagcagcccccagctgctggacattcagacaacctcccaagtcccgctccaatgcatcgtgctgccaggagcaccctcgtagatgctccctacgtatatattccactctcccctagaacagcttcctagaggtgaaaggatgtgaatatttctaagatgttgctgctgagagcctggtggccaatcgagcaggttctggaggcaggctgcttgctccaggctggggcaagtttctgaaccactctgcctttagtttcctcattgctccaatgggctaatagtaacacattcactagagagctgttctgaggattcagtgagttcacccttatcctgtggggcctgcacacaggcgacctgcataactgatggtcactgtcacccgggagcatgtgctaccagcatcccagtgtcctcaagaactccgaccgtggtgatattatcatctctctgacacccaatcagcagaaaggaaggcacagattttttgaatagatgaatgaatcaatgaagggatggtgtggtatcgagggctcggattttgcggcagccagacctgggctcagactctgcattgccttggacccactttatgattcaagcaaggtgcctaacgtctccagacctcaataaaatggaaattcatccacttgttcattcattcattcaactcatctgttttgagggctgctgcgtgccaggcactgcactaggcactgggctctatcagtgaaaaaaagaggagaaaagaggcccaggtctccatcctcctcatgcctgcattctaggggcgatgctgcacccctaactgtactgttaaggagacaatgtcgatccagtgcccggagtagcaggcactccggggatgggatggtgcgcggccatcctcctgttctactttgaccaggtccactttgagtttgaggagaaagagaccaactcaagacctattttaacctcaaaactgctccagggggcttcattcctggtggcggtggtggctggcggggaggtgtagtgcacagacttactgatggccaaggtactgtcagaggggtcttctgttctgagaggccccagagcatggccctgactgtaggaggccctacagcggcccgtccacctccctgacaggggcttcgtgccttcttccctaggccaggaggaggggggctgcctgccccgcccacagtgcccacaggagtgcgcctgcctggacaccgtggtccgatgcagcaacaagcacctgcgggccctgcccaagggcattcccaagaatgtcacagaactgtgagtagctcaaggccttgcccccttcacgtgggtccacaggacggggacagtgggggcatttcctgaggggctggggcctagccatgggaggaggaggtgaccaagagcaggcattagctgactaggagctggagttcgggctttgcagaaaacactgcctccagaaaggctttgagcttctctctgattctccctctgcggtcacctgatgaccgcatggcagcgagtgcttcctccctttaaactaagctccgcctttaaaatgaggagaaccttgctttcccgcctgtcattgtctcaggctcctgtgtcatgaagacacaaatgtgatttttgcaccagcagtgtagtgttcttcacatgaatctactatgacccagataacaaaaccccttttgttggatatttgtttccaatttttttttactgtcataaacagcaccagtgctaacaccccctcactgaaatcgccagtcagagagcggtgcgtttttaggactcttgctgccttttgcctgatggtcttccaagaaaatctgtttcctttgcactcccattgaccatgtgagaaggtggccttcttgcttccctgggtcagcactgagtatggtgctgaaatcctggctgattggtatttggtatctgagcacatgtggaggattggacatagatgcatttgacaaacaggaatggagagctgggacttcttcagcagacacctcccaatgaaagactctggccagctcctgacctctgacctcttcctgtgctctggggttgatccctccaggcctccaaagctgagcttttctccccccacccccaggaccagcgatgaggcttctatttgttatttcttgcattaccagcaaggctggccttttcttcacaagcacatcaaccactgcgggccttttcctgggcctggcctgccccgtcttcaccctgttttctactgcagagttagtgtcctacaaacctcatgagtccttgctttctccttggagcctcctagcagccctgagaataatgggatgggtggggcagcctaccttctttgactgaagatggtgaagttcagagcctgcgaaaatcttttaacttctctaaacctcagttttgtcatctgtgaaatgggactacttgggtatgtggacgaggactgcctcgaggatcaaacgagatgggtgggaagtcagtttgtatgatgcagagcgaggggtaaggatgagcacagccctccttttgctcctctctggggctttgggaagtgggggagagctgtcctgcaggctgtagttagttggggggtggagatcctgtgctggagctcagcttggctcagctcctggcattgggccactgcttagcaccttcaggctggaggcatgaatggtcaacaatgaagggaagagggggaggttcagagcatcttgaatcccaagctctatcctgtagaaatgggaaccttgggaagcttcgggcttaggaggatttcggtgggcttggttttaaggacagtgacttggatagcagtgagtagagtggaggccagaagggaggtccaaggtgcagagaacagacagaagaggctgcagcaggagcccgggcatgggtggtggtgcacagtcggcgggtggcatgagagtgcaaggaaagcaagctgtgagagagcagcggtggcactggctgcagagggaggaggagaagcgacatcagggtgcggagcctggaaggcaggaaggcagaggggtgctgatggaatgagggggaactggttgggcagtctggctgtgaatcagcttcacagcccatgccagcaggtggacagggggccctgggagctggcagggcccggtaacgtgcaaatcagatctatttggccaggaaagagcagagcagggaggggaaggcaggggcccagggagtgtccatggacaaggaggaggctgggagggtgagaagggaagcgagaagggaaccgagagaggccacgtgactattggctttttaccaagtcctctgggtggcacctccccagatggcttcaacaacgtacatattttctcctcccataagtgattctgggcccatcgtgtggcctatgtggaggagaggaaatgagagcgaagtccctggctgcagggaaggctgtccccagcatggggcaccaccagaggtggagatgggcactaacgccgctgtgttctctctgcagctatttggacgggaaccagttcacgctggttccgggacagctgtctaccttcaagtacctgcagctcgtgtaagtatccaggccgcttgaggacaggagggcctttggcatctaaccatcaggactccggctttcctggaatttcctacggacctcacttctgggcagatcctgcttcttttcctttccctgctcccctctgggaacagctgtgcctagagctgttttgccacctagtggccacgattggcaattacatagttccaggccatg

SEQ ID NO: 1674 - protein, 472 aa, Homo sapiens
MQKRWEGPGPPGGAERSKNSADLPALDRHLAQNPFICDCNLKWLADFLRTNPIETSGARCASPRRLANKRIGQIKSKKFRCSGTCPPAHLPTCPPTCLPTCPPAYLSTCIPAHLPTYPPAHLPACLPVHLHTCPPTHLFTYLPAHLFTYLPPCRPACLPVCLSVCIQPAQGPPDVSWMAPTKVSFITVNPDWRVWAQNSRLDLNGTEDYQLNSECNSDVVCPHKCRCEANVVECSSLKLTKIPERIPQSTAELNLSNNKVSEIEDGAFEGAASVSELHLTANQLESIRSGMFRGLDGLRTLMLRNNRISCIHNDSFTGLRNVRLLSLYDNQITTVSPGAFDTLQSLSTLNLLANPFNCNCQLAWLGGWLRKRKIVTGNPRCQNPDFLRQIPLQDVAFPDFRCEEGQEEGGCLPRPQCPQECACLDTVVRCSNKHLRALPKGIPKNVTELYLDGNQFTLVPGQLSTFKYLQLV

SEQ ID NO: 1675 - DNA, 6205 bp, Homo sapiens
  source (1)..(6205)
  CDS (201)..(394)
  CDS (575)..(856)
  CDS (1276)..(2311)
  CDS (2972)..(3605)
  CDS (3962)..(4388)
  CDS (5768)..(6005)
tgaaaaggaaagaacacagcctccctgcgagctcgctcagggccccgagtcaagccccaaccgctcccctccttcaggccccaccgtctgacaagcgggcttgcctgtctgtcctacagagggtaaactgaggctgtggggctgatgcagcactggggcctggcctgctggcccagagtcctgagtgcctggcctacagcatgggggtcccctctgccccgttccctccacgcccggccctcctgggcgcgcccctcgccgcctgcccctcgccaactgccttgtctttccctccgcagtcggcctggagattctacgccaccaacctctcgcgcacagacctgcactccacgtggcagtactacgagcgaacggtcaccgtgcccatgtacaggtaccgccgccgggcacctgccaccaagcaactgtttcattttttattttccatttgttcttaaaccccactttttgttgttcattattttgattgattttttttctttaaaatgtatttttcacaaaggagttctgtgtgtggtttatttcgaggcgttgcttctgccctttgtgttagagctgcggctttctcttcactttcatttcctcacccctttgctttatcgtcctggccgtgggtcgtgctgtgttttgtgcgttgcaaggacgctccccagggagctcaaggtaaatgccccccgccccgggctgctctggaccgacagctgctccccgggctgctctggaccggcagctcgaggtgcccaagcttcaagagtggaaccagtaccatgaccccgtcccccatcaaggacctagggctccggcgtggggggcaggaaagtaaccccggatcacagtgagactttcagaccaggaaactcaaattatcctgggggtcccaggtgttccccaacaggacagagcacacagacaaccttggagcccctcgggcagcagagaagggggcctagaaagtgcctgtcgaggcagtgctagcaggtcctgtgagcctgtgtggtcggagggcggctttcccgtgtttttttgttttacaaaagggcaggtggcagccagctgggattttcgttgcctggctcttgcttaaattaaggtctgagatgaggggttctgagggcctttctcctggtccacgcgggcctgacccctcgagtccgtctgtgtgggcaccaccttgcccgcccgccctctgctctgaggtggggaactgagccccgggacttcccagctcccgcgccccccgtcacctgctcctagggggtttctgtcccctggagccttccctaagggtggggccttccctgtgggtggagccttccctgagggtggatccttccctgggggtggggccttcccagagggtggagccttccctgagggtggggccttccctgagggtggggccttccctgagggtggagccttccctgtgggtggagccttccctgagggtggagccttccctgagggtggggccttcccagagggtggggccttccctgagggtggggccttctctgtgggtggatccttccctgagggtggggccttcccagagggtggagccttccctgtgggtggagccttccctgtgggtggatccttccctgagggtggagccttccctgagggtggggccttcccagagggtggagccttccctgtgggtggatccttccctgagggtggagccttcccagagggtggagccttccctgtgggtggagccttccctgtgggtggatccttccctgagggtggggccttccctgagggtggggccttccctgtgggtggggccttcccagagggtggagccttccctgtgggtggatccttccctgagggtggagccttcccagagggtggagccttctctgtgggtggagccttccctgagggtggggacttcccagaggctggggccttccctgtgggtggatccttccctgtgggtggagccttccctgtgggtggatccttcccagagggtggagccttccctgtgggtgtggccttccctgagggtggggccttccctgtgggtggatccttccctgagggtggggccttccctgagggtggggccttccctgtgggtggggccttccctgtgggtggagtcttccctgtgggtggatccttccctgagggtggagccttccctgtggatggggccttccctgagggtggggccttccctgcgggtggggccttccctgtgggtggatcctaccctgagggtggagccttccctgagggtggggccttccctgagggtggggccttccctgtgggcggggctttccctgagggtggggccttccctgagggtggggcaggtgcacagtgtggctgggaattctaagctggggtggggcccaggattcttcttgaggatcctgagttggccagggtggacagacccgcggcagtcctcagttgctacctgccttttcagggtgtcacttgggaggaggatgccagagcccttggcggtcctcgatgtttgcagtcgccctctggggtctgccccaacccctccctcagcaccatcccccctgcacctcctggaagcccgaccttaggagcctggccctgcttgtctttcctgggaatgtcggccatgcccttgtttctgcaaagtgacctctctcagcccagggcagggacagaaccagcccttgtgctaattttctttgttctgttgtttcccctactttcctcaactatttgtttcattttctttttcttatcccgttctttttgaaattttccgttcttttccctttgtgtgtgtggaaacacttgaaagttcgcaaactcaaacctacggggcctccaggtaggaaatgcatggacagaagccctgtgtgtgtgtgtggttctagttctgtgtctggaactgtgaccgggcaagcccctggagccccgtggcccacccggtctgcagagtgaccactgtccctgcccaccgagcatccctatgccccctgccctgcgtggccccatgctgggcggccagatcaccctgggccctcccctgcctggagcccacgtgccaaccctgccctcccagggcccatccacccttctcgtcctgcctccccccagccgctgcttcctgttgccagcccgcctgtgtcccccgtggtctcgttctgtcctgcttctggcctggctcccctcgtgcctccatccccaccccacaggccccatctgtgagcagagcaggaatgatggatggggggcttcccctgccctggcgctgggcacccatctggggccaagggtgctcccaggccaggacccccagaccagccacagtccttgtcccaccgtggctcacagggcagcctctgcgggccagctagcctcaggggtctgcctcagggtctcctgccctggactcaagtttctcctgagtcttgccctggcatcacaggggaaccccagggctccaggccgtcccacccctgtccccactgctgagagcaggaaacaaggctgtttgttcagactggagagcgctgagctgctatgggaagcctcacccccatacagcacaaagggcctttacctgtcgggtgggcaggcttgtgctctgtgatgacactgccctgcagagcctggggccagccactccccacatagaccagaagggcttcctgcacagaagcccttgatgactcctccaggggccagtcacccgtcctggaggagagacctggctgcccttcctgggaactgttagaatgttgactctccattcccagaaaggaagtgggtgcagtgctgggcagtggtgggtccagggctcctctgcccccgacatgctcagccataagacatctccaatgtctgcagaggccctgctgcccctggggccaggaggctggcgctgaagccggctgcctcctccccagcctctgctctctcccagggccgccccctccccttgttgcaccctcgtcccacagctccgtcctgccctggccctgccgcccgcctgtctgccctggcgctgctgctctgtgtgttcgaggcatggcctcctatgtggctctgagggctgacgtgtgtgtctctcacctgggcctgcgtgcgtgtgggtcccatcaaggaggggtggggagccacctgtggcccccagacagactccggccaggctgggctctgctgcgcccacaacaccagctcaccagctgcctggttcctgctccatcccgacttggacagcggactgtcctctgcagggagggggctcacaggagccccactcctgccagcattttgggggcacctctggggctgcagagggaacaaagaggggccaggcacggctttaccagctcacacctgcctagcctgtgggggggcaccagaggctggtggggtgcagggaggggcttctggacagctctggagggaggagtgtggctggacgaagtgggagtcggcagtagggtgatcaccaagccctgagggacaatggagtcagccatccttttgctttggaggcagtggggagccattgagtgtttggtcaggagagtggcaaggatgcccatctggaggaccaagtaagcctgggtgggcagaggcagggcaggtgaagagtctggaggatgtgggccacggcccagcctggggcagagggaggacacgggcaggggcatctccagggggtggccgtggccatagccgcgtagggagtcagctgggtgagggctgggctgggaggtggccgtcctgcctccaacgcagaggagagaccaggacgtggccccagtggggagtgctccacaggtgggtgtggggaggggtggaggccgtggatgggatggcagggcctgggagcagaggctgaggaggcggagtggagggggttcaggtgggtcagggagccgggtgggggaggccccagaggagggtgtctcttcctgaagcgagctggaatgctgtgagggcatgggtggtgaggaggagtgggcagagtgaggtgggtgggagtggggaggggtgaagagggggacgtcccacccagacgtgaggaggtgcctgcatacctgcctggggggcttcggcgggcccggacttggtcctgctggtggctgtgggcggcagggcaggaagacaggggtgggtatgaccaggactgggaagggggctcggagcagagctgggccacctgcggaggattcccaaggcatctgggcctgatgaggctgggctcatcctatagactccagaatgagctgctctttgccaagcagaatccttttctgtatccccacctcccaactcctccagctttggcagagaaagtggctgtgtagagaggggccggggccctaaatatattcgcgtgctgtccctctaggatgttcagggattagaagggggagtagcgcctccccctacctgcgcgccctcctccacctgctccaggctgcagggtcggggctgcatgggtggccaggcgccctcttccctcctccctgctgtccctgctggttgacaaggccccaggcacagccagagaatgaagatggctcccaggcctgcccaagagaggtgggcctgagcccagggcccagtgggcagctgcctgaaagcctggccacgtcacatgccgccgggtgtctgacactgcaggcgcctgcccatggagctgtgcaagcagagggaggtgtcccaggactcgggagggtgagacgctcactcccctctccttctcttgccccagacttatccccccgctgaaccagctggagctgctgaggaacctcaagagtaaatctggactcgctttcaggtcagctggggagctccaggtggggcgggtgggcgtctcagtcctcctgggggccccagctgcccacagaagacacgccaggacagtgccccagggactccagggagctgggacgcgcggggacgctggacttggtgatggtggtgctttctcttttcgcgtctgctgacctggtctgggctcccacccccagaggggcagctggttcgggggacgggcagagagggaggggcgaaggttgatatggggccgggggctctgcatggctcctaatggggcccaggcgcgtgggtcgtacgacaaagtgtcccagcccgtcgtcctctcgagtgcctggtggtaactcaggtgctgatggcgcctgctgcc

SEQ ID NO: 1676 - protein, 936 aa, Homo sapiens
MGVPSAPFPPRPALLGAPLAACPSPTALSFPPQSAWRFYATNLSRTDLHSTWQYYERTVTVPMYRAAAFSSLSFPHPFALSSWPWVVLCFVRCKDAPQGAQGKCPPPRAALDRQLLPGLLWTGSSRCPSFKSGTSTMTPSPIKDLGLRRGGQESNPGSQGFLSPGAFPKGGAFPVGGAFPEGGSFPGGGAFPEGGAFPEGGAFPEGGAFPEGGAFPVGGAFPEGGAFPEGGAFPEGGAFPEGGAFSVGGSFPEGGAFPEGGAFPVGGAFPVGGSFPEGGAFPEGGAFPEGGAFPVGGSFPEGGAFPEGGAFPVGGAFPVGGSFPEGGAFPEGGAFPVGGAFPEGGAFPVGGSFPEGGAFPEGGAFSVGGAFPEGGDFPEAGAFPVGGSFPVGGAFPVGGSFPEGGAFPVGVAFPEGGAFPVGGSFPEGGAFPEGGAFPVGGAFPVGGVFPVGGSFPEGGAFPVDGAFPEGGAFPAGGAFPVGGSYPEGGAFPEGGAFPEGGAFPSDHCPCPPSIPMPPALRGPMLGGQITLGPPLPGAHVPTLPSQGPSTLLVLPPPSRCFLLPARLCPPWSRSVLLLAWLPSCLHPHPTGPICEQSRNDGWGASPALALGTHLGPRVLPGQDPQTSHSPCPTVAHRAASAGQLASGVCLRVSCPGLKFLLSLALASQGNPRAPGRPTPVPTAESRKQGCLFRLESAELLWEASPPYSTKGLYLSGPPPPLVAPSSHSSVLPWPCRPPVCPGAAALCVRGMASYVALRADVCVSHLGLRACGSHQGGVGSHLWPPDRLRPGWALLRPQHQLTSCLVPAPSRLGQRTVLCREGAHRSPTPASILGAPLGLQREQRGARHGFTSSHLPSLLIPPLNQLELLRNLKSKSGLAFRSAGELQVGRVGVSVLLGAPAAHRRHARTVPQGLQGAGTRGDAGLGDGGAFSFRVC

SEQ ID NO: 1677 - DNA, 9851 bp, Homo sapiens
  source (1)..(9851)
  CDS (201)..(581)
  CDS (2244)..(2394)
  CDS (2475)..(3642)
  CDS (4153)..(4238)
  CDS (4840)..(4953)
  CDS (5064)..(5179)
  CDS (5444)..(5833)
  CDS (6503)..(7011)
  CDS (7503)..(7674)
  CDS (7925)..(8081)
  CDS (8179)..(8325)
  CDS (8393)..(8945)
  CDS (9525)..(9651)
  modified_base (1066): a, t, c, g, unknown or other
  modified_base (1068): a, t, c, g, unknown or other
  modified_base (1094): a, t, c, g, unknown or other
  modified_base (1097)..(1098): a, t, c, g, unknown or other
  modified_base (1100)..(1101): a, t, c, g, unknown or other
  modified_base (1126): a, t, c, g, unknown or other
  modified_base (1129)..(1133): a, t, c, g, unknown or other
  modified_base (1135)..(1139): a, t, c, g, unknown or other
  modified_base (1141)..(1143): a, t, c, g, unknown or other
  modified_base (1189): a, t, c, g, unknown or other
  modified_base (1191): a, t, c, g, unknown or other
  modified_base (1196): a, t, c, g, unknown or other
  modified_base (1213)..(1214): a, t, c, g, unknown or other
  modified_base (1245): a, t, c, g, unknown or other
  modified_base (1250)..(1251): a, t, c, g, unknown or other
  modified_base (1260)..(1269): a, t, c, g, unknown or other
  modified_base (1271)..(1274): a, t, c, g, unknown or other
  modified_base (1278)..(1377): a, t, c, g, unknown or other
  modified_base (1438): a, t, c, g, unknown or other
  modified_base (1441): a, t, c, g, unknown or other
ggctgcgggtgccaggtgcccgtgctgcagggggcaggcagggcccgagccccacggctcccaccttgtctctttcacagacgccaatgagtgtgaagggaagccatgccttaacgctttttcttgcaaaaacctgattggcggctattactgtgattgcatcccgggctggaagggcatcaactgccatatcagtcagtatggggggtgggcgccggcgggtgggccgaggcacatgggaccccgcctctgaccctgctcctctgcccccagacgtcaacgactgtcgcgggcagtgtcagcatgggggcacctgcaaggtgaggcggggccaggagggtgtgtggcgtgggtgctgcggggccgtcagggtgcctgcgggacgctcacctggctggcccgcccaggacctggtgaacgggtaccagtgtgtgtgcccacggggcttcggaggccggcattgcgagctggaacgagacgagtgtgccagcagcccctgccacagcggcggcctctgcgaggacctggccgacggcttccactgccactgcccccagggcttctccgggcctctctgtgaggtgaggtctgcctggtcaccctgccccacctgctgctctgggagctgtagggcaggcctcgtcccctgaccatggggcctgagtgacccaggggtgctgcaggggaagttgtccccaaggcgtcccaggctcagctctccactgggtgccaggtgggcaggcggggctgtcacaggtcaccaggcttggccccctgtggccattgcttgttgtgatgggtttcctggtggcctgggctaggagcccccgggctgctggctgcccaggcctatctgtccatctgtgcactccctcgggactggagggcagggggctctggtgggcagagcacatggggtagggtgggtgcctgatggtggagaggtatacacctgtcataggtgagtcctgggtcggagtgggcatctctctcagggctgatgctctcgcctccctctgaccatctgttggtaccgggcgcaccccacaaactcaactcacccaancncaaaaaaaagccaaaacccaacccanacnntnncaccctctcccactacccctccccnttnnnnnannnnntnnncatacattatattacctatctactcttcaaccttctcccttatatntntatantatttttttattatatnntttataaatttatatattttttttaattttntatanntttaaatannnnnnnnnntnnnnttcnnnnnnnnnnnnnnnnnnnnnnnnnnnnnnnnnnnnnnnnnnnnnnnnnnnnnnnnnnnnnnnnnnnnnnnnnnnnnnnnnnnnnnnnnnnnnnnnnnnntcgtttttcattatggcaccgctcttctgttttttctattcacacatggggccagaggggntgnggcgccacgcactacattactttctttcccccttccccaacaacactcccacccccttcctcacctcccccttccgcacatacccacaccattcgtccccccacccacttcactatcaccattcccctactcccccaaccctgcctcactccacacacctccctaccacccccttccccacctcccccaaccctgcctccccccacccacctccctaccacccccttccccacatccccaaaccctgcctccccattacttgcctccctaccaccccctcccgttacttcccctttttccctgcatccccccacccacctccctaccaccctcggccgcccacgatcctgccctggccttggtgcagaggatgggcctcctgtccagagggcttcttggggcccagggcaggggtctgacctcaggacctgcaagcatggcagtggctggccctggaaaagacccacagtcttggctctgagggtggccaggcagtgtgtgaggggctcaggagctgtccttcctgccagcagcaggggccaaggccacactcctcccgagggacagtgaggaagctgggctgcagtggaggtgggggtgggggcccacaggtatctgcgttcagctaaggcctgggcagtctcaggtgggcaggggtcttgggctctggctggcactgttaggcccagggcggaggggcctgggggtccccagggatctaccttcgtatggacagaggcctggcctgtgttcccggcctgggcctgggcctaggctctcacaggcaccccccaccctgcaggtggatgtcgacctttgtgagccaagcccctgccggaacggcgctcgctgctataacctggagggtgactattactgcgcctgccctgatgactttggtggcaagaactgctccgtgccccgcgagccgtgccctggcggggcctgcagaggtgctgggtgcggcatggggtggtgggggaggtggtggggcaggggcgggcctgactcctgactgtactgcctgccatagtgatcgatggctgcgggtcagacgcggggcctgggatgcctggcacagcagcctccggcgtgtgtggcccccatggacgctgcgtcagccagccagggggcaacttttcctgcatctgtgacagtggctttactggcacctactgccatgagagtgagtggccacgaacggcgggctggtggtggggctgggctggcctgaggccctggctcaccccgctcgcctctgcagacattgacgactgcctgggccagccctgccgcaatgggggcacatgcatcgatgaggtggacgccttccgctgcttctgccccagcggctgggagggcgagctctgcgacaccagtgagtgttccagcacccgcccacacggcctgtgcctccacccctgtgggccccttatcaccctgagatggaccgctgtctgggtgcggcaggccccgtacccagaaaggcctggccagggggtgctgccaccatggggtggagtcccaggctgcccccatgcccgaggccagctcccccggcccgacgctcctcccccgcccctctctgtcctcacctggcccagctccagtgcttcctcccccgggaagccctccctgagcgccggtgaccccccgcccgctgaccggcgtcctcgcccccagatcccaacgactgccttcccgatccctgccacagccgcggccgctgctacgacctggtcaatgacttctactgtgcgtgcgacgacggctggaagggcaagacctgccactcacgtgagtgtccgcaggccctggccgcctggggctgcccccaggaccctggccctggcggtctggggcctgcctgctgagcggcccatgtgccaacaggcgagttccagtgcgatgcctacacctgcagcaacggtggcacctgctacgacagcggcgacaccttccgctgcgcctgcccccccggctggaagggcagcacctgcgccgtcggtgaggagcccccgctgcctctgcgaccgccgggcatatgccctcccaggcaccgctccctcgggcgcgatgggccgaggggtcttttttgagggccacacctgccacctgccccctgccccctgcccccgggtctgtctgccctgtctgggttgggggcgcggtatggagacccagggccagcccagggccaggtgagacgctccctcctcctcctcaccttacagccaagaacagcagctgcctgcccaacccctgtgtgaatggtggcacctgcgtgggcagcggggcctccttctcctgcatctgccgggacggctgggagggtcgtacttgcactcacagtgagtgtgggaggggtgtgggcgggggccgctttcctccacccagatgacatccctgcccccgactcgccccccagtcccttctgccagcccctccccctgctgcccctgcccccagcaaaaggcaccctccttgatgaccctccccagccccacagcctgatcacgccaagccagcctggacagtgcctggcacgcttggggggtgggtactgatcccctgcgttctcttctcccaaaccagataccaacgactgcaaccctctgccttggtgagtggcaccctgggggccacagcaggggtgggtgggacttggcatacaacggggggccacctgatgcccaccctctgctctgcagctacaatggtggcatctgtgttgacggcgtcaactggttccgctgcgagtgtgcacctggcttcgcggggcctgactgccgcatcagtgagtggccagacagccccagccctgggagcccctcagcccagccgcggtgtcaggagtctggggacatcaacgtccacgtcccttgaagggcagtgtggccacaactacttcctgcctctcttctgagcctcagtttccccacatgtctgtgccctgtggggttcctgctgtataccctgccaagtgattaagtggggagccccagcctgggggaccagtccggggcccagggagctgtgggggttggagcgtgcagcctgacgtgggctcctctgtggccgcagggctgttgtccctgggtgttggcccagctgtctgtccagcaccccttggctggtccgacgcagcagctggggctaatccaggatgggacaggcccactgcagaagcagacggaggagggtgctgttgggccagggtcaggctgggctcaggaaggcctcaggcaggcagcagcttgggctcgggggcaggggctgctcctcattgtcctggggcttgcgcctgtgtgccactggctccccgctgccctaggccatgccggtcctgcggtgggcgttggcctcactgcactgagcagcggtggctctccctgcagacatcgacgagtgccagtcctcgccctgtgcctacggggccacgtgtgtggatgagatcaacgggtatcgctgtagctgcccacccggccgagccggcccccggtgccaggaaggtaggccccgtgtgattgccctgggttggggcgggttggggggcatgggtgacacccagccccgagggccagatgcccactgctgaccctcgagccccttctccccacagtgatcgggttcgggagatcctgctggtcccggggcactccgttcccacacggaagctcctgggtggaagactgcaacagctgccgctgcctggatggccgccgtgactgcagcaaggtgagggcagcccgtgagccgccctgccctacccgaggctggtgcacgctgaccctggccactctgtgagatcaggaggcgggtgctggggtccggatggactgagagccgtctgccctcagggacacccagggaggcgagagctcagccaggccccatgcttcgatgtgcagttgggaaaacaggcctggtctgggtcctgccttgctccgcctgccctttctgatgtcgagcttggcctgcctccctgggagccctgggtagggggtgggctgggccctggggctcacagacttgggcggtgtccctccttggcatggggcccgtgcctgcctgtgggttctcatctgtgtgcctgcatctgaccctcctgtgcgcctgcgcctgaccctcctgtgcgtgcctgcccaggtgtggtgcggatggaagccttgtctgctggccggccagcccgaggccctgagcgcccagtgcccactggggcaaaggtgcctggagaaggccccaggccagtgtctgcgaccaccctgtgaggcctggggggagtgcggcgcagaagagccaccgagcaccccctgcctgccacgctccggccacctggacaataactgtgcccgcctcaccttgcatttcaaccgtgaccacgtgccccaggtgaggggcctggtggcatctgagcttgcagaggccacacgccggcatctgctcgtggcatggcgaaagcctagccccgcagggcagggaggccctggttggctgagcagagtcactcttggtcacagagagtggccctgtggggtcagatgagaggggcattgggcctggtgctgggtggaggtggcagaggaggctgggagagcagccagctgggggtgcctgtttgtccagctgccctgagggcctggactgacggcgccatggctgcctggccccagctcttgggctgtagctccgtgggcagttttgccctggcctaggagccacctttgcctgctgtgtgcttggagctgggcccctgtctcccaggaggggctcagaactggaggagacccactgtaccccgccctgcctctccttcccccactggcctgcaggtggagctgggtccgccctgaggatgggcgggtgggcaccgtcactcctgcctcctggtatagggcacagccgggtgggaagctgcccccccaggcccttggcatccttgctgtgctctcctgggcgggctgtagggtgtgtcccacgtgtacccacagcgccagtccagggatgtaggtgtcaggttcacggccctgccctgcccacgcactgcctgtctctgcccagggcaccacggtgggcgccatttgctccgggatccgctccctgccagccacaagggctgtggcacgggaccgcctgctggtgttgctttgcgaccgggcgtcctcgggggccagtgctgtggaggtggccgtggtgagtgcccagtggggagcagcacctgggtgggccctgggtcccgtactatgcaggtcctggctatgctggacagaggctctggcgaggctagtcctggtgcggaaggactgcgggcaggcctgtctccctgcggcccctcgctgtccatgccgcagacccgtggaactgctccctgggcctggccagcatgagggagatgcagggctgtggtgtggagcccgcttcccctgcagctgcatcctcgcccggtcccctgctctgtttttgtctctgtgtccctacgtcacaggcagcaggagagtccgtgggcttagtctgccctgggaggcctgctttgggactggcacctgccctggacctggggggtgtcagatgtgaatggataccaagggggtcgggtgagactggggtggagacatgcccggagaggggcgggaatgttctggaacatggtgggtgggtgtgcagagcagtgggtgtggccatggcacagtgtggctggtggaggccatggccaggcacaggaaggacgtgcagtgttttggtgccctgaggccgcagagggggtggggaacatggatgggtgctgctgggtgatggaagggcagtaggggcagggggagatgtaagaagtgtgccagcacaggtcagggcgccatcagggatgtggtggaggcagggcacagccccgggttgctgtggcctcgtgaaggcactaggtttgtggtgcccctggggtgtggcccataggtgggggtgggggctgggaactgacaagaagggatggccatcacggagcaggtgtcagcgaatggggccacacacctccccaactcactgcctggtggcgaggtccccaccgcaggaccccgggctctcctgtgtgcccggacggggacaccctccacccctccacttccccccacccctcactgcctgctggtgaggtccccaccgcaggaccctgggctgtcccgtgcgcccggatggggacatcctccacccctccccttccccccactgctcgctgcctggtggtgaggtccccacacctcaggaccctgggctctcctgtgtgcccggatggggacagcctccacccctccactcctccccccgctactccccactcactgcctggtggtgaagtcgccactgcaggaccccgggctctcgtctcccgtgcgcccaccttgctccagtgtggccagggcctcagtgttgggggcaggctgctgggagcctggagccctcgagccatccccacaatgccgttctttgccgcagtccttcagccctgccagggacctgcctgacagcagcctgatccagggcgcggcccacgccatcgtggccgccatcacccagcgggggaacagctcactgctcctggctgtcaccgaggtcaaggtggagacggttgttacgggcggctcttccacaggtaagcgcgggaggtgggcccctgggaaggcaccaggcaggcaactcaggcattgggcacagagccggccgatcctgccgatcctgccagccaccaggaacacagaagtccctggcacctgctgccccagccgcccagccccacaacctgaccttcccagcccccgtcctgggaccctccccacgagccagcaaccggagggtgggcccggccgccgatgcccgcagggccctcccaggcctgggtgtgtggctagtgccccgcaggtgcccaggcctcattgcccaccggctcttctccccggtccccaggtctgctggtgcctgtgctgtgtggtgccttcagcgtgctgtggctggcgtgcgtggtcctgtgcgtgtggtggacacgcaagcgcaggaaagagcgggagaggagccggctgccgcgggaggagagcgccaacaaccagtgggccccgctcaaccccatccgcaaccccattgagcggccggggggccacaaggacgtgctctaccagtgcaagaacttcacgccgccgccgcgcagggcggacgaggcgctgcccgggccggccgccacgcggccgtcagggaggatgaggaggacgaggatctgggccgcggtgaggaggactccctggaggcggagaagttcctctcacacaaattcaccaaagatcctggccgctcgccggggaggcccgcccactgggcctcaggccccaaagtggacaaccgcgcggtcaggagcatcaatgaggccgctacgccggcaaggagtaggggcggctgccagctgggccgggacccagggccctcggtgggagccatgccgtctgccggacccggaggccgaggccatgtgcatagtgtctttattttgtgtaaaaaaaccaccaaaaacaaaaaccaaatgtttattttctacgtttctttaaccttgtataaattattcagtaactgtcaggctgaaaacaatggagtattctcggatagttgctatttttgtaaagtttccgtgcgtggcactcgctgtatgaaaggagagagcaaagggtgtctgcgtcgtcaccaaatcgtagcgtttgttaccagaggttgtgcactgtttacagaatcttccttttattcctcactcgggtttctctgtggctccaggccaaagtgccggtgagacccatggctgtgttggtgtggcccatggctgttggtgggacccgtggctgatggtgtggcctgtggctgtcggtgggactcgtggctgtcaatgggacctgtggctgtcggtgggacctacggtggtcggtgggaccctggttattgatgtggccctggctgccggcacggcccgtggctgttgacgcacctgtggttgttagtggggcctgaggtcatcggcgtggcccaaggctggcaggtcaacctcgcgcttgctggccagtccaccctgcctgccgtctgtgcttcctcctgcccagaacgcccgctccagcgatctctccactgtgctttcagaagtgcccttcctgctgcgcagttctcccatcctgggacggcggcagtattgaagctcgtgacaagtgccttcacacagacccctcgcaactgtccacgcgtgccgtggcaccaggcgctgcccacctgccggccccggccgcccctcctcgtgaaagtgcatttttgtaaatgtgtacatattaaaggaagcactctgtatatttgattgaataatgccaccattccggcctcccttgttctttcggtgctg

SEQ ID NO: 1678 - protein, 1356 aa, Homo sapiens [sequence omitted]

SEQ ID NO: 1679 - DNA, 1152 bp, Homo sapiens
  source (1)..(1152)
  CDS (201)..(592)
  CDS (781)..(952)
caatctcatgaggctcagcaggaacctctgaggacagagggcaaccctgactctcctctccagacctggtatgttaccagcctttgtttttgcaggatgtgcgcaggcagcaaaggtagcccaccatagcctagcttctcgcaaccctctctggaaagctggattgggacaatgagactgagacctcaggacatgtgaacatgagccatacgggaggtgagtggttggtggacaggcaggtggtcttctccctgacagtgctggtggccctctgtggactggtaggcaatgatgtgatctgctggcttctctactcacaggtctggagcagcccctatgtgacctacatccttaacctggccactgttgatatggtcaacctctcctgtgtaactgtgatcctgctggagaaaatcctcatgctgtatcaccaggcggcattgcaggtggctgtgtttctggatcctgtctcctatttctccgacacagtgggtctctgtctcctggtggccatgagtattgagagctttctctgtgccctctgtcccacctggtgctgccaccgcccagagcacacctctgccatggtgaggtgggccctggccctttctttgtatgcagttagccaggtctgtgagtactgggagaagtgcttggcatgtgaccaatttcatgaggctttatgacatgtcatgtacttatttgctttgtaatgggcatgtccaagctgatcctgatcatctggggtctgtgctgtccccagtggtgttcccccatcaggacctatcatgttgtctgctttgtgatcatcagcttcttcctttgggtcctgcccttagttgtccttgtgtgcctgccaggaaagtttctgacccttgcctttgacctcctgttgctactgtccattgtggtcagcatgcctcacctagtcatctacttcttggctgagtaactctacaggaagaggcacagggagtccctaaaggctgtttttcagagggctttgttgagtgagatggaggcatggataaaatgaggcgtttcaggcccctgatcccagggcagatttcagcctcacagctggaaacaaactgctcttctagggggctcagctcctccacaaaggcagggactgcctatgcacaaggctgt

SEQ ID NO: 1680 - protein, 187 aa, Homo sapiens
MSHTGGEWLVDRQVVFSLTVLVALCGLVGNDVICWLLYSQVWSSPYVTYILNLATVDMVNLSCVTVILLEKILMLYHQAALQVAVFLDPVSYFSDTVGLCLLVAMSIESFLCALCPTWCCHRPEHTSAMVRTYHVVCFVIISFFLWVLPLVVLVCLPGKFLTLAFDLLLLLSIVVSMPHLVIYFLAE

SEQ ID NO: 1681 - DNA, 1888 bp, Homo sapiens; identical to SEQ ID NO: 1563
  source (1)..(1888)
  CDS (201)..(1403)
  CDS (1524)..(1688)

SEQ ID NO: 1682 - protein, 455 aa, Homo sapiens; identical to SEQ ID NO: 1564

SEQ ID NO: 1683 - DNA, 3160 bp, Homo sapiens
  source (1)..(3160)
  CDS (201)..(285)
  CDS (2374)..(2960)
gtaagtcacctctccccttgaaactcttttatctataaatctcctttctttgttggggaccagagcccaactgctcctgcttggtgccttggtggcctggggtgggccacggaggtctgtttgcagcttctcttctgtcatcatcacgagttctgacaccctggcccaggcacagaactgcaggtcaccctgatgtttccatgggcaccaatgttaccaagccccaagactcatcctatgaccagattagatctgagccagatctgcggtcctccctggcctcaggtaagagtgtctaggtaacaagtgcagggaggggaggggctggggctggacccttccatttcaagagagctgccaactgaaggggactccatcatcccagcaaggagggaagattcaaacactgggctcacttggagctggtccctagcattctcctaaaccctgctgatgcaccaatatgtgactgcaggccacaaggtcacctgtggaatatttccaggcatatcgcaggcatttatcagttagtttgtggaacaagctctgttctagaagcttctgtgattcagaagcaaagcttcagcagctcagggttgtagaaccaggtagatctcactgttctgagactttccataattccgtctgtaaacttttcatcataaatgtgatcatcagttcaggctcccatgacagagatcacagactgagtggcttaaacagcagaagttcattctctcagttttaggaggctgaaagtctgagatccaaagattgccgggatcatttctttccaaagcctctctccttagcttgtagatggctgccttctccctgtgtcttctcatggtcatccccctgtgggtgtctgtgtcctaatctcctttacttatgaagacactacccctattggattagggcctaccctaatgacccatctaaacataattacccctttaatgtccctgtctccaaattcagtcacattctgaggtactgggatagttcaacatatgaatttagaagaatacaattcatcccatagcagcagcccttacttagatggggatgctgaggcaaagaaagagtcagctactatgaaaaagagctgggatttgcccccaagaggtcagctctcacagtctcagcatgaactcctcagatcactgggtttaaccaagctgtgggattccagaaggggtactgaccttctcctgtttaactttcaagttgggcaacaaaccaccttggttttcctagggctatgaggattttcaggacaagagatgttcagagcttaaactgggaaagtcctaggcaaagcaggataagttggtcaccctcccctcatgattctacaaagaaagacctgtgattggcaatgtggaggagagtgcctgctcctgttgtggacgtagcccagggttcaggtgtgagtctccctcaggagtccaagaagcctttttttttaaatcagtttgcggaacaagctttgttccagaagcttctgtgattcagaagcaaagtttgcttttatgaagaggtcaccagcacttccccaagtgtaactgagctgcataaagctctccataggtgccgtacccaagtgagtcctctatgtcaaaccctgttccaggagctggagaagttattgaacaacattgtgaagagaataaaaaacctgataaatcttccattcccacagagggatttctgcagaagtaagtaagttgcatagacactcagcatgtgatgaatgcaatgttaataggaagcagaagcttctctggaagttgatactggggcaaagattggaaagaggatacaaagcttacagatgtgcagaggcccttccaggcagcagaacaacataaaggtcctaccaggaggccctcgtgctgaaagtgaggagttgaggggaggtgagcaggagagaggttgggtagaccttccctagagcactgaaaagcaactgccccatgtgggactcagaatatctcagaaccttagggcagaggaattgcctggtgcctccaccaaaaccatgccatgaaaactgtctgtgtcaatgagagagttggagaacaaaggtaaagaaatgcacctctttcctttatgggcacctaggtgcatggatacacacctggtgttgggcacagcatcaagaatacctgaacgaggtggagagagggatgggggcaagcaggagagggtaccctgcagtggaggatatgggatggatggatcacttgcaggagactcattcctctccttgactttgctctgtgagattcccaccaatcttgggaggcccagcaggaccctcttgggaagcccagcaggtcagaaggcaaccctgactctccttcctaggcctggtaagttaccaacctttgtctttgcagggtgtgcccaggcagccaaggcagcccaccatggcccagtttctctcagtgttctctgggaagctggattgggacaacaggacagagaccccaggacaagtgaacatgagtcatacgggaggcgagtggttggtgggcaaacaggtggttttcatcctgacagtgctggtggccttctgtgggctggtgggcaatggtgtggtgtgctggcttttctgcttccaggtcaggagcagcccctacatgacctatgtccttaacctggccgctgctgatatggtcaacctctcctgtgtaactgtgatcctgttggagaaaatcctcatgctgtatcaccaggtgacattgcaggtggccatgtttctggagcctgtgtcctatttctctgacacagtgagtctctgtctcctggtggccatgaatattgagagctttctgtgtgtcctctgtcccacctggtgctgccaccgcccaaagcacacctctgctgtgatgagcatcctgagctgggccctggccctttctttgcatgtggttagccaggtttgtgagtaatgggagaagggcctggcatgtgaccaatttcaggcaggctttataatatttcacatgcttatttgtcttgtggtgggcatttccagcctgactttgatcatcaggagcctgtactgcctgaagaactgttcacccatccggatctaccacattgtccgctttgtggccatcagcttcctcgtttggggcctgcccttagt

SEQ ID NO: 1684 - protein, 223 aa, Homo sapiens
MGTNVTKPQDSSYDQIRSEPDLRSSLASGLVSYQPLSLQGVPRQPRQPTMAQFLSVFSGKLDWDNRTETPGQVNMSHTGGEWLVGKQVVFILTVLVAFCGLVGNGVVCWLFCFQVRSSPYMTYVLNLAAADMVNLSCVTVILLEKILMLYHQVTLQVAMFLEPVSYFSDTVSLCLLVAMNIESFLCVLCPTWCCHRPKHTSAVMSILSWALALSLHVVSQVCE

SEQ ID NO: 1685 - DNA, 985 bp, Homo sapiens
  source (1)..(985)
  CDS (201)..(785)
cacactcccaagtactttttcctttctaaattgttcttcacagacctctgttattcttctgtgtttatactccaacttccgaggaactgtatttcagaggagaatgttatctcctacatggtttgcatgatctagcttttctttttctttttctgtttttttttttttaatttatttctgaatgttatatgctgacgtcaatggcctatgattgctgtgtggccatctgttacccacttctttatcacattgccatgtcccctaaagtgtgtttcagccttatgcttggttcctacttcctatccttttctggggccatggcccacactggatgcatgctgaggctgacctgtgatgcaaacaccatcaatcattacttccgtgacatcctccctgtgttccagctctcctgcaccagcacctacatcaatgaactggtggttttcattgtggcaggcatcaataccattgtgcccactgtcaccgtctttatctcttatggtgacatcctctccaggatcctccacatcagttccaatgagggaaggtccaaagccttcagcacttgcagttcccacataattgctgtttctctgttctttggattaagtgcatttatgtatctcaaaccatcttctgctgggtctatggatgagggaaaattctcttctgttttttatatgaacgggcttcccatgatgagctccttaatctacagcttaaggaggaaagatgttaaatttgccatgggaaaatctctgagtaggagaatgtttttgccataaacaacatttctctgtgtatgtagttacaggatggggattctctgtattttattataataattgaggaggaaataatttttcctatttgttatcatgaggatggttagttgagtatcatcctgtcaatttgtctccaattttttatagtagatttttcccctcaccctttgcacatctttccccttttcatcatttttcct

SEQ ID NO: 1686 - protein, 194 aa, Homo sapiens [sequence omitted]

SEQ ID NO: 1687 - DNA, 925 bp, Homo sapiens
  source (1)..(925)
  CDS (201)..(725)
cactctcttgcgtatcctgcgctccaaccaacacggcatccgacgtaacctgacagctgccctgggcctggctcagctggtcttcctcctgggaatcaaccaggctgacctccctgtaagatgctcctactgcccagaaactgtccccaccttctcaggccgcctccccagcccccactggcaacccctgctcctgcaccatgaactctaataaggtgcctagtgcagcacctggcccagggtttcctcttctgtggctcccccgggatcccccagcacctgcctctggcccaggcttccctggaagcagttcccaacacccaggccctcctccatgcctgacccgaagcagagcctgtgctctgggcgggccccggtcgctgacctgccctggcctgggccctcagtttgcctgcacagtcattgccatcctgctgcacttcctgtacctctgcaccttttcctgggctctgctggaggccttgcacctgtaccgggcactcactgaggtgcgcgatgtcaacaccggccccatgcgcttctactacatgctgggctggggcgtgcctgccttcatcacaggtactcccacccattcccagtcttggggtcccacatccctgggtccacctttgtgccatgttctctccacccacatacaggccctgaggccccacatccccatgccccaggccgccttattcacaggtgtccctctggtttaacccagactctgcagccgccacccaggcgtcactcccttatcctggggagatcggtaggggccgatggtgggcagaacccttttccatgcttcatgcctggccctgtgagcccacctgcccgcagccctacttcccaggcccctcatcacccctccactgctcccgtctgtctccatgctccagggctagccgtgggcctg

SEQ ID NO: 1688 - protein, 174 aa, Homo sapiens [sequence omitted]

(The sequence listing continues in the following parts.)
